United States Patent Application Publication US 2006/0194265 A1 - sequence listing, part 3

SEQ ID NO: 341 - DNA, 438732 bp, Homo sapiens
  misc_feature (1)...(438732): n = A,T,C or G
tgtgacaactatactgttagtgacccaatttaaattttaatccctcacttttaaactcatacatttattttaaaagactttttatcaccatcatataatttagtttgtttgttttttagacaaagtctcgctctgtcgcccaggctggagtgcattggtgagatcttggctcactgcaagctctgcctcctgggttcacaccattctcccacctctgcctcctgagtagctgggactacaggcgcctgccaccacacctggctaatttttttttttgtatttttagtagagatggggtttcaccgtgttagccaggatggtctcgatctcctgacctcgtgatcagcccgtctcggcctcccagatttttttaaaaaataaaaacaatgctacttgcaataaatacaagataactattgaaataaatacaatgatagcaaaacagtattattaaatacagccataattgcctgccagaggcagagcggaaggcctgattccttctggttcaaggaagagggattatcaagtgttaaaagacataatagcacaaattgagactttctcctttgcttgtttgtatacgctaggacagaactgacaggggaataactttctcaccatgcgattcaaagaggtcacctgaagaaagcttgcatctggcagaaagtgacttgtagaccacaccgaatgggcatcctgtcctctgaagactgtcaccagaatgacagcaagttcttttgtggggtagtttgacagcagtagggcccagggatggaggactgggccagatgatcaaaatctgcccctctttttggtggacattaggttttcttgtgtgggactgatgggtcggggtggggtgtgggggttcagaacaaaagagaacagattttgcttactgtccctgactataggttgtggagactctaactctgggtctgcttcccaataaaagaagaaagtgatctctggacataaaaaaaaaaaagacacttttctgggggcattacaaggagaatgggaattgccttctccctgcaccatcatctacagtcagggcgggctccgtggatgtgtgacctgcgctgtcacatagagccctgtgtttggaagagctcaacactcggtttaatgctcgattgttgccatcattccatgggatacacactggcagacaaaaaggaggcagaccctctggggaccattgtggaaagagctacaggacatatcttaagagaaaaaaaaagttatagacagtatgtgcagtatggctgtatttgtcaaaacaaaaaattcttaaaattttaaaaacaaacacacacacacttcattattccattttccctcaactggctggttagtgatacgtccaattaccactcttctagggttagcctggagatggagcagacatccttgatttattcatgtttaccagacactcccatttctactcgcttattggacaaggcgaggacctcagagcattctaactccatttacccccttcctgcttatgtgccattggattgcgtattttaattctccctatatattttaaacattagttttattgttttatacagccaagattcatttgtatttacccgtatttccctttctattgctcttgtttcctttctgaatatccaagcttccatctgggaccactttccttctgcctaaagcatacccttttgtatttatttttatatttgagccattcatatggttcaaaattcaaaagtacagaagtgtgtcatgatagatatctttctctcctacccgtgcccctagccaaaaactatacatttccatatgcacatagaacattccttggaaggaaatacaccaaattgagaacagtggtttgtctacgtggtctgaaatgttcatggtgataatgtgttcatgtctcccatatgcaaagaaagagaaagtcagagacaggcagccaggagacccagtctcttctgattgacagcctctcactgtgtcctgctgtgcacgcagtcattctgttatacgtggcctcgtttgatcttggccacagccctgtgggacatgagaggcagggttcctcaatcccaagtctcccattttcatgagcacctactatgccgggtgccacttcatagttgccacgtcactcagtcctcacgacagctctgctagtattgtcgccattttacagatgagcaaactgagggaaacaaaagttaggtaatctgcccaggaggcagagccagggttcaaagcaaatcccaacagtccaactccagagccatgttatcacaaaccccattatacagctgaggaaactgagacccacagaggttgagccctaggctcaaagtcactaagtcagtagtggcagagcaagaactcacatccataacttttggggttaaaatccacaaccctccccctaccaatgtttttttttttctgcacattagaatcatctgaggagctttcagaatgccatgttcagatgttaagaccaaaaaaattggaatcactgattctatttttgtgcccccctcatcttccaggagtttctgaagtgtagccagggtgagaaccactgtccttgcccacaggagaaagggctcagagtcaggctctttggatttcattggatccggactttgcctctcattagctctgtgactttgggtacactgctttaacagttctgtgctgcctcagttttctcacctgtcagtttggataaactgtagtgtcttcttcacgtgaggattgaatgagaccagccgtacaaagacttggaacagcagctagcacaagatgagctttaaataaatcttacccttattatagttgttatagttattattatttttgctgtgtgcctttgcatagaacctgtccccctctgggcctcactcaggtcctctatgtgtgagcacactgtggggtttggactgcagggtcttgaacagtgtcttccagctctaatgcgcctttgtcgcgatcggctggctgggtctcgggccttctccacttgccctcatatttgtggaagcttgccctttctcgtgaatgcagaggcggcaacaggcatgtgcttggagaaccagagaccacttctgtgggacgagtccagcctgtggttatggtattgatcttctcacagccaggatgtgctgggctgtgcagagtggaattgcccactgaggggtggtggctgacaaggtgccagctgccccagagagaggcagagggccctggacggagagtgccttggagaggcagggcgggggccgaggcagagctggggctcatgcccacttcctaccagtgcccagggcacttggtgccagtccttgccaccaagtgccattctgcaccaatgcataattcatgcccccatgtgccaatctgtgccagctttaattagcttctaactttttgtcattcattttgctctgaacaccttataaataaatgatgggcgaggggagtggcgagcagggcaggaatgtgagggaaggaccgtcttttcttcagccacaaaagggaggggtaagcttccaaggctgggcccagggaacctcatgcccctggggctttcctgggggcctccacgctgcagaggggtggcctcggcccacattgtcagccttccagcctgctcctccacaagccaagctgggccgccacagctgtgccaggctccaagggctcacaaactaaactcgggagcacacgtctggtttatggtggcaggcgctgccccgggagagggcgcataggctggggacgatgacggcaggaagcaacaaacagctctttatcagctgtggggtgggggcatgaaagggggagcaggaagggatggggaagctgctatggaggagcccacaggagaggcgtttgtgtgctttaaaaataatcatcgaccctcatggggaggaaagactcgtctgtgagggctgctctgtttttacagtttgtaaagcactttaatgtgtgtttttctcttttgatctgaatggcagccttgagaggtgtttcagcacctgggagttatcatgcccatttatagttgaggaacctgatgcttggaccagtaggctaagacccatgtgaaccgcaacctggtggagcgagctttgtgttgcaccaccctgcctctcttgcattccccaggggcaaggcagcaggggcagaaagcacccctgtggaggctggaaagccaaggtggaatggagtccaattccaggtggttccagggtttggcatgttaaaacaacagatttggattccctctcttctttgcatcctcattctctgagagtgccagtaagccagctggttatttggtgtgtggggatgcaaagacattgaaggggaggtgccccttcctccaagatgtcagcccaggtcaccctgggacaatgcactgtcccctcttcctcctgcagctggtcatgctttctactgtgtatctgcacctccaagcctagctcctccacctccagcattgcttgctgaaaaaaacctgggctcctcgtggggcccccaccccttcatggtctagcccttgctgcctctgcacagcacactccttgcttggtccagccctattgccacactacttgaagtctgtaaactgtgtgctgcccctgtgaccttgcacacacagtccctgcttcctcagatgtccttgctggtcttaccttgccatgtacccttgtctttcaaggctctatttaagtggtctctccagtttggggtcttccctaatctccttggttagagtggattgcaccctgctcggggtcccctctgtcaatgctgaatctagtcccagcctgaaggatggcatcatcctactgcttcccaactgtttctgtctctatctctccaactggactgtagcttctctgaggaccaaaatgatgtcatttgctctttgtgtcctcggcacccagcccacaggctggcacactgtgggcccttcaggaacatgtgttaggtaaatgaacaaacacacagtccctgccttcgagaatcttaaaatcaagtgtgctgtggactaaacatgatcttgaagccgctgtacagatgtggccgcttctggagatccctgggcaagatgccctggatatggaaggaactgtatatcactttttttctttctttctcttttctttttaattttgggaaaggggaggtagcatttctctaacaatgctgactctacgctgctctacactccctactacaatcaccagaggaatcatcagatggtctgtaccaggcagggttctcatggtcgctagcaacagaaatgaactctggctacctgatgcaaaaattgaactcactagttagttaacaggggcagattcaaccagaagactggaggacaggcccagacaacaaataggaacaaaaggaggctggtggctaaggatgcagctgaaaatacaacccaggtcaggcttcagaagtcctggagtcagggctaggtgctttgcatagcttcaaaatgattcttgactgtttacaaacgttatggtccttctcaaggttcaaagttgagagtggagcttctgactggcttgcctagtcatgcactgtgccctgcaggcagaaggcaggacaaatgaggacctccctttttagcttttgcaattaaagcagggcctggtcttaccccttacttcatacagtgggggtcccccagtaggagtggggtttggatgatgctgggtcctgggaagttggcatctctgtggctcttcgtggctgtccaagcgctttcatatccaccccaggagggaggctgggcaggcaccattctctcattttcagaaatggaaacaaggcacagagtggttcagcgacttgtccaggaccacataaggtggcaaggggtgcttctttatcacactggtgtactttccttgatgccccaggggcttggagaggaggcaaatgtttcctgagggaagggctctagggagaacttcgagagctgttgttgaaacagccctgatacggtttcaggaatggaaatcccagaaagacagaaaggtgaaaacttaggtgattcatctcctggaatgaagagattagaatttctgagatgctggttcagagaatagaggctgggttcttccccccagctctgagcctcctgcaaacgccatctcctgcctttggctggttcatgtgcagaagagcaagactgctgttcacctccgggatccagtagctcccatggctgcctggggagagtccctgtgcatgcctccaggcttccgcacatgctgctcctccacctggagcgcccttctgcttctgctgcctgtgacctcctggtcaatctcggctcactgcagccagctctgatgtccccttgtccaggcagcctttctggactcaagatttcatgacaatgaatcaccccactctcctttgggccatttgtccactttgccacacttacctttctaggttgtaactgattcatctgcccctctctcccactgggagtgccttgaagacaggatggatgtcactcacatctgtgtccccggtgtgcggtgctggcctgttcccctcagggccattctctcctcccctctgtggtgctgctctgcatcacagcaggctgaccccgcaaactcccaggtccactgtcttcaggtgggagacgagagggctggggaaagaagccgggatgtgtcttcacactccaccgtctctggcagtagctgtgtttctgtgactcgagcccacaccacacaggcccactgtggtctcaccttccaccgtgtgccctgatcctggtcactctgcttcctcccttatccctccagtctaggggtggcacactttctgctgttgctgcactctgggtcgcctcgccatccagttagaattctcagcccttccattccctgtctgttacacactcacggtggttctgtgggctggctgcatcccaactgacaccccagttcccagcacggtgcttggcacagtgtgtaacagaaggtttgaggggtggagaaccttgaagaacacctcttctcatgctttcattttacgaatggggaacacaaggccaagagaggtccagtgtccagcccgctaccatccagctagagggtgacctagaactcagatcccgctctccggactcctggctccatcacactgtgtaaaagcatgaccacctaagacatgtaggaccacgactccagttcatttgtccaagagcctacttggcatctctgttctgtgactgcacaggcctctcacacaacatgtcccaagggagctcttgctcaggtctccatagtggcctcctcagagggccccatcacaggaaacagcacactgtccatctaccaccacaagccagaaacccagaagtctccttgaccctttgctctatctcacgtataaccactccctgtcctcctggccctgtagatttttacctcctgaaagtcacttctctccacttctacccaccccctcattccaggcctctgtcaccaatcacctagacactgcagcagcctgaggacatgtaagcttcaccagggcaaggatttgtttggcgcaagcatgcgtgtctgtgtgcatgtgtgtgtgcctgtgtgtgtgtgcttgtgtgtgttgttcattgacatatccaaagtgtctaaattcacaggggttaactaacgttttctgtaaagggccaggctgtaaatatttcttgtttttgcaggccatgcggtccctcttgaaattccttatgtctgtagttgtagtgtgaaaggagacacaaccaaacaggccatgtctgtgtgccactaaaactttctttacaaaaacatgtgatgaggcagatttgacctctgggtagcggtgtgctcacccctggtctagaaaatttcttggcacatagtatttgacaaataaatacttttaattgaagcagtctcttctcatcaactgttgcctcccaatcaattctctctctctcttatttttttttagatagagtcttagtgatcctactgcctcagcctcccaaaatgctgccattataggtgtcagccaccaagcccggcctctgaagctttcagtcttaggataaagatcaactcctgattaaggccaacacacctgcacagtctggcccccactccattgtggctttacagtcactgccaaggactagagggaccactcagtgactcggatcagagagggggtgcttaaagccaacagatggtgcaggctcactcaccctcccaagcttcccaggagcgtttcctcgtacgctggaggcacggagctctccccaccctttctggacttcctgacatatgccagctccttcccacctttgcacaagttgattgcgactgcggtcaccaaaccattgttcctggcccagccgttgcctgcagtgggcacctggggcctttgcacatgctgtttctcctgcctaaaactccactctctctcccttgctcatccttcagctcagtcacctcctctaggaggtcttccctgatcccctcggccaggcgccattaaagcactcttcttcctagcactgattctggctgtaattttacctgcttatgtgtttcattgatgaatgtctggttcccctactagagaagcttcatggggcacaaagaccaagcctgttttgttctccatcctattcctagaaactatttcagttagctagcacatagcagtgactgtgaatgaatgaatgaataatgaatgagcgaatggtaaggaactggagctttggaaccagatagattctgggttcaatacccgactccaccacaggggcaagtccccaacctcctaaagcctgtttctcactgtaaaactgggataatggcagggcccaccagaaagactttattgaagatagaatgagttgaggcccagaaagtctcagcccagagcctggctccaggcaggtactgtcaatgtactgactggaacagtgacagctcggaaatcctgtcatgtgagaaatagttttaaaaaatcagaatgcttagccccggggaagtaaagatcaaaggtaggggataaacctcttccattacctgcatatggaccctttcttgatccagctgtctcagaaagccataaagtctctgtccctataggtgtgcaaaaaggagccgggagaccatgactcgggcactgcagacggagctcccgcaggggtgagggcgcctaagtgacctcacgggtctcctccaacccggggtcctccatttctaagcacttggaggcctcttgagctctagtgagggaggaggcgcagatgggagcgcacgagtcgggtgggcaaaggcagctggttggagagaagcgtaggccaagaggccccaaggactagagggactgctcagcgactctgggagcagagagggggcgcttaaagccaacagatggcgcgggctcacctaggccgagcgcccgctcgcccgcccgggcttcccgggagcgttacctcgctctgcctgaggcgcggggcggacgagacgctgggggccccatccccctgcgcgcccctctgcgggacggctggcggcctggcggggcactgctctgtctcgcacctggggcctcttccgcgggcttcctccctgcccctttgggggattcgtagagttgccacagcagccggtgccatgacatcggcagagggcagcttcgccagcactgaaatattcatgccctgagcgcccggcggggctcggcgccgctcccgggggtccgggcggggccgggcgggagctcgggggtcctggcggcctgaggggtgggggagcgccgagcgcgggcgggcgggcgggggccgggcgaggcgggaggtgagggagggagctgcgggaggcggggtctggacggcgggggccgagcggggcgggggccgagcggggcgggggaagcaagggaaagttgatcgcggacttgagcggcggcggcggctcgggagagagggacgcgggctgcaggcgcgatgcttggctagaggacgcgtccgacggcggccggacgctgaggtggtcggggctagtcagcccggcctgggcatggagcgcggggtggcagagcctctggacgtttggggcgcgcccagtccgagcccccggcgcgcctgaagttgcgagcggcgagcggcgagcggcgagcggcccgcggagacccaggagctgccggcacgccgcggatgagccttcgcgccggcgggaagacgcggcggtggccagggccagagcaggcggcccgcgggggccgatccggcggagagcagagcccgaggcgaggcgaggcgcggcgccgctgcacacacgcacacggtacccggagccacgcaccgcctcttccctcctcgcttccctctccttcccctcgccgttcgcccgccgcgcggcggggaagttggtggtgaccgcggctgccgaaccacttgttcccagcgcggccatcgcccgtggcgggcgctcgcggcatccttcggtcccaggcccctggccctagcctcgcgccccgctccgagctccccgacgcgcggcaactttgattcctgggaactcgaattccattcgcgttggccttgggaggacaggcatcccatcccccatccccggtcctgggaccgcgaacatttgggggctttgctctcggcgctacggagagggtccaggtctggggtggagagattttcgagagtggagcgcgttgggatccaatcccctccccttctgagccctgggtccccatttggacagtggggatggggtggggcgcacccctactgcgggctgggcagaggcgctgaggggaactaaaggcacgtagttctcccctcccctcatcaagtccctgtgcccgcgggagaccccaggggacttacacatcctcccaaattcggtccagctatgggaagacgcgcccctcgaggagccgggagccttttgcggctctcgcttcgccttcctggccctggaactggtccgctacgagcggtgctggctgcccccaggagctggcacccgggagcactgcccctcatctccaccgtaggtcagcccaggactcgagcagagcccgcgtgttccaaggcagtggcggcgccagccggcggggactctgcctggctttctcggagcgggcacctagagaggctgcctccgtgctgtgagcggagatccgatgccagccgccgccccactgcgaccccagccccagccctagtgctgtcagcggtccactgggaggaaattagcctttcctcggtagtaatactcccccatcctccctagtaattcagaaagcagagccttctttttctacgtcctttgccctctcagaccagagctggcattgacattgacctcgccttccagccccttgggaagtgccccaaccctaatttggattttgaaataagctagagagacacaggagtgtgtgtgtgtgtgtgtgtgtgtgtgtgtgtgtgtgtgtgtgtgtgtgtgttgggtggagtcagaccctcacacagggaagaattaggttgtggggtgtggggtggggcgggctttaagaacctagttggggccagttgcatggtgatgatgagtcagcccacgatggggagagctggcttggagttagtgcttggttcgtggtgcaggggtaggcgcactgcggtcagcacctacaggggtgggggcactagatgttactctgccaaggaggagctgggaaggggccccttgcctgggggaatagcaaggcttggttctggctgccagggctggggagggcaggaaggcagagtgtctcgtggtagagggtgggtgtcccccgtgagttgggaaggtggcacacagaagccactggtgtgaaccaggaagctctgcctcgagtgctggaggacagcagtgaggggtgggaggcccagagctagcatcctggccccgtctgtgctgggtccgcatatacttctcagacttggccttcctcacctctaaacagctgggctcctcacgtctgcttaccaaagggcttgatttgagggttgtgatagcagatggtcctggttgcctctggaatagctcccccactcaacaagctaccttacctgcagtttcaccatttgaggttcatttatttgagccaagtattttaaagggcaccttcctgaagtgctcatttaaaatgcacattcttctgggaggtgaaggtgtagcggaaccttgctcctcagagtgtggcctgtggacatgcagcgtcggcatcacctggggacttgttagaaatgcagactcttgggccccaccccagaccttctgaatcagaatctgcatttggtaagatccttgggtgactcatgtgctcagtaaagtttgagctgtggtccacagtgccttctctaagaggcattgcatagttccttggtgcagagtgttgtatagggcagtggataagaacacagagatgagaatgagattggagcttctctctttggccagttttgctaggctcggattaatagtccaccactggccccttcgggttgtaccatgctaatgccacaagagtgtttgtgttttagggttttttaaatagattagaataacatctcagctttgtgtgcagtcaaaactgtacatggaactgggtgcagtggtgaactcctatagtcccagctaatggggaggctgaggcaacaggattgctagagcccaggagttcaaggctgtagtgtgctaggaccgtgcttgtgaatagccactgtactccaggctgggcaatataatgagaccctgtctctaaagaaaaccaacaaaaacccctgcacatgggccagaaagaggtgagtggagggggcagggtttccggaagctgggtgtacacactctgcctctaggacgcctgagacggagactagatgctgtccctcaagcagaaggaattgagcaactactctccacctcatctgcccctcccagatgggtggatcagccaattaataacacctctcagcggccttaggacttatgcagaggggaggagcatgagagccaatttggaacagcctccagaggggaagatactgaccaagctctcccctgaccccagcctggactggacatcccacttctactgccctaaggtggttcgaggcctctagcttcaagatacagggatgatgccgaggcatggtggcaagttatacccctggtcctctggatgatgaccctgaaggcatcaaggctggcctgagagtaggagatttgaaacactgctggagagatttggatcagaggcctggtgtagccgatggtgtcacaggtgaaaggtcatcgcatggctcaggcatcccaccctgcccaaagaggcagtccttcccctaagctagcctctttcccagagagagggcagctctgccaggggacaaggtgatgaggaggaactatgggagacacagtcatgggccttacaaagagcgagctaatgtgaagacattcagacatcgatttgaaaatcagtgagttcaaaaatagttaggttaggctgggtgcagtggctcacacctataatcctagcactttcggaggccaaggcaggtggatcacttgaggccaggagtttgagaccagcttggccagcatggtgaaacctggctctactaaaaatacaaaaattacccagacgtggtggtgggcacctgtaatcccagctacgtgagaggctgaggaaggagaatcgcttgaacctggaccatggaggttgcagtgagccgagatcatgccactgcattccagcctgggcgacagagtgagactccatctcaaaatcaatcaatcaataaaaataatagaaatttaaaaataactaggttaataagtctcactgttttcttgaacccccaggtcttaatgtgtaaagatgattgtaaaaattgacctaatttcccattgaactcattgttttcaaattcagttttagttgttttttaaacattgtattttattttattttgagccttgctttgggttcctcttggcgctggggcaatcctgtttgtccatgaatagatgagcaaggtcatttacaagtcgaaccctactggataggttatttcagggtgggagtacttttgccctcagtagagaagtgcagatcagattgggttcttctgtattccagcctcctgtgcataatgtgggtgacactgacgctgctcaggagtcgtcaactccaggaagccctcctgagtcctcgggtggggtggctggtgcgggtgggctgcccctccagcctgtgcctccctcgctcacggtccttccttggtgcttcttaccattctgcatggctctggcctctcagtagccactgagctcctccagggcacaggctgcatctttttcctccacactagtggagtagttggtgctcagtaactgttcattgacccaatggcttatccctgggtgatggttctcttaccttctccagccctattcttaagtgatcattaacacaccaaccgtttgctgtgcctatatccagttttaactcttcatggtggtactttccagatgggtggtgaatgtccaccttgctgtactctggactctaggcatctgctctcggacatttgcatgcctagagaggtgaggatgcagacaaaagagtaaagcatgtaacacaatagggagtggtggggactggggagaactgaaaagcataggccccatagagaaggggcaaaacccatctacgtgatggaagtcagaataatggttattcccgggggcataatgactggggcacaggggtgctgctggcgtgctgcacatttctaatgcttgatctgaatgtctgcaacagtggtgaatgatcatttttgcaaaagagccaattcggaaaacattagaacatttataggccatgtttatttggattcaacatgaaaatggctttattgaatcccatagggcagaaaatgcatattcttaccaacctcattgacgagaaaggtgtcagccagaaaactggcatatttaaaacgtagccacatggagacagttttctagtctttcagtgtgaaagttgatcaggatctgtcaatggtgagtggggtgggccgctgctgccgcccacagctccatatatttggggcctcagggtttgcggtcttggggccctgtgtcacctcgataataaatgttggcatagctcaatgtattggtgaggggaatgggaatatcagacagcccttctcagcctcaggggctgcaggctgtgttgctgagagtgacacagcaggttcagttttagcattcatattttttacatattctaaaaccccaggcaagtgttggttattattatgatcataatgcattcacttcgtgattttcataaggcagtttgcaggccgacagacttgatattgagcaccagttcttccactagagctctgaagccttgggtctggcttagttttctcatctgtaaaatgggaatagtttttcaattgccctataggcttgctatgagcattaatgagaggacaactttacaaggcattgtgtagtacctggcgcacagtatacatgcaaaatgtagtagcttttattgtatccctttgacttacttatatgttaggcacattgtattctagtaaagaggtgaaaactcttcttattttcagagcttgacaatctatacattcataaattgaattcttcctgagtgtgtgtgtgtgtgtgtgtgtgtgtgtgtgtgtgtgcacacgcgcgcgcgcgcacatgcgcgttggatgggggttgttgtggtttttcttttgtaattacttactgataacatttaaaaatccagctggccaggcgtggtggctcacgcctgtaatcccagcactttgggagactgaggtgggtggatcacgaggtcagcagatcgagaccatcctggctaacacggtgaaaccacgtctctactaaaaatacagaaaaaaaaaattagccgagcgtggtggcgggtgcctgtagtcccagctactcgggaggctgaggcaggagaatggggtgaacccaggaggcggagcttgcagtgagccgagatcgcgccactgcactccagcctgggcgacagagccagactccatctcaaaagaaccaaaaaacaaaaaacaacaaccaaaaaaaaacaaatccagcagtctgtataaacatctagacttctggcattgctgattagaactggcaacattgtgtccatgttcccaatcaacagttgaacagttgttggttggagctgagttgccggtacccctttcatttgcttgctttctctttctctttcttccttccttcctttctttctttctttctttctttctttctttctttctttctttctttctttctttctttctttctttctttctttctttctcttccttccttccttccttccttccttccttccttccttccttcctttccttccttccttccttccttccttccttccttccttccttccttccttcctttctttccttctttctttctttttttttttgatggagtctctctctttcgccaacctggagtgcagtggcgcaatctcagcttactgcaacctccgcctcccggattcaagtgattctcctgcctcagcctcccaagtagctgggactacaggtgcacaccaccacgcccagctaatttttgtatttttagtagaaacggggtttcaccatgtttaccgggatggtctcaacctcttgacctcgtaatctgcccacctcggcctcccaaagtgctgttttcttttaaaaattatttaatgggccaggcacagtggctcatgcctgtaatcccagtactttgggaggccgaggtgggtggatcatttgaggtcaggagctagagaccagcctgaccaacatggtgaaaccccgtctctactaaaaacgtaaaacatttagctgggcatggtggcacatgcctgcagtcccagtttttcggaaaactgaggcaggagaatctcttcaacccgggaggcagaggttgccatgagccgagatcgtgccactgcactccagcctgggcggcagagcaagaccctgtctcaaaaaaataaataaataaataaattcacggaagaatacatacataaaataatgtcaacagatcttaagtggaagtggtgaattttcgcatatatatacacctgtgtaaccgcctcactgccatggagatacagaacatctccagtgccttggcaggctctcttatgccccctcccaccccatgttatcccactccagaagtaactactcttctgacttcactctgatttatgtcgcccctgtgagttttgcctgcagctgccttttaaatttacgtgagcctgcagcttgcagttctccacagtcccgaccattccctattgcctcactttggaccccactttattcatttccgatacccccttgctcctttagccatttgagtttgtgacctgtactcaaggtctggaagtgttctcagagaccagctagtcttaccattttacaagtggtgaaactgagacttggagtcagagagtaagcttgttcaaggaacccagatgaagctgagcctgaatgctggccagtcaagggcagagccctgctcttcccgctccagcacaaggagtgttgaggagggcgggcatgccttgtctttcagaccccagcagccccgggcctggccctgcaatcagccacccagagcctgccacaggccaatcagccgaagagggtgggagtttttttctagcctgtgtcttcctggagatgcatcttccttgaggcaggcggttagcgatatcaccttcctctttaaaggccatgctccatttggagaggacctgagatgccatttgtgacaagggccatgcacaccaccttgattgtgtctgtttctgaaagaaggctgtaatttgggagccagcgaaagcaagggagggagggaagtagaggagagagcaagagagagtgggagggcagaaagggaaaacaaaaagggcagccgcgactctgtctgggtttccatttgtatcactaattctgtccccgaggaatgctggctttccctggcttcgggttagtgtgggctgagtccctctgagggatgccctttagctctgcccacttttcttctgttctttgcctacacagacaggagattagccatcctgccctggcttataagggactttattctcctccagcaccccatgttccttctcctgctccgaactgcccctggcccgggaggaggctgatcttgcccttctttcctggagccaggatcactgatgtcatctccagggaaccagtggcaatggaactctgggctagacctttctcagacactctatgggggcctaaggctttgtcttagagggtgaggcatgggtagactatctttttttttttttttttttgagacagtgtctctccctgtcgcccggactggaatgagtacagtggtgcaatctcggctcactgcaaccgccacctcccagattcaaacaattctcctgcttcagcctcccaagtagctgggactacaggtgcatgccatcacgccaggctaatttttgtatttttagtagagatgggatttcaccatgttggccaggctggtcttgaactcctgacctcaggtgatccacctgccttggcctcccaaagtgctgggattataggcatgagccatcgtgcccagccacggatggactttcactagaaaaccagaacataactgggtggtggggtgggggatccttccaaacccatcctgtctgtgctttaagatctcacatctactgttggggaggccattcctcagccaatactgagcatcacctgtgtcccaacctccgtctagttggtgggacttcaagctgagagtccacagctgcactgcccagtagaaaaataatgcaagccacatgtgcagttttaaattttctagtgtccacttggaaaaagttaaaaaaagcaggtaatttttttttttttttgaggcaaggtctttctctgtcgcccaggctagagtgcagtggtgagatcacagttcattgcagccttgacctcctgggctcaagtgatcttcccacctgagcctcccaagatgtgtctccctatctctgtgctctttctgtgagaaggataagtattaaattcatctttctgttgctttttgcttttgggagttttccaagcagggagtgacacagcctagaaagctaaggaagttgcagcaacgtggagtgtttgaggctttcctctggggaagagggtctggcctgtccacagcagagggggcttggatgccagagtatcatgggcacttagcagacctggggcaatctctgggggcagaagccctggggccaggtaaatgcaaactttccatgctgtctgcacttctcctgtgatataccctgggccaagggtgtcagggttcccccaggaggcattcaggtggctccagggtccagacaactgggaagacactgtggcaaactgcacatacttacctcggctaatgggggcccctgctactgtttggtctatgttgctaagcagcagtacagaacagcttttaggcttgccggacactttgatttttcaaaagaatctaaacatcgagattaaaaaaaaatctttctatttgagatgttagcaacgaatttaatatttgaaaacacagcgaggccattcattcatttaggaaatagtcattgaacccttactgtgtgtcaggtgctgttctaggcccttggggcccatcagtggcccctacccttgtgaagtgtctatggtagggaaaaccctttggcaagctgcatgtggcccatagatggccagtttatgaccatagacttagtgtcagagctgacagtagtaatgagaaacatttattaagtactgtgtgccaggccctgagcttagcacttcatctaaaatacctcacttagtccttacaacaaccctacgaattagggtcagctgttactcttatgttacaggtgagaaatatgaggcacagagaggttacgcaatttgcccaaagtcacatagcttgcaggcggtgaggcagatttttgcatgaaggcagtctgattccttgatcattactttgtactgcacttacagaaggccagagccaaacctttcactatacagatggaaactgaactcaagaaaggacaaaagtcccacctgggatccacagagaggcaatgacagagctggggctgggttctgggacaccccctttctatccagccctgccaggtgtgtttattacagtcctgacttcccctataattgatcctgggctgaggttgaatgttcaggcgcctccagcatttgggcaggggatgtgagagagtgaggctggctgggatttaaacatccatgggagtgaatgaggtggatggttttctaccctgagcaggttacccccatctgggaaggccatgtatgtcagggtctctgcacttgcctggaccccagcccttcccatctgtaaagctaggggtttgcatgcagtggtgtctataatttaaccccaaccccacacctttccccgccattggccaggctggctcaggagctcttgggtatttctggccgtgcatcttagtcctaagctgaccttagcctgggctttccgggtctcgacccaagtaaccttatcagagcttgtagttttatcatgttgctgtatgggtggtaatcatgaggcagtgaaataggtgtgaataatgaagaaaaatgcccctggcaagtgtgtgaagactttagtgatagtcctttcattgacccaagtgctttaattctctgagccacagttttctcatctgtaaaataggggaaaaatccccttctgaccaatcacttgattcagtgagtaggggtctctcatgagagacataaaagtgctcagcaaaatgagttgcgataacctaaaaatcgtgctatgcaaatagtatgtgtcattgtaattaatttttactaagtattaatgacttgaattatgtgggatttacgagatatatacagttggacatttaaataacatgacgatctcgaaaccccaggagcaatgtctttgcaatggcttgatgtaactctttatgctcactcttaacaatttgacatccatcttttttggatttgtacaagtcaattgatatttattaagcacctactgtttgcaggatactatgcagggcacactgagatacagaagtagacaaagcatggcccttgtcccccatgagctctcacacttattcagagtgctgtattcagggcaatcaattcaggatgtgtgtgtgttagaagaagagagagagagagagagaaagagagagaattgcatctccttaggaaatatcagcatctcgtgcctgaccaaggccaaggttttccttctctgatcttcctcactgcccccaaattctccccctcacctgaagtgctggtgaccgctgggtctgagttaccatgggatggctacatcctaggaggggctgggacaggcatggggtgtagagagtgggggtggccatgggctaggacctgccaggcagctgatctgccaagctgtgtctgctgcctgcctgagggctgttggaaactggagctcaggccggaagaagggagcccatgaataatacagcgggagagaggctgttaactaggtgacctcgttgcacctgtgtgtttcacagcttccttgggagccgctgtggagggcctgggtgtcaggggcaagggcagaggggaatgggaaaggccaggtgtagacatagtttatctgtttttccttcctactttcctttcaactgcctggctcagaagtccgtggtactaacttgctgcctctcctttctagtgttgatgcagacggccttggccatgtgtgcacgtgtgtgtgtgtgcatgtgcatgcattggctgatgtaagggtgggctttctcttgcaccctgccccttggcctgatcacaaggtttgtttgctgaactggatatcaggcctgcccctagtctctggaacagacgtgtgatgtcacttttaagtatctggctgctgtagactaagaaggctcctgggcaggactttttgtctcctgaggctttggcctctgaccaaggggccctgtttgatgtaaggggcaggggattccctggtgttcccttctaatgtgtggggtccgtcatgaagctctggctaaactcatccagacctgacacaaaggggctggtgaaccccagtacctctcaggtagacaaagaaagtctctgagcataggtgagggcctcttccaagggcaatgagcttaaactcattgtttaagagcaaagggaactgagaggaaactgtaccgggaggggttaaaggcaaacccaaggaaaaacttgttatgtggtatgttgggtaagggacggaggatggggaggcgctagaattcattcccagagtagactggctttaccttccacgtggctgtttcctgactgctggcctgggggtgggatggatgaaatgatttgggagtggaaagcagagggcacccgggcagtgcttgggacaggaaaaggtgcccttggtgtctacttcctcctttgttctgagtgctgtcagcaggggcctgacccctgaggagctccaagaccctcttccctaggactagaaagggacttctctccccagacccatgctgcagcctcaacctgcttccccaggcttaagagcccagtcccatgggctggggcctgcctgctgccctgaagtcttagaaccaggctttcaggagggtacacacctcatcgctgtccacagacacactggcctgcctgtaagaaatgggaagcatctctccctttgtgcctggtctgggtgggtgtggccagggctctgagcagcaggccttacctctgggcccaaaccctaaatgagaggaagtgtttctggctctggagccagaccacccaggttcaaatcctagctctttcacttatgaactgtgtgggcttctggcaatttaattaatcattactcatctgtgtcttgttttctcttccgcaaaatgagaataatagtacccaattcaaagggttattgggaggattaaatgagttattgcacataaaatgcttagaaaaagtgcttggcacatagtaaatgttcaacaaatgttgctattgtttattattatgctactgttattctcagcttctgcattctgggagctcacagtcttgcaggctgcctgggggtgccaagagtaactatcatacctatgagaaaggctgtaggttgagggggtgcagtcctggaagatttccaggactgggaggtcccttgccctgaggctgcagctttgctctatgcccaccagcactgtgcttcccatggcaggagggcaggaagagaggcaaagcaggacagctgttagtagcactgatgttggtgctaagagacttcttaaggcaactttttaaatgaagtataatacatgcagaaaagtgtgcaaatgtgtttatcctgagttgttgcaaaagggccatgctcatgtaactgccacccagactaagaaaaaagtgattaccagagccattacccgtcatcctctgaagttaactcctatcctgacttctaatacagtagattcattttgcctattttgaactttatataagttgaataatgcagtgggttctctttgtgatgtttccttctgcttaacttgtttgtgggagtcatcctgttgcgtatagttaatgtgtttctcttcattgctgtgtagtattccatgttgtgaatataccacaattcatccattctactgttgttggactggcgggttgcttttattcttggctattacaaaagaggctgttaagaacatttgtatgtgtgtcctttggtgtacatataggtatatgcaattctataagtatttgactatccttttaccaacacaagctttagagcttaattactatagctttacagatgtagtcttgatattgccagtgtaaattcttcagttttgttcttcttcaagactcttgtttaattttggctttctgcatttacatatacattttagaattggcttctgaaattccataaaagccctgctgagattttgattgagactgcatcaaaaatatgtaagtcaatttgaggaaaattgacatctttacaatattgagtttttcaatccatgaacaagatatactcctctatttttctaagttttaatacattatattcaataatgctttttagtgtagcattcttatatttttaaaactggatttccttctatgtgttttatgtttttcgatactattgtaagtaattcgaaattttttcattttgtattattaacttgtcatatagaagtataactgattttttcattgattacacaaccattgttaaatttacttatttattcttataggttattgcattttttgatttttaaaaacatatatgattatgttttctataaataataacagttttatatcttcttttacaatacttatatcatttttcttgctttattgcaatggcaaggagttctagcataatattgaatggaagtggtaataataagcatacttacttcaattctggtatcaaggagaaagctttcaatattttatcattaagtgtgatgtttgctgtaggtttcttttaatagctgtcatttttcaaattaggaaagttttcttctaattttttcaaaattatagtaaaatgtacataacataaaatttaccttttaaaccctttttcagtgtgcagttcagtggcattagtatattcacagtgttgtgcaactatcaccactatgcatttctaaaacttctgcatcatctgaaatggaaatactgtacccattaaacagtaactccccattccttctcccatctgcccatgtaaccttgatcctaatttatttctctatgaatttgcctattctgggtatctggtatgagtggaatcatacaatattcatccttttatgtctggcttatttcacttagcataatgttttcaagattcatccatgttctagtaggtgtatgaatttaaggccttttaaaagctgaataatattccatgtatgaatataccatattttatatccattcatctgttaatggacatttggattgttgccaccttctggttcttatcaataatgatgctatgaatgttggtctataaatacctgtttgagtctctgctatcaattcttttgagtgtatacctaggtgtggagttcctggataatatggtaattttatgtttaattttttgaggaactgccgtactgttttccattgtagctgcaccattttatattcccactagcaatgtacaaggctgacaatttctccatttccttaccaacacttattattttattttatttttcagagatggttgtcttgctgtgttgaccaggctggagtgcagtggctacactaaactgtagtgcacagttctaaactacactacacagttgtgcactacagtttagaactcctgagctcaagtgatcttcacgcctcagcttcccaagtagctgggcctacaggagtgtaccactgcacccagctaattttttgttttttgataatagtcatcctaatgggtgtgaagtggtatctcactgtggttttgatttgcatttccctaatggctagtgatgttgagcatcttttcatgggcttatttgtatatcttttatggcaaaatatttttgaattgggttgtttgtcttgttgctgttgacttgtaggtgatctttatatattttggatattaatcctttatcagatgtgtgatttacagatatgttcaccgtcctctgggtggcttttttgctccatagatagtgtgctttgatgcagaaaaatttttaattttgatgaagtacaaatacctttttgctgttgttgttgcctgtgcttttggtgtcatatccaataaatcattgctaaatccaatatcgtggtttcccctgtgttttcatctaagaagtttatagttgtggttcttatgtttaggtcttttatctgttttgagttaatttttgtatatggtataagattagagtccaacttgattattttgcatgtggatagacagttttctcagcatcatttgttgaaaaaactgtcctttccccattgaatgatcttagcacccttgttaaaaatcaattgtttgtttatgtgacagtttatttctaggctctcggttctgttccatttgtctgtaagtctgtctttatgtaagttccacctttttgatcactgtagctgtgtagtaagttttgaaatagaaagtgtgagtactccaactttgttcttttgttttttcaagatcgttttgactatttgggggtactttgagattccacataaaatcttagaatgggtttttctatttctgtgaaaaacaccattgagcttttgataagaattacattaagtctgtagattgctttgggcagtagtgtatctgaacaatagtactatcttaacaatattaaatatggtatcttaacaatactaagttttccagtttatgaacatgggatgtcttttcatttatttatgtcttctttactttcttttccttaaaattgttttttttagagatgaggtctcactatgttgctcaagctagaggcaaactcctgggctcaagttgatcctcttgcttcagcttcccaagcagctgagactacaggcatgtgacaccatgcctagcttagcaatatttgttagttttcaatgtacaagttgtttgcttcctgggttaaatttatttctaaatattgtcttctttttgatgctattgtaaatggaactgttttccttatttccttttctgattgttcattattggtatttagaaatacaactgatttttgtgtgttgattttttgtactgcaattttgctgaatttattagctcctgggttttgtgtgtgtgtgtgtgtgtgtgtgtgtgtgtgtgtgtgtaattgttagagttttttgcatgtatgatcatgtcttctgcaaagagaaataattttacttcttcctttccaatttgcacaccttttctttctctttcttgtctaattgctctggctacaacgtccaatactatgttaaatggaaatggcaatagaaggcatccttgttttgttcctgatcttaggagaaaagcattcagtcttttgccattgtgtatgatactagctgtgggcttttccatttatggccacttttgttcctttttgttaagagttttttcataaatgtgcatagaattttatcaaatgtatgtttgtgtctattgaaatgatcatataattttccttctttcttctgctaatgtggtaaattacactggttgattttcaaaagttaaccaaccttgcattcttggaataaatccaactttgtcatgatgtgttattcttctcataaccccttatctgttattgcaatagctacaacagcttttgtttgactgtattttggcataaatgaattgctaatgttctgcttaagatttttttcatctgtgttcatgtgattttttctttcttgtaaaatcattgtcagattatagtatcgagttctgctgacctcataatacaaattgggaactgttccttctttttctgtttgttttctggaggagtgtggataagatttgtgttatttttatccttaaaagtttagaacaattcgatggagaagccatgtgaggttagatttcttagtaggaaagttataaagtacagtttcaatttctgtaataaatataggaccatttatattcttatgtttttgtgtgtcagtgttagtacattgcattttttagaattttatccattttatgcgtaattccaaaagaattgacataaagttatttgtaaaatctccttaattgtcctcatgcatttttatactctctatagaatctacagtgatatcttttcatggatgaaattggtaacttgtatcttctctttcatttttatttctttattattattgttattattttttagatagggtctcactctagtgcccaggctggagtgcagtggcataatcacagctcactacaacctctacctcctgggctcaagcaatcctcctgtcttagccttctcaggaatgcactatcacacctggctaatttttaaattacttgtagagatgaggtctcgctgtgttgcttaggctattcttcaaatcctgggctcaaatgatcctccttcctctacctcctaaactgctattacaggcgtgagccactgtgcccagccatccgtctcattttctttgtcatcttattgatcactggattaatcaattgtattgatcttttcaaaaaaacaatttttcagttttactgatttttgtgtattaaattttgtgttctatgtcattaatttttcatcagaatttgtatttcttttcttcagttttaatttacttcttaaaatactttttgagatacatacatagctcattgttttatagattttcttcttttctaaaatctgaacttaaggctgtaaattttcttttaagcacagctattagtatgtcacaaattttgatgtcatatttttattgttgtgaggttcaaagtgttttctaatttctgttatagtttcctctttgatttatgggtttttaaacctcattgctttatttccaagcatttggggatttcatactttttacagttgtttttaagcttaattctgttatgatcaaagaatatacttttactgattccagttctttgacatgttttgagagttactttatggcccagcatggggaatttttataaatatttttcattgtcccacaagaatagtgtttattctgttattgtatactgtgttcaattttatcaatgaggttaaatatgtacatcttatcattcagatattggtgtccttactgatttgtttttcaccttttctatggttattgagtgcagtggcatgatcttggctcactgcaacctccacctcccaggttcaagcaattctcctgcctcagcctcccaattagctgggattacaggtgcgcaccaccatgcccggctaatttttgtatttttagtagagaagtggttttaccatgttggccaggttgctctagaactcctgacctcaagtgatccgcccgccttggcctcctgaagtgctgggattacaggcataagccactgtgcccagctatagcctgtattcttaacttattagagtaatttttttctactatctcttggacaaagctaggactttggaacactttaactccacttactccatttctacctttagtgttagtggttgttataaattttaattgtatatatattttacatccataagacattattttctttcagccagcattcgtttgcttacatatttaccctgatattctttattcttcattgtattttacattttcctttggagtaattttctcattgtctgaagatgtctccttttggtgtggatctgctattgaatttttgcagtttttgctcatctttgaatgtatttattatacctttgctttttatttttagagacagggtctcactctgtcacccaggctagagtgtgcagtggtgtgatcataggtcactgcaaccttgaactcctgggctcaagcgatcctcccaccccagtctcccaaataggtaggactacaagcatgtgccaccatgccaggcaattttgaaggatatttttactgagtataaaattttcttgtcacactaaagaggtcattcatttcattgccttctggctcccattgtttgtttcaaaaagtcacctataagttttattagcacttttgaattaatgtgtcttttctctctggctcctttaaattttttttctttttttgttttgcctttggttttctttttttttctttctttcttttttgtcttttcctttcttcttttcttttctttttttttttaaattgagacggagtctggctctgtcacccaggctggagtgcagtggcacgatctcggctcactgccaacctctgctgctcgggttcaagtgattctcctgcctcagcctcccaagtacctgggactacaggcgcacaccaccacacccagctaatttttgtatttttagtagagacagggtttcaccatgttggccaggctgttctcaaactactgacctcaggtgatccgcctgcctcggcctcccaaagtgctgggattacagatctgagccaccgtgcccgaccttgcctttggttttctacagttatacttttatttatcctactttgtatccttaggatttatccaatctttggcttgatatttcaatcagtttcaaaagattttcggtcattttattttcaactattgcttctgacttaatctctctctttcttcaggacttaaattatacacatgtactagatattttcaccatgtcccatatatctcttaagctattttatcactttctcatctgtccttctttttctttgagacaagttctgtctctatcacccaggttagagtgcagtggcacaatctcagctcactgctatttccacctccagggctcaagccatcctcccagtgcagcctctcaagtagctgggactacaggtgctcaccatgatgcctggctaatttttgtatgttttgtagagatggggttttgtcatgttgcccaggatggtctctaactcatgagctcaaatgatcagcctgccttggccttaaaaatgctggaattacaggcatgagccactgcacccagctcattccagttattttctgcgggtctattttcagttcactcatcttctcttcaactgtatctaattcactgttaaacccatctattaagatcctgattctaattattatattattccttttgggaatttatttttatttgttttgaagtttctagttccttggtgacatcattcatcttttttcaactattgtcttgaacatattaatcactataatttttaagcccatatttgataatctagtaactgagtcacctatgggcttgtttttattgactgtttttttctttctcctgtttatgatatagctagtaatgttttaatgaatgtcagtcatttcgtatgaaaaattgtagaggatctgaatgatgctgtttcttttcagggaagattcattgtatcatccagcaggcagcagagcagctgatcatcttaatccagtcagggcctgagctgactccagattcggttagtcattgtaatgcttcattttcatctagttcatccacagtccatcagcaactctccaggggtctgagttcatgtctctgtgcctccctcctctctgggatctgggatcctcaagtccttgctgccttgttagccccaactcaatcttgatctccccaggctcacaggaaggccaacattctgcccgctcttccattctcattctgtgccaaagctctgagtgcaaaagaggctctcagaagtctgggcttacttctgggagattccgttctctggatcgtcataccgtagcttctgtctaacctgacggttctctggtaccttcaagtggatttttattttttggacccaattttctagtctcatggagattgttgacctgccatggttattaaatcataattgcaagtggtacccaattgggatttaaatcctggttcactgtttactagctgagtaaccttgggttaatgacctcttctctcttagtctcaatctctttatctgtgaaatgggtatagtaataattgcatcctcctcatcagatggctgtgggaactaactaataaacacaatgtttgcatgtagtatgcactcaacaaaggatagctactataataatacatttttagctttgtttttgttattgtactatcaagtaagaaaaaactgtgggaaggtgttaggggtttcatagcatgactttgaggggactgagggttagtgttcctctgtggcctcagcatggattcagccacccacttcctctccctgccctctaagacatatgcatactctcccctccctctatggctcccttcccttctccttgcaatacctttcttctccttaggtgggcctgtcccagagctgcttgtgctacaggaatggactctctgaagaatgaagtgaccttgagggggaatggagcaacatcccttagcctctgctctccccctgctccctgtccaccccagtacatcactgtgccctttccagtgggggctggtatgagaaaggccctggaggcaacacccaggccctttaacatggacatgcagggacattaccccatggaaagtctctagcccataggaaaagggcactggagggacactcagatgtgaaaaaccacctggaggtttggtggttttgaattctcctaatttccccctaacattttaattaatttttgagcatgcagaaaggtcaaaagacttgtccagtgaacccctaggtactcaccactggaattctatagagtacattttgttacatttcctttactttttctatctattcacttcccatccttccatcagaccattgttttggatgcatttcagagttactggtgaacagcagctcactttacctgtaaacacctcagcatgtgtatcagtaagtggtgaactcatctaatttaacaatcaaaagtggggacctgaaactttattcaggcaggagaacagctgtttaggggagagtgggccaagaaggggagcaggtgatgtcaccaggggtttcacttggggcacctgggacccagatggtgaggctgagcatgtctctcacctgccaggctgtagggatggagtctgtcccggctactgctggatgccttgcactcagcagctatagctggtgctcaggaagggtttattgagccaatgaattacttcctttaaaaggcgggggttgactgtgtgactccagagtccagaaatccaaatagggagggaaagttactggaaggcagattggggtacattagaagagcaatttgtctttcttcctttctcttttctaaaataccaaattatctttttttttcacttttatttttgggcaggcaataataacatatgtagaaaattcaaaaggcccaaagtggaatccagtgaaactcttctctcccacctctctcctccagacacctaggcttcgctcccagaagttgtccttttctgctttctcagtgtcctctccagtagtctatgcacacacatgatgatgatggtgatggtgatgatgatggtgatggtgatgatgatgatgatggtcattatgatggtgatgataatgatgatggtgatgatgatggtgatggtgatgatggtaatggtgatggtgatgatggtgaaggtgatgatgatgatgatgatggtgatatgatgatggtgatgatgatgatgatgatgatggtgatgatggtgatggtgatgctgctgctactaataatagcacttattgggaacttaatataggtgagtttgtattccagagatttcacaagtattatgttatttgatacttataacaaccctatgaagtaggtatgactattatctccatttaagagattagggaaactgaggcacagagcagctaagcagctcatgcaagctcacatagcaagtttggcagtcagcctggctgctctcttggcctctgctttactcacttcagcatttctcggcaccacccccatccggaaggtaccccccgtcgcctggctatagtaacctcacagagcagcaggctggctgaggaggtgctgagctccctgtccctggagagcattcaaccataggacccccagaggctctctgcaaatagctttgttcctttccccccaacccttggtttctgctgctcccctgcctgtggggtctgtcattctctccagacttcagaggtctccaggttcttatactgctctctttaacccccagataggagccctttcagctcctcataggaaagatgaagcctgtgatcccctctttgtttgcaggaggcagtgttaggcccagagtgggccttgggtaatgcccggtcagacagcaaggctgtgtccagccaggagcggttccactcctgctccctgcccagccctctgccttctgccaccatgtttatttaacctggcctgttggccccctgcccttgcgccccaccacctgccccacctgaggagaacctgtgtgcctggggagtgggtgggggcatatgagaaagagccgagtaaaattcttcactgggaacaaatctcattttcaagaaagtcttgacaaaatgaggcattaaattacaatatttcggagagcgtcgtaattctattgcagacagcccttcatcatggaatctgaaagctgggaaaatacaaaactcattagattaaaataaaccacctactgctctggagaaaagcttatttatcaatatcaatttacttatgattactctggcctgcaatttgttatttttaaaaattatgatttgtgtattgctcatgcagatgtgaaatattttttcttaaattgagtattttaaaaaagatatacttgtccttagtaaaggttagaaagtagttactggggaagggcaggagggagaaggctagaaaataaattaaaagaggctggtgtggtggattgtgaggaagcgtgtgtgtgtgtgtgtgtgtgtgtctgaatgggggcaaatgtggacacagtgaactaggagtcgtgtgaagcttttgggtcattaaaagaggaagggtgttaagaggaaaggcatccttattaaccaagttgtccaaaagatggaatgtgtcctgagtaggtagtgagcttcccacccctggatgtatacaagtttgggttgaaggtctatgagggaggatgctataaagcacaacagttagatgaggagccaactatagtaatctccaatcatggtgtttaatgattttctgaatcagacacatggcagacacatgggtctagaaggtgggacattgtggggcagccctacagtgtgtacagaagtgagcactggattgggtgtcaaggaaccatcatcttgaaatcactggttctggtggtcctggctccagggagcctttgccctgtggtgccatgcaaagagcttggtctttggagccagagctacctgggttcgaattctgccattgtcacttacttctgtgagacctcagtcaactagactcttcctgagtccccatttcttcatctgcaaagtgggtcagcaagaccccctcacagggagtggtgatatttatgaagttctatagaaagtttagcacacagtaggctcactcagcacatgccaatatccttcccttctgcctttctgggcctcagtttccccatctgtgaaatgagcagcatgctgaggatctccaagcttcttctggctctagatttctgtcactggtttttagcgttccttgtataaggaagaaaaattgttgaggtgaggagctaggccccctgggatctcaaggcctccacaggcctgcccaactgcttggacctccttcctcaccacctgcatcaatgtgggtggctttcctagctgaaggacccactgtaagctctccatgtgcttgatctgccatcaggaaactggatctccatttcatgggtgggaaagttgaggcccagagaggggaagaacagtatgcttacctgctgctaccacagccccatgactccatttcctgggcaacttcactgggggagggcagagcagaggggcaaagcctttggaattcttgagagtttggttttgggaggaggggttgtgcttggcctccctctttccctctctctccccttccatttatgtttttatatttatattatgttttatatttcagccactactattgaacacctcctatgttatgacggcccttgtgttaggctctggagcaatcagggtgaaataggcatgccctgatcctagggtcctccaggagtttaaggtccagtgaaagagacaggcgtgtgcacacacacagtgcatggagggttcgaacggggacatctgtttgtcagaaacacagtggggtggaggaaggcctgatgcagcctagctggtaaaatcagaggagactccaaaggaggtgatggccaagccctgttgaaggaggagaaggaacttgctgtggatttggtgcctctacagggctgtggcttggcaacaatcaaatgtccagctgtgcatttcacctgaggctggatttgaaaccactccctgctgcaggctctgggcaagtccattgcctctggagtaggaaggtgctccttggctgggctcctgtgaggagcacagtttagggggaggttagcaatagacaggcaggagatagagccaaccagcagctccaggggggtgatgcatttgctggagaatgggatgaggggagggaggcagagaagctggtggcaggaggtgacagctttaggggagactcagcctaagccccaaatttctagttctgtcagtcatactggggcctcagcactgcagggttttagggtcatgcctctatcctctctgaggttcattttcaccatttggaaaatgaggtggtgttcctgcctccaaggccagtgaaggccaagtgacctgagaggctggtggtgctcgctgggcagggcaggacgggtggtgctctctgctctgttctaagatcgcctggtctgggtctgccctgcctgctctcacagaacctgcagtccaggtgtcgggtgcttgtgatgagtgcaacaagggtgacatgctctacatacaacggagcatggttgtcactatgactgttggcttgagaattgggcagaagaggtggggactgggaagaggcaaggcaagaggacgcttgggtggactggacacgcatcgcgtgccaggtgcacctgtgggtgttctcaagtgtgccgcctttgagtcctcactatatcccgccacgtaggtgctgcctccgtcagcatagagaggaaactgaggctaagcagggatttgaaactggatctcgctccccgcctgatggttcccaggtagacttgtccctttctctccacctgcagtaaggtaacctggtgggacctgggtttcccactgagctctcaggagcccaaagctccttctggtcaagcccccactgcatgccccttgctccttttagaagctgtgatattaacacgcgtaaaaacaatccaaacagcatctcacacaattatgtggggaggaagtggctgtcacaggcaatctggaaaagatgtatcacttaactcaaagggaaaatgatcaacttgctgttagagagcgtgtgccttgccctgtctcctcgatacccccactcatccccacagggatccccttcccccagctgagggtgtgcctggcagctggctggtggggctgtgcccaggccttccctgcaacatagtgtcaggctgttcacacttgaagggacctcgttcctttattttgttcagtcattgattcatgattcatccagtgctcactgtgcacctactgtccgccaggctctgggcaggctggggggaagcctgcagcatagacagtgacactgtcacacacagcagagctccagctgcaccacactaggctcaaaagcagcatgagtcacatctcagagaccccagacacagagtaaagggactgcttctgcctggggggctgagaggagctcagggaaggctcctcagtccccgcatgcccagtgggaggaagggcatctggtcacagggccctgtctaagcgaaggcggaagctgtgtcccaagtggcattttgcagacaaggacgctgaggcctggagagatctgccaccttgcccagggtcacacggctgacccatggctctgcttggggtgagaactcctatttgtacctaatgtcagtgaagagggactgagtgcagaaggggtgtctgtgaagactggagaatgttgtggaaggtgccctggagtgggtgagggtggaaggggaggaaaccggcttggctaaaatcacagtggggcagagagagagagagagagagagagagagagagagagagagagagagaggaaggaaggaagaaaggaaggaacgaaggaggagaaggaagggaaggaaaggaaagaaagaacaaagaatagtcacagtggggcagagagaaagagagaggagaaggaaggaaggaaggaaggaaggaaggaaggaaggaaggagggaaggaagggaaggaaagaaagaaagaaaaaagaataggctcccaggttattagatcacatgggagggaggagcctgagagaggccttcacttttgagtgtgactggtctagagccagccccgcccatctgcaggacagtgctaccccagctgggggtttggagctcctgtgtgggtaggagcacagctgggagtgggcagttgcatgctgtttgcctcactttcactccttgcagcctgcatggggttctgtgccaggaggaagctctctcttcagatgagaggcccagactctgttgctgactccctggctgatcctcagggtcaagttgatcctctgagagctcagtgcccctatctgtgaaatgggcataacatcaccctgtctagatttgcagtcacatgtacagaaagattttgcagagttaaagtcatcacggaggtgttctggcagctgtgtggagttggaggacacaggatggaagctgctgggttctcagcattgagattccttttgggaaggttttggggtgcaagggatgagagcagagaaagcaaaggagagaagaaggtggagacttgggatacttgtgaacctttctattgactggggagaaggggaaataagaaaggatgtcctggctcccctcccacccctctgtcttggggagggcaggagggcttggcagtgaattagccggtggaagttgaacaggcggacactaggagtggccttggcctcacccatagttctatcgaccacctgcatggcccctgagcaaatggttttgacttgggagcagtgatggggtcagcatccgagaggctgagaagagcagagttgaaaatgcctgagggtaccaagtctgctctgcactttcagaggggggccaggactttctaagggccatcctgtgagagaatgggggacaggcccaggacctggggtcttcctttccatccttggctcttggactgatggtctgaagacagggaaggcagcctctgtgagccttgtttcccttgtctgtcaaatgagctggctggcacaggttggctcaccacgggagatggacttcaggtgaggcaggagggggctaggtgaggccaagctgactttctggctgggagtgagaggtggggcccagggaggcaagtgggggctgcgaggaagtaaggggactggaagggggtctgcaccaagggtgaacttggcagtttacctcacttagttttgataagctttggtttctacactagctttatttatttgttattgaattcattttttaattttttaaaactgttctattgatatgttattcacatatgatccaataagcccatttaaagtgtacaattcaatggttattagggcatgcacagatatgtgcaaccatagtcacagcctattttggaacattttatcatctcacaaagatacctttagctgggcgcagtggctcacacctgtaatcctagcactttgggaggcagagatggaagaattgcttgagtccaggagtttgagaccagcctcagcaacacagtgagaccttgtttctacaaaaataaaaattaaaaaattagctaggcatagtggcacgctcctgtagtcccagctactcggaaggctgaggtgggaggattgcttgagcccaggaggttgaggctgcagtgagctgtgactgcaccactgcactccatccagcctgggcaacagagtgagaccctgtctcaaaaaaaaaaaaaaaagaaagaaggaaggaaggaaggaaagagaaagaaagaaagaaagaaagaaagaaagaaagaaagaaagaaagaaagggaaagaaagaaagagaaagagagaaagaagaaagcaagcaagcccatactttttagctaccctccctccccgttacccccagcccctggcaaccacagatctactttctgcctctaagatttacctcttctggacatttcacataaacaaactcataatatgtggtccttggtgactggctggtggcgtcaggttctcagggttcatccttgttgaggcaggcgtcagtctccattccttttcatggctggataacatttcgttgtgatataccaacggatataccacattttgtttattcatttgcctgctgaaggacatttggtttgttttcatgttttggctattatgaataatgatgccataaacattggtgtacaaatacaggttccagtttttgctttcagttcttttgtgtatattctcagaagtggaattcctggagcatagggtaattctatgcttacttttttttttttttttttagatggagtctcactctgttgcccaggctggagtgcggtggtgcaatcctggctcactgcaacctccacctcctgggttaaagcgattctcctgcctcagcctcctgagtagctgggactgcaggcgcatgctgctatgcctggctaatttttgtatttttagtagagacggggtttcaccatgttggccaggctggtctcaaactcctgacctcaagtgatcctcctgccttggcctcccaaagtgctggaattacaggcgtgacccactgtgcccggccctattgtacttttataaagaactgtcatgctactttctccagtagctgtgtcatattatagtcccaccagaaatgcacaggaattccaacttttgcacatgctcaccaacacttgtttctttctttctttctttttttttttttttgaaacagagtctcattgtcgcccaggctggagtgcagtggcacgatctcggcttactgcaacctccgcctcctgggttcaagcaattctcatgcctcagcctcctgagtagctggaattacagggatgcatcaccaggcccagctaatttttgtatttttagtagagatggggtttcaccatgttggtcaggctggtcttgaactcctgacctcaagtgatccgcccacctcagcctcccaaagtgttgggattacagatgcgagccaccacgcctggcctccaacacttgttttatgtgtgtgtgtgtgtgttataatagccattttagtgagtatgaactggtatctcattgcggttttgatttatagctccctaatggtagtgatggtgagcattgtttcatgggcttattggccatttgtatatcttcttcttttttttttaatcgagatggagtctcactccattgcccaggctggagtgcagtggcgcgatctcagctcactgcaacctccacctccctggttcaagcaattcccctgcctcagcctcctgagtagctgggattacaggtgcacgccaccaagttgggctaattttttgtatttttagtagagacgggtttttaccatgttggccagactggtctcaaactcctgaccttgggcaatctgcctgccttggcctcccaaagtgctgggattacaggcctgagccaccacgcctggctggccatttgtatatcttctatggagaaatttgcctcctttcgaattgggttgtttgttttgagttttagggtcttttctatattttagacattaatcccttatctggcatgtgatttgtagatattttctgtaggttgcgtttttactctgttgatagtgtcctctgatgcataaaagtttttcattttgatgaagtccaatttatcgattttttccatttcttgcctgtgtttttggtgtcatatccatagtgttatcagtcattgttatctcgataaagctgcacagcaaaacaccacagcagtcatttattctttcttatgtgtcaggggtcagctggagggaaggtcagcaaatctaggctggacgtgactgagcttgactctaggctgtgcatgggttctgtctgctcattcttctggggccaggggtctgcatggggtgtgttcttctcaaattgaatggcaggagctcaatagacaagtccctctgcacaaggtacatgctcatgctactgtggagcttgggcaaagtgagtctcacagccaagctcagcataagaggtgggagaccccgcatgggtgtggacacatcattcttctgaagaggagtgaagggctgggatcgagaatctgatcaagcccagtgatggccaagaggtgggaatgagctggcaggtttgaggctgagaggggctagtgtggctgaaatacagtgatcggggacaggggggaaagtcgtatttagcgggtgcgtggaagatgttcgttaactgaattaatcaaaagaaggtatggtgactgactggctggatagagatgaatgtgctgagatgggaaaggcaaggactggaaactatttagggaagaaatcagctcactgccagacctgttaaattttagagacacatgctggtgggcaaatggctgtatgagatgaagtagactctgcttgcaaggatctgtgggtcttctggcagcaggaggacaagggcatggccagctgtcccacgcagctgagatagatgcctccaacaatgtagtaaggatgaggacaactcagcttcctgttccagcagcgttccaaggtggcttcgtagatgaagggcatttgagctgtaaggtgggatgtgaaaggtggagctagggatgctccaggtggagggagccacagggtcagggcacagggagaacacagggtgggtgactggcagtgaccccagtgagggggtgggtgcaggtttcagcaacatgccaggcctgagctggggtctgtgggctgttcccctgctggtgagccaggggataggaggaagctgactttgatcactccattcttgtccatgtgcccagcaggggctggggatatgaggatcaggagcctctgctgtctttttggaactcaaaaaaaaaaaagtgagagcccagtgatggcaaagatgtggggaaaccgctttttcctcattgttggtggtggagggggtataacttggtgcaccctctttggagggcagtttgccaacagctatgaaaatatgaaaatttcctgcttctaaatgcaccactacgcacagacagaggaacaaagatatttgtcgtggctttcttcatcaaagcaaaagattaagaacagcctaggccgggcacagtggctcacgcctgtaatcccagcactttgggaggccgaggtgggcggatcatttgaggttaggagttcgagacaacctgaccaacatgatgaaatcccgtctctactaaaaatacaaaaatgttagcctggcctggtggtgggagcctgtactcccatgtactcccagctactcaggaggctgaggcaggagaatcacttgaacctgggaggcggaggttgcagtgagccgagatcgcgccactgcactccagcctgggtgacagaaaaaaaacaaaaaagaacagcctaaatgtccactggcagaggactggttaaaggatggtcccccatatagaaggacaccctgcagctgctaaaaagaacaagcaactccgtatgtactgaaatggaacagtcctcaggatacatggtcatgtaaaaagctaggagtcggatagcatgagtaccactcacattttctttaaagagagggaggggcccatgtgctaatatgaacatacagaacttctggaatgagaccttgagcgttgcctctgggaaggagttgtgggatggggagacaggagattcgcttcctgctgtacaccctttctttttagttatttactacgtccgtacactgctccccaaaagaataaagtaaaataaatcttttgctgtatgatatttttaagagtcggtgaggggaactcagagacaccaggcttcatatgggggaggctgatgtctgtggctccccaccctgggggtctcaggtcgtgccctgccttcctgccccaggcaccacttcatggaagcttctgggagggatccaggggagggtgcaagaacagaatagccatgaggtggtcttgtctactctttccatcacagcagcctccccggcagtggcctggatagtgtgggctttgaagcgtggtcatcggtgacctacaagggcttggccattagcagccctaatggtgtcatctgcaggcgccttcttgcacgcacgaacctctctgtgtgtagcagtggtgaataatcaccaaattgtatctgatttctgcagcgcatttctgtatttctattcaaagttgagtgcatctgattttatgggaattcataacagttcaaactaaatcgtggcaccatgctgtgaaaatctctcactcccgagaaactgaaacgctgcccagatgtcccctcctgcccttttccttccccctgctctattctctcatgtccccccctgcctgctgggccaggaggcgttgcctgttggcaggcagcagtgtgccctctgcccttgtacctcctgaccgggctgcagggagagatgggagatggtcacggtgggggccctgccccgggagttaggcccagaactgcctatttcccaaaagaggggagtgtgccttgctccagcagagacatggaatgtgcctttccagtctaggacaccaggcttcaacgggcttcctcttaggtttttttctgggattcagaggtgtttggtgaaacccctacaggtcatggggagctttgcaaggaacctggcttcctccaacctgggcaaaggagtgggaacaggaaggaggggccctccagggttgtgcagtggggtgggggcattttgtggatgcatctcctggagggggtggcagaacgcaattgtgtgtgtgtgagtgtgtgcacatgagtgtgtttgagaatgtgtgtgtgtgcatgtgtttgagagtgtgtgtgtgcatgagtgtgtttgagagtgtgtgtgtgagagtgtgtgaatgtgtgggtgtgtgtttgaaaaagtgtgtgtgcggtgtgtgtgagtgtgagagtctgggtgtgtgtttgagagtgtgtgaattgtgtggtgtgtgtttgtgtgtgtgtgagagtgtgtgggtgagtgtgtgtttgagagtgtgtgtgtgagagcatgtgagtgtgtaggtgtgtgtttgagagtgtgtgtgtgcagtgtgtgggtgagtgtgagtgtgtgggtgagtgtgtgagagagtgtgtgtgtgtgctttcaggcacaagttttctttcacactgttggtcctcacctggggaaaggagaaccctcggtatggggccaagtgccagccttgggccttgtctccgagcctgggttttagcccattctgctggtcgtggctgcctgcaggcagagcatgagggagccctcctggtgatgggagcaatccgacctcctcgcctagcgaggaaagacccagtggggctggactcgggatggagaggcagcgcctcccgagctgggacccacggcccaggataaaaggagctccatgtccctagaaatgtctggtagcagcccagggaggggtgtcagccagaggaccgccgaggaccctcccagctcccagagtctcccctggtgtttgcacctgggactctggccttcagggaggctcaggacagtgagggagagaacgtctaatcagggttgtccatgtgttcataggctgtggcaagattttggtagggtggccataaatgaggccactgatgtcaacacgttgaatgcttattgcagaagataggcggaatgcagaaactagctagaagacaataaaacttcccataacctcaccactcacacaacaccctggcttcactccacagtgctgtatgcgcacactcccctgcatacattcacacactaggaatccaaacaccatcccctgttgcttcctagggacatcccacagttgagccagtccccttttgggtatctatcataagttacgcagcagtgggcatccctgtggcttggtgtccacgtacagctatggcaatttcctcagctgaggttcaggaggtggaattgctgggccacagggtatatgcattttcaggctctttggacaattttcaaagacggactgattctctgtccagttgcctcagctcaggggtttgggagccctgctgatcttgcccctctggtggcggtaagcaccacctccctgctggtggctcccacacttctgcttccagcccatcctggaccttggctgagcatgtccagctgctgacccactgttgctacttggttgtcaacagccatgccagactcgccatgtctcaaatgaacttccgatcttgtccctcagccagctccacctgcagcctctcctgtcctagctaatggcaatgccatcctcccaggtgcttgggctcaattcattcttgcacagccagatccccaccagcaggaaaccctctcagctctactttgttttttgttttttgtttttttttttgagacggagtctcgctctgtcgcccaggctggagtgcagtggcatgatctcggctcactgcaagctccgcctcccgggttcacgccattctcctgcctcagcctcccgagcagctgggactacaggcgcccgccaccacgcccggctaatttttttttttgcatttttagtagagacggggtttcaccgtgttagccaggatggtctcgatctcctgacctcgtgatccgcccgcctcggcctcccaaagtgctgggattacaggcgcgagccaccgcgcccggcctctcagctctactttgaaacatgcccagaatctgccagatcccacaccgctcccctgcctggagctcatcatccctgcctgcatccctgcaggagcctggacaccagtctagccactcccacccatgccccctacagtgtgtcctcatcacagcagccagggtgcttcttgaaaactggttattcatatcacgtgtttcctcacaatcagtggcctacaaagtgtccatgatggaccctgagatctctctgccctcatctcctgcaactcttcccgctgtgcaccccttccagccacgctggcctcctcatgctcctcaagcgcactaggcatgctcttgcctcagggcctttgcacaggccgctccctctgcctggaaggcattcctcccagatatccacatggcccactctcctgcgagtgcatgctcatatgtcacctccccagtgaccctcagctggttcctgcactgctccttctttcccagggcacctcactcccaacactggatgactcactcacctgctctgttggggttggtctctcccaggcagtctcagctcccccagggtgcgggctttaccttgttcctttctgtgtccttaagctctagcacagtgcctagcacacagtagggcatgtcagggcagatgtgcgcagtgtggccagacccagctggatcccccactgcctgaagcctcaccttgcagctcactggctctctgtggtataagactttgatttgacttggtggggggcaggggtgattcctatgtgggtgactccatggatgctgtcactgaaccacctctcagagcctccccagccagccctcagcccagagctggtctgagcagcaggtcttcctgggtgatgacaggagaaggtggttaatgtgggcggggctgctgctctaaatctgagaaatttgcagtcagcttctgccagggacaaaggtgtcaaccttgaggggaaggtggtggagggaagcagtagcgggtgaggaggggggagacttgctcacccctgatggagcatgcattctcctattgctactggttctaggagcaatgcgtgtgagatgccaacagcctgggagggcagatgaaacaaaagcccacccaccaccccagccatctgccttcttcttggcatgtgcagcttacctcctgctggcccagcataccttggctgtgagcatgttggaattctcactgggctcgctgagtagatgccacagggtcttgcccagagacttcctatcaggcgcctctgcaggaccctcccctgggtcacatgtctgagctcagcaagggttggggctgaggctgggagcctggccatgatggccatcagaatggagttcaaatccagacttgacacttattagctgtgtgaccttgagcaagttgtttagcctctctgagccccagcatgtagaatgcattgtgtatcacaatgactggcatagaacatagactcagtaaatgttagaattatgaatctgatgtgtgggtagcttgaaccctgaaaactgggagccctgggattttctctctcctgatggccctgggcagtgacagtctgtttcacttatttgacacctagcacatgtttccagtcacagccgtatgttctcatggccctatgtcctcccactgtgcctggcacaaagtttggcatgaaggagaatgttggaaattggagtctgagggctttggggactggctatgtgtcttcttaggaggagggctctaagccagcacttgagagatttgggggcagctggctgtggccctgcccttacctctggagcaggtctctggcacctatcccaggtccaagcaggaagcccagcacagaagggtgtgtctgtgtttcctgatccagtggggagacaggattggtgggagctcaggccgcatcctgaaggtgggcctgaggatggtggaggaagccacttggctgtgctgaatgggaagtgaggaggccaggaggctgggggaacagctattgcacagagcagagtgaggtcaggctctccctggggacccatgctgctcaccatggcctgggtactgaggaatgccagcaggcaaagcagcatccctcaccacactgaggctggaggtcagggcttaggagtctgtctcttccctctggcatcagcctctgctctctctgggccttgctttcctcccgtagacagaggagccagaggaagatctgggacctcagggaaaacccagcagcagggtggagcccttcaggcccagctgctttgctttaccctttggagcctgtgccaccttgacctagtgtcggtgccacctcaccctgtggggaggatggaggcagagtcaggttggagctgagatggtccctgcttccgaatgctttggaggcagtccctgccaatcctgcagaattagggttgtgtgcatctacccctgactgatggatctgggcactgaggcagtctgatcgcctccgatggggaaaggagaacaggcacttgagaggttgggggcccagtgtgcctggcagtgttggagcctgagcctgcactgtggaaagcgaaaggcattatgcatgcatgtgtatgcaggcgctcactttttggcagacattcaccctgtgttttttgtgtgatgcatattgtgctccgtgagggaggggccatgtcttcccctcttacaaagtcaggaaacgggaacagcagcatggtgtgatggaaacatcaggagactctgactcaggcagacctggtcaatcctagagtgacctctctgagcctcaatgtcctcgtctgtaaaatggggacaagaagacctacttcacagaagtgttttggaagattgaataaaaataatacccgtgaaaatccttggcctgtgggattgcctaacaattgttcatttccttccctccttccttccttccaccgcaaacttcctgcagcacccagcagaatggtgtgctctccccagctatttgtggatgatgttcttagcagatgttgtttaattctcataacatctggtttggaatggcagagggctggagttttttctgtagaagatactcactcactgtgagatgtcagattgtcacttaattgcccaatgcctcggtttctccacttgtaaatcagggataacgctagtgctgctggctagcttctttgcaggatatgatagggtaatgcaagataacagatggaaagtggtttgaacatttagagaaaggcatcttgctcaaccccgctagtagttagggaaatgcaaattaaagctgcaatgctataccatttttcatgtgttcgattggcagccatttaaaagagagatcacttccaggtgggcacataggccctctcatatactgctggtgggactgagaattgccacagccttttccagaagataatatggcagcgtctagtaaaagttcacatacacactctgggttgtatttaattgacccagcactcccactgttggagaaccacactgaagagccaaatcccaacacaattatgtacagagagatgttcgcggtggcattgcttttgggggcaggaacctggaaacatccaaatgcccatcagtaagggatgaaatctccattaggaaacatccataccatgagctattattatctcctaaaaagaaagaggtaattctaagcaatgttggcctggagtgctgtctgtgggatttcttgatgtgcgaaaagcaagtttcttgtatgtagagggtaactccattattctcaaagtaaacagtagcctcacggctctgtacatgtgtgtaatgggaacatatttcttgggtgcagagaaaggcctggtaggatgcatgccagcccttgcctgcccactctggccatggtcatgtttgactcacaaagtattccttacaaattgagttatttgccaacatttaaaaattgaattcatgtgaaaagcctgatttctagtttttcattgagaaaaatcagaagctccgccacactgggcccacattccctcttggctgaaacacatcagcagctgccacttttcaacagagagcatgtggactccaactggccatcatccccacccacccagcaacaccctcgtctaaattccctgctggccttgtaagcatttcagtttgcaacccctgtgataggctgttaatattcagaaactcaaggcagtggaaacacagggataggatgtgtagggggaagagttgcctcttattattcaaatacatcttagaatcttttgtgtttcgtcatgcatggtggctcacgcctgtaatcccagcactttgggaggctgagccgggtggatcacttgagttcaggagtttgagaccagcctgaccaacatggtgaaaccccatctctactcaaaatacaaaaaaatgagccaagtgtggtggcacgcacctgtaatcccagctactcggggggctgaggcaggagaatcactggaattcaggaggtggaggttgcagtgagccgagatcaccccactgcactccagcctgggtgacagagtgagattctgtctcaaacaaaaaaaaaaaaaaaaaagaaagaaagaaagaaaaaaaagaaaaaggaaaagaatcttttattcttcaaatgactgtctcatactttgtaattaggatgttttaagtataatatcagaaggaaagcaaaaggggactgttgtatgtcgtgttggtcaggaacatctggtagggtcacctcattgttcactgaggacatgggctgagagggattgaggcctctccaagtccagaattaaggggtccacgctctcagctctttcttaatccctcacccctatatcttggcagagatgtggaagtctctccaaaaatcctttcctccagctctattcactgccctgtgtctttcctggtcacttattgacaagagagataggacaccagcttgggtcttgatgctggctctgctctctagttggaggtctctgaacaaattgtctgatggctctaagcctactttgtgagccagggagatgaacacgccccaggccagatgcacagtaggtatgcactgaagggtaatgtgtgtgagtctggccctgcactaccagggcagacagttctgtaggaggttaggattcctggttggtgagtgtggtccccctggtgtcactgctgggctctagggaggcctgctcctgagccgctggaggaccagggccctgatggaatgggaccagagtggggaatgttgccatatgggagagagctgtctaccctcccagccacccttagaaataggatctggtctttcagaacctctgtcaactgagcccccgatctcactagagcttagctctgagcccttcaaaattcagctttagcctccacagacttgctgtgaggtcctgggcaggttgcctcccctctctgtgcctctttggacaccatgacctgctgcatcccttcatatacaaggttatgggataatgtggtgaatataaaaaataaaaaaaaacaggaagagatatgctcattgggcactggtggtgggattgggcttgttggacttgccaagccccctgttagaccgctgtcttcccggtcagtgcccatctcctcaatgctgtcctcaggataaccaggctctgtcactcttgggggatgtggtcctggaggctgaaggcagcagcccctgcctccatctactgggcctagaatatgtcactctttgcccagagtcccctcgcaggacagccagtcccccaggagggcaaagaggacccgataggccccagcctcacccagtgactcacaggccactgtgctatacccaggataggacaatgttaaaaccaaatgatacagaccctctcctttctcccatgtgctcctaaaccctccatctgggttgattccttctcctcccttcccagccccagttctctctggagatgcagaggtgggaggggctgaggagcagaccctctgccacccaggaagcttctcaccctcttctctttctttgtgtccccaggagccatggggcgccatgttgccaccagctgccacgtggcctggcttttggtgctgatctctggatgctggggtaagtccagtcctccccgtgtctatcccatgggcagcctctgcacgggaggccaggctggagggtgttggggctggtggttcatctttgtgctctgggactctggagacactgtcttactgtgtgactgaggcacatacttccctctctgggcctcagttgccttctgcagctctcacagggctgaaaataccagctgtccccaaagcctgggacacaagagggaatgggaggagccttgagaaatacttgagctctaagggaaggaggcacctgtgaccgtgaaccgtcctcctcctggggtgcagggactggccacagctctattcagttccacggctgtgttctgagcacctactgtttgcactgtgtgtgacctactgcacccagctctgagggaatggaggaaataactcattctcaagaagctcagagcctggcaggggagaaagacacatgcaggatttcctatactgcagggtgaatagagtggtaatgaaagatgggcgcggctccagggatgtccatcggaagaaaagatgaattgggcctgaggggacaggagaaacccagccagaagggtcagcatttgatctgggctgtgaagaccaagaagtagttttaaactaggtgagcaggaagaaaggcgtcctgctggagggcatagtctgagcaaagctatggcagccaggagccttcccctctgccctcctttcctggccttccagcagccagctcagagtgccagctccagagcccacggaggagggtaggagaggcctgggcatttgcttctcgcttggcccctggacagcaggtggtggggagcaaagcagccctgggctgcactgaaggcaggccaggagagcaggcatgcctgatgtggcatcccccagggccatggcatccccagagaagagccgtgggcatggtgtacctggtgacacacgcaaacacattcctgtggggggccagctccttctcccctccagggagccaggcggagtctctggaggctgctgcagcctcgtgcttgttggagtgttgctagcgtcctgcagcctgagtatccctcgaggattccctctccttgcctccatgtttgaagggatccctactggaatcccccctgtgatgggaagctcactcccatccaggcagcccaggagtacagcacagtctcaaagactctcagagtgcaagggagcctcaggcgcttttttaactcccagctcattttacagaggagacaccgaaccctggagaagctactggcccaaggctgtacaaagcaggggtctgttatcctccatgggggcttctgtcaggatatcacccccctcaccccgctccccccctgcctcatgtgggaggcttcaatcggggctcctgagagcagccgtggcctccatgttcgctgcacggtgggagtcaggacactttcttcagcctccccggggactctgccacctgggatccaccctcctcccccattctgttccactcactttcttcatccgttaaaaagaaatacatttggcccggcatggtggctcttgcttataatcccagcactttgggaagcagaggtgggaggatcacttgtggtcaggagttcaagaccagcctggcaaacatggcacaaccccaactctaataaaaatacaaaaattagctggacatggtggtggcgcacacttgtagtcgcagctacttgggaggctgaggcacaagaatcgctggaacccaggaggcggaggttgcagtgagccgagattgtgccattgaattccagcctgggtgaaagagtgagactctgtctcaaaaaaagaaaaaagaaaaaaaaaatacatcagtagaaataaaggaggtgctaagcccttggctgctttcctctgtgagacacggcagtctccccttgagctctccagatgaaagatgcttcgtgcattcagggtgaggacaagaacagagtgtatagccagagctgacctcctgtcttccactcccgcttcagctaaggggtcccttgggcgagtgtcttaaccttgctgtgctttaatttccttgtctttaaaatgggaacaataataggactttccttctcaggttgtcaaagtgatcaaatggattaatctgtacatcaagcacttagaatagtgcctggcacagatgaagtgcttattaagtgttggctcctttattatcagaagttatctttctctaaggggagcaaaatggggcatagaaaacagagaagctaagcaaattgcccaaggtcacccagcaattctatgccaaagcgtgtatggtcggcctgcatgtggactagcctgctttgccatacgcacaagggtccctcactctctcattgcttggcacagtcacctctttctggtccctgtctgaagcagccagtgctgttcctttggcctagtggggcagtggctgactttagagactaggggagagtgggtgactgaaccaccttcccaggccctctagacacccctgacctagcccttcacttgtgccccagatcagaccacactgccctcgccactttgtttccacctgaccccgtcaccccagccgatctctacccccctacctggtagtcagggatgggtagggctcagggatttcaaaaccccttgccagcctgccttctctctttgaagcctcctgcccttctcccctctggcctcaatgtactctagcaattctccttcttcatccgtgggcttgttggggaggcaggaagcgaaggcctgggcaggcctgccccaccccatcctagactgactagccagcaagcatcctgctgggtcactccttctgtccccagttgctgggtgggagaggcctctgaccatgcggccacctggcttccccacccgacaacatgtcaggcttctgtcccctggggctcatgtgggccacgctgcagtcacctcaatggtgaccagggtgcatgggacacctgtggccgggaggcaggactggagggcagggcagggctttttgtccccatcctgaggctggaaaatggggcggagggcgaggcagagggagagggatctgcctaagctccccagcagcagtggcagagcatgcaaagtccctgactccttgaatttatccctgcactccctgtccagtgcgccttccttgtcaaggggcgactggcgggggcactctgaggatctctccagcagggatctcagcagagccactgcgccttcagcccccaccaccgccctgaggcctggggaggcgaccggggcttggactcagactggcctggctggaatctggaccctccacttgcctgggttcttcatgccctcagaggaacccccaccccgcaattcagggtgaagtttatgcttcctggcttggcccaccctgatccggtggggaccttccccatacaagcacaccgacgtcccttcagtcccagatcaggtcccctggatgccacctccatgccgccacccagcctctgtttacccctgtgtgtgggaaatgcttgtcattcagcaggcagctggaatgctgtgccctctctgtgcccttctctcccctctctcctcaggccccttagggtgctagaactaagtaaagcaggcacatgccctcccggtctgcctttgcaggctctagttggggaatggccatgggggtggcagagagggcgggagagggctcagggcagtgctcacaagccacagacccacaatggggtgggccacgtggggcttgggacagagagaggggtcctgcacttgggaagctgggattctccttcccccgaagaaatcaccccctgcccctccccttctacatccacttacattcccgcttcgctggaggccccaaagctgctgagcacacagctgctgcgctttaacagcggctttgagaataagtcacctgtctgccccgcctgtggtgggcctgctctgggaacacaggtcctgtttggtatgtggcaggcgacccacgtcccggagtctgcctagctgtctgtgcagagctcccagcgactgattagtggcaggccctgtaaagtaaaatttagaaatgaacgatgccactgcaggtgattttttttcctcactggtttcctggcctcaacagcccaaagcagctattgaattctctgggcactcatttgcctcggctgggctgcgtcctgctctcctgtatcctgagcccaaggcccccagcagggatcaaaagccttcccgtcggctgcaaaggcagcgtatttattaataccactgttaatactggctaccatttatggagtgcttgctgtgtgccagtggcacagcgctaagcgctttatgtatgtaatctcatttaatcctcaggttagccatgaagtcctattattatggctattttacacatgggtaaactgagacatgggatgatcatgtggctagaaagaggcacagggaggtttcaaaaaaggtgaggcccttgaccaccacctctgtctgaggctgttgtgctcctgacaggagactggggaggtgtgtacgtgggtgcatgtgagtatttggggtggtcagggagggcttcctggaagaagggccaatggaaatgagatttggaggatgaataggaatttggcaaatgaaggcagaagggccatcggtcctggccaggaagtgagagagggcagaataagggactagaaatggcatcagcttggctgcctgagcacatcgaggtggggaggaggaaaagaggccagtctcccagctctgcctggtcccaactaggaggcatcttgggttggaggaggaagtgccatacccagatgccaaccttctcaccctctgggagcctggcacatgctctgagggagccccgggtcagcagaaaggaagggagagagagctgccccatacacccacactcagggcccctggagggctgagcaggtgcccctgatggcaggtgctgcacaatgacagtcccacttccagctagaccagctgcctcctggttgggagggactgaggggaagtgccctcacttgcctactgaaggcccctaagagaagctgggggacaggtggggtcagctcagggaaacttcatgtgggggctcctcataggtgccaagctccccagcccatgtaggtatcaccctgaccccctccagacccagcccgctctgaagccatcacagagcagcacgtggttaacagcacgagctttggggtctggcttcctggatggccaccgccacttgccagctgtgaaagcaaggcatgttacttatgccctggagttctcattttccccagtaaaatagggatgtgatagcacctgccttgccatcaggattgagtgaggtggtttaaatagctggtatggagaaggggttcctgagatggcagctattatcatcatcgttattattctgtgggatcagctggccatcccttcacacaccaaatcgtcttgtgggttgtctaagtgtcaggccctgttctgggcaccagggttccacccgtcaaccaagccctgtccttgcagagctcatattctgctagagccacactgcccaatagaaagacaatgcaagccacatgtgattttaaatgttctaggagccgcactagaaaagtaaaaagagacaacgtgcgatggctcacgcctgtaatctcagcactttaggaggccaaggcaggaggattgcttgagcccaggagttggagaccagcctgggcaacatagtaagaccctccccactgcatctatacaaaaaaaataaagtaaaatagcctggcatggggcatgcctgtggtcccagctaattgggaggctgaggcaggaaaatcgctttagcttgggtggtccggcctgccgtgagccatgatcacactgctactcttcagcctgggtgacagagtgagactctgtctcaaaaaaaaaaaaaaaaaaaaaaatcggcaaattaaaaagaaacaggtgacattcattttaatcatatattttacttgatccaatatatccaaaatagaatcatttcaatatataatcaatgtaaaagatcagtgagctattttacactaatttttttcatacagaggcttctaaatcctgtcttttgcctgaggagcccctgtcatgtgcttgctccatgtgggccatgctcagcaggcacgtgtggccggtggcctcacttgccacacaccagacagctgcctgccgacctactggcattgtcccccacttgccttgaggcaggatagtgacttccagggtcctgggaagttgaccatggccatggacacaggctcagtgcccactgcagccctcaccctgtgtcaccttatagagtgtgtaaagctgatggggggtacttggctgacgctcttgtcctctgacttccaggccaggtgaaccggctgcccttcttcaccaaccacttctttgatacatacctgctgatcagcgaggacacgcctgtgggtgagtgggggcatgggctggtgggcgtgcagatggcctggggtgcaatcccttcccacaagtgaaggggatcttacaggttgaggtcatcttccacctgattttggaatcttttccattgtgtagaaaggcccctgctaggatgcctccagggacagggcactcagtcccacagaggggagctctgaacgtcaaagggtttatcacattgagcctcagatgctccactcccacttctggcactagtttggattcctcttgcacttgaaggccttgtgaatatttgaagatggcagctgttgtagactttgttttgtggccttttgtaattttctgtgattactaagttttctgcattgagtttgcctggctttggcattagaaaaaacatgaactatttagggggtgattataaacatcttggtgctcagcccgtcgccccatcactcaggtctgtcccagtgtctggccccctactgagggcctgcctcctacatctgtggccccattgtcctagctcagctcttaggacccagaagcttctcaggaaactgaggctgaattgcaggagctgtcttatagctgtgctgatggggaggcacctgtgcccgtgtgcaggcagccaaacagcagcacctgaaaagggcctgcccacctccaccgacagccctcctgtgtcatgtcattctcgctggtgtcactttagggaaagtgcctgtcatccggggcttcttactctcgggtctgccatctctacatgtgcaaaggcaggcctgtgtgccagaggccaagtgcatcaggggtcagcatggtgcatctttagggagcatcacttgaacttggaaatgaggcaggatggctcggagtggggcggggtatcaagatgcttacctaataggtcatgtacacactctttcatatgaaacccagtgtaggtgtgcagtagagtggatgcataattcttcaacgatctctgctccagtggggtgccttacgcgggcccagactctcccctgctgtcagtgggggcctgtgagcagcgcctttcactcttcctggtggaggttttttttcagggggtgctgggcccagcaggtgtgtgtctggctgtttgttgtggggattgtccccacggcccagtagcactttgttcctgggggctgtggggggccctctgtggaaaacggctactcctttggtgatagatcagtgttgtaaggctagatttgggggtagggtttggggatctgggtgtttgagggctccccaggaagaaggttcctgcctttttggaatgccttctcataggcagagcccctttctgggggtagagagcatacccacgtcccttggggaccctgctaagctgtttgctcccctttggattgggttgagggatatttgtggacgactggacttgtaacacacctgtattctttgggtggaattcacctgtgactcctctctccacccagacctggggtggggctggcatggagccaacatagcggcacacagtgcatgtgtctaggcagatggatgtgctgttagcagcatttatcattattcatgtccatttaaatctcatcctctgggagatccctttgtggtggagggatatatttggagcaggtgggccactgaggcagtggtgtggccagtcactaactgaccctgctgccggctggggaaagtgaaggcccctctcaagtgagtggtccctgctctgtccccacatctgtgacctgcatgccaggttctgagcgtggggtcctcagaggcctatgtattgggatgggttggggagggatgggcattgcatggcctgtgctgatggtgacaagcccgggctggaagcccatgtggccagcccttcagcaggtccttctcctgctgccttcagctctggctcttgattgtcttttgcaaacgccagcatcgatcggcctccggaagcagctcccaggcctcgagccctgttaaggctgcacttggcagtcacagcagggtggctgtctagtgccatggggattgatccctgactccagggtgccataggattgagagggggctcagtgagctggaagatagctatgctcttctctctaggcagggggtgggtgcggagctgcctcagcgccctcccagcctcttctcttctttttgcatcagtatgggaacagcacagctttcacctgaaagtcaggagcccaacatctgtttctcgctgtgtaaccttgggcacagcactgcacctctctgggcctctatctcctcatttcaacaatgagtgggcattggaaagatgagcccagtggactttggctggggcagcctggctggccccagttgtttctaggttctcagaggagaccagcctggagccctctgctgggtgctggcacccacttgtccctgggccaagcagatggtgggtatggactcacatggacgtgtgggctccatgggtgcaggcctcccaccagcaggccagggagagggggaggttgaaatggcttgtccaggggactggcctttttcctgccatggggagtggggtggtctagagacttgactttgagacttggctctcatgaactgttcactctttgactcagggttccagtcaccaaaatgggtgactggatccctcactggattgttgggaagtttacatacaataccaccacctctaaagcttccaacccaggaatgttttgtttttactaaagggagagcccgtgtgtggcccagggatggcagattgggctgtcctacaagccatgggctttcagggtggacaaacacacagataagctgggtccagggtggtgctcagtgccagtggcaagaggcagagcccaagccaggctgaccgtgtcggctcaccagaggttggagttgtaagcagatcaaacttccagctcgaggcctcattacctggcttctccttagacacccagtgatggtcagctcgtgggcctacaaggcagctcactctgtgctgtgggacggttccaggaagaaaaaattcttcctaagattaacaggaaacctgcctccctggaactacccattgggtctaattctgattgctggagcctcatagattaaaaatgataatataacacatatgacatactatatatatagatatatagatatatcataaattattataacaacagcatttattgactgttcaaggcagtgtcctaagtgtttttatgcattaattcattttaaaaattccttttaagaatcagaggtagagttgggctacagggtctatctatatgtagcttctgtgaatgtgctttcctgggttagagactgagacttttatccacccccaaccttctgagccttctcgttttgtatgctcttgcctgcgttccaacagggggccagtggcctgggagcagaatgggagggcacagcatggccatctgaaatccctcacagagcctacgtgttcattactatctcctcacctatctcaggctccagttccctctgtgtaatgttctttttgaagaccgtctaccagccggagaagacagaagccaaatgaagtcattaactagtgctgccttctcctggtctgttcacatcgccctgcttccccagacagggccctgaatccctgcatgtcttgctccagacgttaatatcagttgttggcagcagagcctggaatgcgtggagtggcgtgagggcagatcagcagctcagtccctggtcaggctggttggcctcacccacaccttggccctgcctatcagccctgaatggtcacatgatgcctttagcatgagggacaggtgctgcaggggtgctgtctcccacttaacctcctgaatctactttttttttttttttttttttgagacggagtctcactctgtcacccaggctggagtgcagtggcacaatcttggctcactgcagcctccacctcccgggttccagtgattctcctgcctcagcctcctgggtagctgggattacaggcacacgccaccactcccagctaatttttttatgtttttagtagagacggggtttcaccacgttgtccaggctggtctcaaactcccgacctcaggtgatccacccacctcagcctcccaaagtgctaggattacaggcgtgagccaccgcgtcttgccctgaatctacttgaaatgccccaccagccttgctgatgtcgagatcaccaaccacctctgtgttgctaaatcccatcatttcttcccagaccttgtggccttcaattggttgatctttttctcctccaggacaccacccgccccttcccagcctctctgctggttcctcccgcacctcttagcatcagagggccccagggctcagctcttgtctctcctctcctcattctcattcccgtggtggtcccatctagcctcctggcttggacactacctatatgctgacaactcctagctttatattttctgtctgggctgctctcagggaagactccagactcctatagccacctctctactcaacatttctgcctgatgtctaaagggacattttcatcctcagtttgtccaaagctggaatcctgacctcccccagattcctgcctcaccggcagccttccccatctcagctgtggctccatcctgccagttgcccaggccaaaagctgggactcattcctgtgcctctttttctccctcccctcccctcccatcccttagggcatcctgttggctcagtctccaaaatcatcccagaatcttctcacctctcggcccttccactcccatcaccaaggtccaagcgcagttaccccagcagcttcctcaggtctcagtgttctccctgactcggccctcacccacgctgcggccttttttatcccagccatggatggccctgcccagcctgaggcagagcctgctccaaggcctgctcaagtctctccctcccacacggagtaaaagcccgtgttcctcaatggcaaccaggctgtttgcagcccagcacctgccacctgtcagacctcgcccccaccccgctatccccctcgctagctctacttcatctgtgctggtctccctctagttccctaagtgtgaaaggcaagctcccacttcacggtctttgcagctgttgttcctgctacctggaacattatgaacctgcgcttaccaggctctttcagatgccaccgcctctgggtggccttcctgggtctccttgttgggggttaagtgctgctccctttgctttttccggggcctggccatcctctctgttagccccatggagatgctgctgttactcagttgctcttctggctcccttcttggcctgtgaatgcctccaggtggcctggccatcactgtgtccccagggcctagccctgcgcctggtgtgcgcctggaacttagggaaggagtgcatgtctggacttggtgagcatgtaggggaatcttccaaggcaggacccgggggctggctccatgccctgttcaacatccctcctggagcctcaggccaggcgctcccctccccagggcatgtcgggagcgaggtgttggtggcgatggggatggctgcccagggagtgggcccaggagagcactttcccgcagatggcacagatgctgtacgtgcctatgcttgtgaacggcaaggcccgcgctgtgccagaggtcctgtttttatcatcccagctgcccgcctgagctgtatgtagaatatttgccggggaccttggggccctgagccatggctggccctgggggaagaacgcagaggtagcagcatgaagcctggcttggagacaccaagttgaccaagggggtctagaagggatcctggagggcattgaggccctgcaccttggccaccaccttcataccccatgccctggaggggggcagggttcctgccacagtggtaaccgcccgcagccagaagcctcccgagtgcctgcaggaagaagtagagctctgtatctcagcgagtcgcccccactctccacagacaccttgccccccagcactgacacctcgcacactgttgcactgccgtgccctcaaccatgctgtttccttggccaggggtgccctttcccttccctgcctggcaaagtcctgctcctctttcaagctgcagctcagatgtcccttgtgcttagaggcttctgaagcctccccagcctgcccttctgctggctttgtctgcatctgtgaaagccctcagcacactctagcgtggctatttgtgtggaactccccattggtctattaatttttacttattaatcttattaatattgacattataattaacagcgattttagtgtctctattatacaagactgaggagtgctaatgtgagctatggtttgttgacagccagcctcttgcccgagcctctattaggcacttcaagtgcatggcctcctgtgagaccttgcagtgattgtcctggagagatggcatgatctgcatttgacagaggaacaagctgggcctccatctctgtaccaagcatggtgcctggcacaaaggcggcctcagcaagtgcttggtgggtgagtgggtagatgagtggatgggtgagtggatgtcagatgtcctgctgggtcccctccccttggctccctgtccttccttttgtcactgaggttggtacacatggagctgacttccccagccagaaccaccagcaccccaaaagcatcttaagccacaattaaggtgatcatgccatgctaatcacctacacgagtaaattagtcttgtcaagagccattaaggtgggaacccgggattcattaggatggattggtcccaggcagcgcctggcactgctgccagtcggtgctgattaatttctctccaaactccatcaatgcccagctgtttcttctggacccagggagagcaattttcaggtgggctgaccccgcatcggcagtctctgcagacggaggagcggtgcgcctgcaagcaggccggcaactccccgcaggagcagcccctgtagagctgaatgggaggccagggagggcagatggtgggctttgtgggcagccaaggctcaggagtgacgagcatagatgctggcaggcacggaggcataggtgaaagaggagtctgggaggcactggggacttttctgggactagtttcagccctggtgctccagaaggaactgtccctcctccctgaaacctcctcccaatgtccctttaaagaggagaagcatctcttgggagagggtggagaaccacagtgggagaattatttttctcttaaccagaaggttgcttaagattgacacaggtgagaggggtcatggtaccccagagctgtcccacagcgagggctggtggcaaagccacaggaattgtggggctaaagggacggggatgggaggagtccagtggctcccggacatcagctgggtgtgtgctgtctgcatagttagggcttttctgcccaccgtgttcacagaggtggtatagcctgatagatatcagctctacgaaaaaaaatatagggggtgttagacaataataagtgcccaggagaaataatcaactttggttggagttaagatgggaggtagacagtgggggtgtaacagtctgtattgtccacctttgccttcaccctcccctgaagtgttctcagagggcccaggatggacttgtagtttgagagccactgtttttatcaaacattcccactttgaagatggagaaagtgaggcccagactgcctggatgtgaatcccagctctgcctcttactagcagtgtacctcactttcctcttctgcaaaatgggaataacgttcagtttacctctttgggtttatgtgaatattaaacgagcaaattgtaaaacccttagaactgtgtctggcccatagaaatccaagctgtaatttaaactcgctcgcttgcttttaagctcctataaacatattttcgaaaggaaactttaatgtgtcagacaagcttcctggttgcccgctgaagaaactgcctctggctgtcctttctattggaaggctgctggaggctcttggaattgaccacaacaaaagaacctagactggaaattggccaatctgtccagccggtcactgctgtcactctgaatgaattctaccactcatggcacgggcagcagtgtccaggtggccaagccaacttgggtatgtgtctgtgctcaggctgcaaaggggcaggggatagtgactgtctgcccctcccagctacacccaatgggacagtctccaaaaagaggaggggtggaactggacacagcacctccatagaaagacagatgtccattttctaccatcagagtgaaatcccagggctgagatgctgactggcttttcctaacacatattaaaataaatacatactatattttttttacattttatttttttttttttttagaaacaggatccctattgcccaggctggagtgcagtggcgcaatcatggctcactgcagcctcaaacttctggactcaagtgatcctcccacctcagcctctcaagtagctgattacaggctaatgaagcaacacctggctaatttttaatttttgtgtgtgtgagataggagtcttgctatgttgcccagcctagtctcgaactcctggctttaagcaatcctcctgccttggcctcccaaagcactgagattacaggcatgagccactgcacctggccccttattttatttttaaactttttactttgaaataattttagacttacggaaaagttgaaaattgtacagagttcccatatacccttcacccagctccccataatgttcacatcttgcataaccatgatacaattatggaaaccagaaaaatgactttgatgtaatactattaatgagagtttatgcaaattttatcaactttcccactaatgttttttttttctgcaattaagatgatttttaaacttctttttaagctgtggaactgtttgggcaaatgtaatcttgcccagaagtctaggatagatagattagatagatagataggtagacggacagatgcacatatatacttatattcattcgttcaacaaatgtttccttgagtgtcttctatgcatcagacactgttccaggtactgtgcatgcgaacagaagagacaaaaatccctgtcctcatggaactgacattctagagcggggagcaggcagaaagcagcatagaaaaaaatatatacagtatgttcaattgtaacaggtgctaaggaagaagaaccatctttggtagaaattaaagtcacgggtagcagtgaggggtgaaagagcctgtattttccacctgtgcattcactcctatattaaatcagaggacccatgaaaaacccctggggcctcctgtcggacagtttgtgaccactttgttagacaaacagttgcacagatggagaaactgaggtggagaatggggcgattgcccagggtccctagtgagttactgctggggtccggattgcagctgccctgacttcgcacaccagctgcagagggaattccagggtttctgtccaggcagtcactggtgcctccaggcctgggcaagaaggggcgtcctcctgggttggtgggctgtgagctcgggaattgaagtttggagaagagtctccaggtgcctcgcagctgctgggatctggagctagagcgcttaaggaggggaagggagggtagcctggaggcttcctggggctgttggcaagtgggctgtggttttggaggaaggaggtgatctagtatccatccaggtgatcggtgctggaaccaagggacccagggctttgggctcttggtgccctcacagaagggaggacttttctctcccttctaggagttgggggatgactgacagaacccccaggagggcttgggtgcttctgcgtccttgcttcctctctgccattatccagggcagcataggccctctaaggtgatagaacagactgtgtcttcttgggggtcctttgggctgtagccactcccaagcggtccctgtctgggcacatctggagcctgtggcagccccggctatggactgcccctcaacacacaggtgtgggtatggggcggggctggtgttttggatgcggccataataacactaatgataatgatgatgtgccacctgtcgtgtgagcatgccattaatgccaggcactgaacacctgtgccagcctgtgctggggggtggggtagggacatgcacattagagataactggggaaatagtgactagcttttattacatacttaatctctctagatcagccgttcatacacattgcttcgttgaattctaacagcaaaaaagtgagtcttataaccctcattttgcagttgaggagcagaggctcagagaggttaagtaactcacacaggctcacacagcttgtgtagagtcaaaattgaacctgaacctatcgccctctggccccaaagcctgtgcacttaaccacaagtctgggattctgtatgtaggtctttgcttttaaggagctccagtctggagtggagaagagaaccaatggtaaatgaccacctcacaccaggcaagtgggaggcatgaactacagagccttgctaatgccccgaggaggaagaaactcatcctgggcacagggacagagaaatcttcatagtagaggtggccttgattggttgggttttgataggctgaagctggaggggaggcatttcacaagaaggcaatggaacaggctgaccagctgtgaggcaagcaatttgtgttgtgtcttgaagttgttgtggttaaaaatgaaaataacaatagtaattatttagcccctgtgttttactagttaggttacctgcacaatcttgtttaacccttacagtgatgacaggaaatctgttctagtacgatcaccttgttccaggctcagagagagatccagcaagctgcccaaggtcccatagccagtaagcagtagagtcaggatttgaattccacgtattcaatctccaatgaccacactcttaccgccctgcaatgctgcctcccaggattgtgtagggtctttcctcagtctgttacctaggaaagagcctcagtggccaagggtccacatggggcaggtgctgggtgaaggagcagctgctcctaaggaggggaggttggccagcccagctcaatctgggagaccaggccccggactggggccggtgcctgagtcccaggcctggcattgcccctatgcaaccgtgtgagcctgggcaagtcaatttccctgttcagcccttgcttccctgtttctcagaagatgcattccttgctggatatactatgcagagttagcaagagtgctgaaaatgactttggggaaaatagatgaaagtatgagattagtcagcttgcttgctcctgggtccacagccttttccagtgaccagtggtgatggcggtgggggtctcgtccagctgtgcagtggccaggaagcaggcaccccctttgcaggggtggggggctgacacatgagcctggcacaggtgtgccattgggacgaggatgtgctgagcttgcagccaaccgagaacacttggactccctagtaactggcaaaggtgtaatttacaagagctgaataccctccagctggctgaggagacgggcaggcagagccgactttgaacttgtcatcactcccctcatcaggactgttctttacacccctcaggggacctgtgagcctgactgtccaacaacagctttgtctggaataggagatcaagttgttctgtcagcccttgaccaagaaagggcttggatggccaggaaagttgttctttggtgcaaggatttccttgaaggtcccctcacccatgtgccttcccttcctcctttccacatctgagcacagtgcatggagtgggaggcacaaggcctgggtttcaatgccagctctgccacttattagcgtgtgaccacaggcaagtcccttaacctctctgaacctcgtttccctcttctggaaattgagatgatcatacttgcctggacaacctcatagggagctaatgaaagagctttagaagtgaaatagctgtacaaatggtggacattgtttttattgagcaattcatctttaaatgcttcctcttccaagaagccctcctttgcatctttagcaagtgtggactgtatcaccagctacttcacctctctctgtcccagtttactcagttcaaaattgtggataatgatcacactgtatttactaatagagctgcagtgagaattaagtaagttaattaaagtaaaattaaagtaagattaaagtaagggttttttgttttgttttgtttttgtttttgagatggagtctcgctctgtttcctgggctggagtacagtggcgcgatctcggctcactgcaagctccacctcccgggttcacgcgattcttctgcctcagcctcccaagtagctgggactacaggcacctgccaccatgcccagctaattttttgtatttttagtagaggcggggtttcaccgtgttagccaggatggtctcgatctcgaccttgtgatccagcccgccctggcctcccaaagtgctgggattacaggtgtgagccaccacacctggccttttttttttttttttttttttttgtgagatagggtcttgctctgtcacccaggctggtgcgcagtggcaagatcacagctcactgcaacctcgacctcctgggctcaagtgatcctcccacctcagcctcccaagtagctgggaccacaggtgtgtgccaccacacctggctaattgttttttaaattttttttgtagagatgggggtctccctgtgttgctgaggctggtcttgaatcctgagcgcaagcagtcctcccactttggcctcccaaagtgggggcatgagccactgtgcctggttaagtcaggtattttaaaccgtgcttggcaaatagtaagcactaggagaagttaactattattatttgcggtggtgctgttgtcggccagtgcttttcccaactaggtgagaagcagctcggggacaggaatgatattctatgtggccaaagcccactgtgctgccacgtaaatatgtgatgtggtttgatgcgttactcttccaagggacattttcactctccaggaggaagaggcctagaggctcctgggcccacctcctagcctaaccaggaatccccttaatgcagctgcctaccaacaggtggtgcaagcgctggtgggccctggcagcgggcaactctacctctcagcaggcagtgagcaccacctgctactagcaggctgactgcctcctgctgttactacccctggccagccccagagctccctggaggcagcctgttcttcttcatacggtggctctccagggtctgcagggctttcctaagtctgctgttctttattctagaggtggccagctcttgtagctggtccttatccacagacttggcccaacttctccctcctggtcaccttcctgtgttccagaaattgtgctagggatgttttgtgtgcctcactcatttaatcctcacaacgccccatgaaggaggtagttatggagcccattttacagacaaggaaactgaggcttagagaggttgctgcccacccaagggctcataggcattaagctgctgagctgaattcaagcccacatgtctctctctctctccataaccaatgctttactcttcttggcacagaacagagtggatgaagaggagaaacttccagcccaggggctggtacagggtccccacctaccatcttccttacttgccttcataacacggtggacagggcacaagatcctccaaccttggtcccctctggccgtgtgcccttgggcaagggagaggatgtgccctggtgtcacagcaccgcctgtgggccctcctttcctgggctctcttggcagcaggactgtgtgcggcgggaacccgcacacttgctaggattgatttggcctttgaaaggataattcaagatgaatatgctggcgtccgactggagtgagatggagagattattgagtgttgaacctgctttgccgcatcggctgctttatgagctctctggagaaaccctatgttgtagataactcaggcctgacgggccaggagcggcgtttgtctcccacactctggagtgagcagtccgacagggcccagacaccctgctcgccccatccatgagccaagaatcagcttccagcctcatcgcggtgccaaccattgtccctcccatcctgctcatcccagccccgtctcttgccctgtcctgctcctgaatgtggagttggggcggtagtggccagctggttggttcctgctgtggtcccttgctccaggctgccttggacagtccaggaagagcagaagtgagtgggcagagcctgtggacacatctctttggtttcttacacctgtctccccgacgagtagcccagcctggtcactagggacaccacctctgcatattccttgggatatcagaaaggatctgtagtgcagggacttagtgcactattgggaaacagtacacacagaggcatgaggccagggaagcaaagcccctcgtggggacctggaagttcagttcagctcaactctgtccaccctgggtgtttgtcctaatcagccactgctccctccacccctgcagccacacagtattctaggggaccatcaggagacagggaagagtccaaaccacaaactctttggaggccgagcccatgtctttgagccttgttaggtgggatggcctgtagtgtgcaccacactgacagtgggcatgatggcctttctccctcggagtcccctggggacttggcatggggtgtggcacacagaaagggccagttctatgggtgatgccttaagtacctgtcagcccacaagacatccatcctgggctgtgacagccttaggctggggaagccttttctccggaagaggtgtctggagagggaatgacgggagacacacagggacagcaggggcctccccacagcgggagtctggagaacagcgccagggtgatcctgaacagacattgccctgggagtggtgcaccagccttctgtcatcttttgcacgatccatgtctcctccatgcttgtacatctccatgcacggtccatcacctcacaggacagcgcggccaccgcgacttgggctgagagtggcttgcaagccctgtgccgtgttcccacacattaggtcctcatcgcaaccccgaaggccaccctcacccccactttataatgaggaaaagctagtgacttgtgcaaagtcagagcgttcattacacatcagcaccaaggttatagtccaacccctggggtgtgggctcatgttggcagtgcccggcttcttggaatctgcatttccaagaaattcttcagtaatgttgctgtggctgggccacttaggaccgctgccctggccatgcagcttcctagcctcctgaattggctccatgagtctggggtgagtcctccatcacccgcctggtcagctcctggcagcgcctgccctttgggcagcatgctgggcttggggacccacctggtcgtttcgagagtcccctgcctgagacatcgcctgtgtctctgaagctcagctggggcttatcatcggatagcagatgtgtgaattaagagggggcccatgggggaaggcaggcccgggaggcgaggtgctgagatgcccagtgcagttcgcccctgcccggccccgccttgtgtgtttacacagagtggtggtgcagcagtggacataattactcctgacggccttcattaaagactctggaacaatttacagtcaattaaggagaaaggaactgtctccctcttcaggcgccccaccgccatctgctttagagggagccctgctggagctgtgggtcagtggaagtggggcttcagggaggaggagaaggaggaagagtggggcttctgaagccagtgaacccgctgtcctcaagagtgaatggtcaagccaccggtcaccacactcacagtgtgacgtgagaggccatgtgccaaggagcaaagtgctctgcaccctggctctgccctaacgcatgcagagacctggggtggttctgtcacctctcagagcctcagctctcttatctgtcagatggagctggtcaagcattctctgcagatctgttttgattgtttagtgaaataataaatgtggccagcacagggcctggcccccaccaggtgctcagtgatcaggatggcaactcctgttgtacctgggaagccgcacctgcccctgcctgcactggtgcttttcagaagcaaaggctcttcatatgtcaacagtcctaggtcggcctcagtccccactcaatcttcagacacaggcaaccagaagatacacgtgggagtgcttctttgggccaggcctccaccctcagagagcctgggtccaagagtgaacaacctcttcattggcctaaaggccaactcaggaaaatttaaatgcttaccggctgcatttcccccgtctaaaatgaaaatcgcttcattgaatgccatggggaggggggcgtatattttcacaacctagattacctacttgattgactagaaatgtgtcaatgagaaaactggtactgcttcttagctcccaaaatataaatatctgagtctatttgagaaatggcagtaaagaggccgcgttctgaaattagatcgggaccatattgagaaagaaggcaggctgcccgggagcccaagggtgcctgtccctgctccagcctggtaccctcatttggtgagatggcacatgacatgtgacatatgcccaacacagagtctggcacaccatcaaggccagtaaatcccagcctgtccgcacccggctgccaagaagtgttttcctttcctgaaatccaattattttctgcccagtcctctgcccattaaaagagtaatgaacaatgggttgagggccaccccgcatcccctgccattcttcctgctccagaaggcacctttctcaggagcccctctctgggtccccacagcgctgggagagggagtgctcagcagggatcgctgaagggagggtgggggaagttagtattcccttacctgccatctctcctgccagggtgttcttgtctgtaaattaggacagtgactctcttgttaccaagcatcagtgggtgtgaagttccctgggtgtctgagagccaggacccagagatcaaagacatcttcatggtagaacttcacctgttttgcctgaaatttgtcggctgagtttctcattctgtgtctctccatctgggcagtgtcctgccatcaacagatcaaaacctaggcctgctggggttccctacactggccacttctttgtaaggaaggtgtagatgttttctacccaatacccaatccctggagtccccattagaatattttcactaaatcaacacctataggacttgctctccatccataactactataagcccttttaatccttatgacaacctgtgaggaaagtacaattatcattcccatttgatagataggaaaatggaggcaaacagagttgaagtgacttacccaagatcatgcagctagtgaatgggagtgggactgggatttgaacttaggctgtctggcaccagcacccatcctcctaaccaaggtgttctgctacctgctaataataataatgacagagtaatagcagcacctggttattgagcacctataaggtgccaggtgctttatatacattattgcatcagatctttatgataacccatcatgtagatatttatgtccgcctctgtgtggcagatgaggaaactgaggctcagaaagaacaatgaatttgcccatgatcatagaactagttaacagtggagccaagactgaaatccaaggcagcctgtctgtgtctccctacctgcagggatggagaagatggtccagcagtcattcccccactggtcctgctgcacttcctggatgctctggctccaaggaagaggggtcttctgaggcccaccaggtatcagtgatgaggacttgtctcatctggaagcaattctgctcagccccactatgctggagcctgggtggatgacttgctgtcagttcccaatgatgccaatgtcagggtggtggggagggggctggtgggagtgggagtgagtgggtagagcaggacagcaggcctcctgtggatgactgattgttggcccagctcatgtgttcccatgtgcctcttactggtggaagctagatctctttatcagttaaatcaaatactaatgacaggaaagtaagttctgtgaagtctccttatactctgacactcctaagttcaaatccagtccccctttctcctgtccttctgactgtgtcccatagagctcatgagagctgtcacttatggagggccaattaggtgccaggactatgtatgcatgatctcattcagtcctcacaacaacctaggatgaagacacagtgattctatctccacttatttcagtgtgagatacttcaggcatgcagaaaagtctagagctaatacagtagtcattagccacgtgtagctctttacatgcaaattaattacaattaaataacgtagagttaactttcttactcacactggccacactgcaggtgttgggcagccacatgtgttgagtggttactgtattaggcattgtgatagaaagtgtttccataatggcagtgaagtctgttgcgcagcgctggtatagagttgtattttataaaagagaaacagactcagctacctgcccagagtgactcagctgggggcaggcagcccctgaaggagctcctgtggtcttgaccagtgttctcaatgcctagctatcatcccctatccctaagacaaaggacattctctagccacgaggcatttgaggtacaaagaggcagtgtgacctccccaaggtcgagagactcctcgagtggcctgggtaatagaaacggagggccctgagccatcgagtgccaccgagtggtctggatctctggctaggccagctcagggcaggggggtgcccccgtggctgataggcccacccctcaaccagagcagccctgctggccgtgaatttttaccgctgtttacctgacgctgttcagtccaggaatgaaataactctccccacagctactatgaattctttgcttccctgggaaaaaaacaaccctgtgattggaacattgtctgcagtcctgtcaggtagccgcgctgagtgacaggtgagagaaagcaaacggccgaaagccattaccctcttacttcagtggagttggaaaaatagtcataaattagtgccgggtactgaacaaggggagaggaagaaaacaccagaaaggaaaaatatcctccctagaaagtcatgatttttctccggagggtgggaggaatagggtgtttggaaggtgatgtctcaaaagagcctgtgcgtcaccccggcctgtgctgggcggctcttgctgctgctccccagggacggcttcaacgcaggcaggacattccggaaaagcaagagagactttgcttcctctcacccactccagggccaccccttgcaggggtgtgccctgtgtgtgtataggtgtgtgtctgagaaagggagagactgtgggtgtatgtgcccgtctgtgtgtgtgcatgtgcacacgtgtgtatgagcatgtgaagtgtgtccctgtttgcatgtgtatacacacatgttagtgtgtctctgcccacatatgtgaacgtgtatacctgcccatgtgtgtgagtcccttcccatgtatatgagcatgcatgtgtgtatgtaccagctcatgtgtgtgtgctcatgtgtgtccctgcccgtgtgtgatagtaagaatgtgtacctgcctgtgtgtgtgagcccctgcccatgtgtgagtgtacatgcatgtgcatgtgagagtgtgtgagtgtgccccacctcacggatatgcgtgtgtccctgctggtgtgtgagtgaaagtgtgtgtgcctacccacgtgtgtttgtccctgcacatgtgtgcatgtgtgagtgtgtccatgctcatgtgtatatgagagtgtgtgtcccttctcacagtgtatgtgcgagtgtatctttgcttgtgtgtatgtgcatatgtgagtgcgtccttgtccacatttgtgtgtgtgtgtaggtactgatgtgtttgtggggtggtgtcccgcttacaaacacacctctgccttcttgcgtggtatgtgtttaagagtgtgtgacttcacctttatttcatactttgcttcttctatatatttgtagcaacccacatggaaaatctccgcccattgacaagacagcatgaggggtgtgtgtgtgtgtgtgtgcacgtgcatatatctgtggggttgcagactgccttggagactgctgttcattataaggctggaatctagggagagcaaaagacagcttgtgagccccacagggatgggtgtgctctactcagggttgtcattacttaaaggacattgcctctattttctttgtggagccaaaggtgtttctccgcagaggatgctagcaagagctgcaaggaggggctgggcacaaggcagaatggctccgcgagccccttcagagaccccagagggaagagggaaggaccacccaggacctgggctgctgggtcctaagacctgaacctcagttcagtgtattaactgtacagacataaacgtgtgaacttgaacaagaacattttgtaggtgataatgtatgccagtggttctcaggcttccgtgtgcatgagaatcctctggaaggcttgctgaaacagatggctgggcccgatcctcagagtttctggttgagcaggtctgaggcgaggcctgagaactggtatttctaagaagcttccaggcgatggtgatgctgctggtctggggaacccactttgagaactactgatgcacacctctgacaaatcctttaacgcacccccagcaccaccagcctgtgaggttgggtgggaggcagtgcgccatagtggttaggagcagagatgaagagcacaggagctgactggggggttcaaatctgactctgccgccaccacctgtgtgcctttagacaaggttctgaacctctctgtgccaaggcttccttgtccatgaagtgtggaggatgatcatatctactatacagggctgatgtgcagaaacagtgcgtgtaaaaagcttagactagtgcctggcacctaaacagcattatgtgtatcggctcatgttattatccccactgcgcagaggagcaaactgaggtcacacttcaagttaaggcaaagctagaatgagaacccaggtcccatgactcccggccagtgcctctgctccccacttctcccaccctggcctcctcaattttgctttatgggagctctggcctaccctagcagatgcttcctgagccttccttcatggggaaaagtgggcagacacttaatttcttccctcttagagaggaattgcgggcgaaacaaaccctgatggaagctctgagctctgccccagcccacacgctccttgctgtccacctgtgacctggccccctgtcctcctctgtccccagttcctctagctctgccagtaaagctcctggctctgccaagccctggagctgccaaacttgagacttgatggcaggaaagagtatgaaaagacagggtcccgctgtggggcccttaagccaaatccttaacacttggacttgagcctgggtaatggtgagccatggcaggtgcttggacatgataaatgcagggtctttgaagcattgctctcttggtgtcactcctcagctcagaaaccttcagtagctcctactgcccacacatcaatcccaggctccttggcttaccaggccaggccatctgtactagcatccatgatgcatgatccttccagcctgtgtggatgcttggtcccctaaaaagattgctatcatctcccacactttctaagggccatcctgttgtacagctccagacagcatggccaggctgcacttgccctgccctgttcagctctggcttctgccaccttttccctcctaggtgcccttccacaaagtcctccctgatctgtcactggaaatggtgtctggcacctcagcttttgggaactcacgattcctataccctccctttgtttatggtgatttgtggccctcttaactcgaacacttgttcctagtaaacacgctcccctgcatagtccctgtacccctctgccggggcccggcaggagacagggcaggggtgaggcaggtgccttactccacgcacgcctctgttcctcacctgctccaggacaccctcctcctccctcccagccttcagcatgtgactgccctcaggctggctctcaggagctgtctttctgccaggctccttctctgtgggcctgagggaggctcagtagctccctttccctccaagagccccaaagcaggctcatgcctcttgcgtcctaacacacaaccctcctggaccctgtatctccctctaccactttcgttcctttttcagccaagctcctttaaagaaaagcaatctttattctatagtgttattgaagtgtaattgacatatgatagactgcaccacttaaagtgtataatggataagtttcaacataggcacacgcccttgaaaccatcaccaccattaagatagcgaacatatccatcacccccaggtttcctcatgccccttcatgcccttcctttccactcctcctccttccccaggcaaccttggagctgctccctgtcactatatgttagtttgcattctccagaactttacgtacatggaataatactgtatgtactctttttgtctgtcttcttccacttagcgtaattattttggagtccttttatattgtgtataaccacagtttattcctttttatcgttgagttatattccattgtaaaagctatatcacaatttctcttttcactcattgatagacatttgggttatttccagtttttggctattccaaataaagctttcgtgaacatttgtgtcccccccttgttttttttgagacagggtcttgctgtgttgcccaggctggagtgcagtggcacaatctcagctcgctgcaacctgtacctcctgggttcaagagattctcctacctcagcctcccaagtaacttggagtacaggcgtgtgctgcatgcccagctaatttttgtatttttagtagagatggggtttccacatgttggcgaggctggtctcaaactcttgacctcaggtggtctgcccgccttggcctcacaaagtgcagggattacaggtgtgagccaccatgcctggcccatttgtgtactttgtgtggacacatgtttttatttctcttgggaaaatttttaggaatgagattgctgaatcatatgtataggtttaatgttttcatttcctttttaaaaataaaaaaaaatttgtgctatgttgcccaggctggtctccaattcctgggctcatgtgatcctcccacctcagcctcctgagtagcaggaattacaggctgacacagctgcacccagcataagtttaactttttaaggaactgacacgctggttttcaaagtggttgtaccctttcaccttcccactggcagtgggcgggggtcccagctgctcctcttgccagcatgtggcatgagaggcttttctttttattgtggtaaaatatacataatgtaaaatttaccattttaaccatttctatgtgtacagttcagtggcattaattacattcacagtgttgtgcaaccatcaccactgcctgtttccagaaccaacttacttgttccaaacagaaattctgtacccattagataataacttctcattctcccttcctcctaccccctagcaatgtccactatgggacgtatttgatttttaattttacttttttttttttgtcttgctctatcacccaggctggagtgcagtagcaccatcacggcccacttcagcctcagcatcctaggctctagcagtccttccatatcagcctcctgagtagctgggactacaggcatgtgccactacacccagctaattttttatgttttgtagagatgggtggggtcttgctgtgttgtctgggctggtctaactcctgggctgaagtgatcctcccgccttggcctctcaaagtgctgggattacaggcatgagccactgtgcctggcccttattttttattttagccattctaatacttatgtgatagtatctcattgtcattttatttgcattttcctaatgattaatgatgttgagcatcttttcatgtacaaatttatttgccatccatatatctactttggtgaagtggctattcaaatctttgaccatgtttagaaaatgagttattcatgttctgataattgagttttgagggttccttatatacagataaaggactcatatatctgagtcctttagcagatatatgatttgcaaatattttctcccagtctgtggcttgtcttttcattctcttggcagtgtcttttgaagagcagaagtttaattttgcgggtctttcagccaagctcatgcactcgcccactcttgaccgcagtccctggcttactgcactgccatctgcgcgcagcccggctcttgctcccaccacaacactgacgtggtacccactaaggccagccagtggctctcactctgccgagttcagcaaatgtgttgcagatggtatatgcctgggacctttccctggatttgaccctgcaggtcactcacgacctggaactgtgttcctcagggacccctgcttctctcccaccactgtgattgtgccttctctgtctccgtctcccactcagcagtgatgcttcccaggcacgcaccctctgccccctttatgtgctctctgtggtgcgatttccctcatatttgctttatgaccacccccaagccagtgatacccagattgcagtctccagcccagccaccttcctggactccagttgcgtggacccagctgagccctggaagctgcaccaggagggccagcgccacccccattgacgtgtccccgtgagaacttttccccaaaccctccctctctaaccatcccacgccgtgttgtttctgaccccagggccttgttcctgccattcctgcggcctggtacacctgccctaggtttcctttcctttttcttttccttcatgcatctcaagccgtctctcttcccggaagctttgctgggattccatccttgggatctttcctctgtactcatggcctgtaatacagcttagcatgtacacacatcctacgtggaaaccatctgtttatatgcttatttcccccaataggtggtaattgctttgagagtcaatgtgacttctaatttgtatttttgtcccccacatctacaggtgtgcctggaatggatctggtgctcgacagatgataggtgattcagtttcagggctggacctgggccagtcccgagcttgtttgtcctcagctccattcttggccacctccagccctgctccgagtggcggggagctgaccccatgggctgccttcctcaggctcccagatcagctggcttctgcctgggtttagccaacaggaggccctggcaggagactggatggtgggaggaagggaggagccagggtgtttctttccttctctcctcgggtggtagctccaaagtttgtgtctcttggctcctgttaacaccacctcctcccttgtccctcccgcaaagggctggcagtgtggctttctgctgggcctctgtctgggtcaccacaccgccctgtttggcctcttggctcctctatcacccgtgtgaccgattccccacgttaaatcccctctcttcgcagctctaacagtgtctccttctttctggttggaccctcactcagcccagctgccagggactgtcccctctgcttgtacagtgctggcccagcattcacttgtccaggaaatgcctgggtgaatggcaggcacatgggccaggcttcaacttgctctgccctcgccctttggccttgaaggtcctgccagatactccacagcgaagcgaggcctgagcccttgtgctggggttgccaagggaggggtctggaggtggcagcaagtggtgggagggcaggttggcagtgccaaggactcctgtgctctgtgcatggccctttatctattaagcctgctgagtggtagactccagtgtggtcccaggtggtgggaaaatagcatctttaattgtgctcggaatgagattaacttcttatctgacagtttgacatctttattgttattaatacccgaataatgcattgttatttttataaactccatggtggcaaacatttttcctttatttggattaaaagtaggtgtatctgttacttcccctcattaccctgggctggaactcagggtctctggctggggagcagggactggggtgaagggaagcccatctgccgagtcctctcccaagtggcagaggagccaggccccagagctggtcacttggcaatagcacagtcaaggtctgggcaaagcctcctggcctccattcccgcctgggaaggcaggatgctcccggagtcttccctactggagaggcggtgttctggaatacagagcctggagactttgtcctggacttactcaggggctgtaaatggaagtacaggttctccacagcatcaagtggatggagaaggaagacataaaaagtcaatataaatgccatggaggaataccaagggccctctgtgcacctgtgtgttcattcataagtatttgctgatcacctactgtgtgccggatatgatgttacgtgctggtatacgatggggctggcatccagagtgccccttttgggggtgaggttgaagggaagggcaggataataccaaagtcaggatcatggctcttgagtcaggctgcctgggcccaaatcctggtatccagaggtcccagggcaagttcctcaacctctctgagcctcaatttttctcgtctgtaaaatggagataaaaaagtacttacttccaacattcttgggatcatcaaatacatgtgaaaacatttgctacactgcctggggcacagaagaacccaacaatattatggatgatgattgtagctgcagctctagacgtggggccaggcccttgcagtatggctactggagggtcaggtgagcagtgggcaggggtgcccacagctggcccctgtgagcatcaagctccctccccagggacctgttgcccactcccaggccccctggctcctccacttacccagtcgttagcccagctgacaaggatgataatgcctctgccttggagagctggcgccgacgtctttatcaaagccaatattaattttcactaattaggagctgccgctaatgagcgtcacagctaatttagctcatctataacctaggaatggcactgctctcatgccaggctccagagtccaggatgttggtgcccgctccctcccccacctcctctccacaatgccagaggcaccagctgccagtacagcctgttcccacatgccaccagggccagcttgttctgcagagggtccagtggccttcacctccagggagccctcagggtggggccaaagggaaaatccctaaggaaggggtcagagtatgtgccaatcagctccaggagtaagtttgaaacaggaggttcagtctgggaggcttcctttttattagggtaccatccctgctgaggctttggctctgtcagttctaatgcctctgtcgcctccttcaggaagccttcagagaccaccttagcccacagagacctttccccacttagtagagctctcactggtcaaacatttggcagcaaacagcgtttgccatgttgccttctcctgggagacagtggaatacggtgctcagaaggtgggccttgcattctggcaactagcagctgttagacctgtgcctcagtttcctctctggtaaaatggagaaaataacatattgctcattaggggcacggggtgggtgagatgagccagtgcattgccacgatcgttgcttttaactttcccattgtgtttcacaggtccacatgcatcttctggtagtctttccttcttaagagaacttacttgtccttgcgctcctctgtgtgctcagcacagacaggggttgtgctcagagcagacagcaggtcaagagccccggctagcaggccgagcccccagcgcatgccaagtaactgttgaatgaatgaataaacctggattcttacttctttctgagccttagtttccccatctgtaaaatggggccattggcttggtcaatgtctaagactgctctcatctctttcattcaagacccttgatgacttcaagtaagaatttggtgagtggatggatgctggcttctgcctctcactaggaagacgggaatggtgactatttgcccctccaggccctgcagggtgccttccagttctcagatggggactgagagtagctgctggtcagagctgtgtaaccttagtgcagggctgcttttctgggccagtgtggctctcttctcaccaccagcacagggaggcattcacctggcttagccctcagacacacgacatccgcaggagctgcccaggagcgtccctgacctctccagcctgctgggacctcccaagtgtgagcatcacagtggggagggcggggtaggaagagagaaagcacttgggggatggtcttagactctctggtttggagttcctgttcctgcttccctttctgtttcctgtgtgcagcctgagctcttggctcccgagaggggagggtctaggagggcggttgaggacagcttttttgcacttatcacctctgaaaagcgaccttcaggctgagccaactttgggggaagagccttcaggcgtgacagatttgactataaatcttcggtattaatgcccggttcccaaggtctgtcatcctgtatgcccgcgtgacaattgaaaacagtgtgaggcccatctgtcacccgaggggtccccgtcccctgctggctttgcctgagcagggatggcaggctgggaggcaggggtatgaaggaaaaggtagggaggatctggccagtgacagggttggggattgcagccaatagctggaatgcaggccctgaggggcggaggctggaaggcagggagcaggccccagttccatgcctggggtcagaagcctgcaggcaggtgggaagaatgtcaccctgcaggagccggggcctggggttatctctggctccatttcccatctgccatgtggcctaggcaggttggctgccctccctgggcctcagtttccactcttcaaagcaagggggtggctgagatggtttctgaggtcctttgtcctctggtcgttcatgtggagcccccacctccctggcagctcccagacatttggtgattggtttgatgggagctgaggataactgtacagagacacagagcacgcaggtggggagggactatttaaatagggcatcaacaatgcaaggggagttttccttccccctcccaggaaaagtacaggatgctgcagttcatggctgcatctttcatgcacatgcccccgtccccaccccttcatgcagaggaggactgtgtctttgttatctcctcatcttgaacctggtaatagcaagtcggcgatttgggagaatctgagacttgtgtctgaaaggatcttccagtatctctagcccaggcttctcactgtattgagaaggaacccagggcccggagaagggaagtgacatgctcaaggtcacatggcagatggctgggtaggaagccaagaaaggggcaagatgtgtccccagctccaatttgctcctgaggattctctggaaagatttggggctggaacagacacttcaagtacaaatggaaaaccactgacttggccaagaggacagaggatgggagcaccagcagcttaagagagggtttgtctgcccctactttcaacttcctatttgtacttttgatttcaagtgtgcaatatatcacatagacagaagggtgtatcgtagaacctggatatacgagttaaagaaaacacatgtatgataaaccaaacacatgtatgatctcaccctggacattgccaggaacttcaaagcaccccctttggcgtgctggcttgacctgctccctcctgctcccagccggacacgcctcctctcatggctcttccagagtgagaacattcctgagagaatctgggaacagtgccttggctgagaggagcactggaaatgttagggctgttctacccttgaccttgaatgagatcccagagggagccactcctcaatctttgcttcttgagatctgtgcagcatcccacatgaccgacccctaactcttctccatcttcctccttggccttcatccaaggctcacttgggaggtcccagcagggtagagaaaccagggacgctcctgggcagttcctgcagatgttgtgtgtctgagggctaagccaggtgaatgcctccctttgtttttgtttttgtttttttgaaatggagtcttgctctatcacccaggctggagtgcattggcgcgatctctgcttactgcaacctccgcctcccaggttcaagcgattctcctgcctcagcttcccgagcagatgggattacaggcacctgccaccatgcccggctaatttttgtatttttggtagagatgggatttcaccatgttggccaggctggtctcaaactcctgacctcaggtgatccacctgcctcggcctcccaaagtgttaggattataggcgtgagccaccgcgcccagccccaggctcctctttgaatcttcctcaggcctctgtcttcagccccttccctgctccctctacaatcctttcttctggacctcaccactctcatggcttcggctgccatgtgcagggtccagctccaaaaacctcctccagcccatcctgtatcctgagagcactgaacgagcatgccctgcatcttactcgagacatctgcaagcacctcagacaccaagtctttcttctccctctcatccaacattcagttcgttgcctaagccagagctttgtatgccaactttcttgttcttaaaccaattcactaagtcactagatcttgctgtttctacttgtgaaatgtcgctcacactgcctgtccctttctctctctgctgggctcttattatcccggcttaggcaggactggtaaatccccagcactgatgccacatttctcctatcacgtgcccgggccagacatcactactctatcatggtactttttctcttctccacacagtaccccaggcagcccctaccaatctatgagaattggcacataagataaaagtgatttgctatttatggcctaggtttcataataaccttccaactagtctccttgctttcagtgtctgtccacacaaatctgtcttctacatgtctgccaaaagaatcttctaaaagtacaaatgaagccaggttatccttctattttaaagtcctttcatagctctcttttgccaacaggatagaataaaagcttcttagcctggcatacatactctgccgagtgctctcagcttctcaccgtcatctcttaccactgtatggttgaccccctccctcctgctgtgcctggagattcacagttctattgatgcatcatgcaaccttacacctcagggcctttgcacctgcagttccctctgcctagtgccctccccttcctcagcctcctgatgatgccttctcatccttcaaggtcctatcttcctgcactgccatggccccttcccctgtcacagggagttgtccccctcggttctcctggagcatcctgagcagccctgcatgatagagcttgtcactgaggttcatttgcaatttctgctgcatctggttcattttacatctccaggatctggtgctggtccaggcaaacatggccccaggtagttcattagatgctgttggggcaggggtctggatcccatgcctcccctgccccctcccatctatctctggtctctggtgctgctctccttggctaagggtcaccccaaattcaatggtacattagtaactccagtggctgtggaggaatctaagagcccgtctccaaagcctgaaatatataaatgaaaacattttcatattttcttagagcccctccttaacaaatgacttggccaaaaacaaggtcttttcttcttcttttttataagaatggaaagcctgagcaggcatggtttatttgtcctgttattttttatgtctgttcatgggtcacatggagactttatgcatttgggttgagagaggaagggagtggccatttaccgagtgtccacttcaaggaggggacttccacgtatggttcttcactgagtcctcagaacagccttgagaaactaaataattgtccccattatgtaagatgaggctcagagaggttaagtgccctgaccgggctcacacagcaggtaattaaaggaggcaggattcaaacccaggtttggctgtctcccaaactcatatccagactgatttcttccagactgatctctaggctgctcatgtgaagggggagcgaaggcagagctaacattttggggtttcctcatgctcatttcttacctcttctctcttgtctcagggttcctcagggaacccgcagtgtggacaccttcaggaggtttttgtctaaggatttgggggcgggtgaactgaatcccgcaggaaagcaggagtgagaggggaagggactgcggccaaggtgagcctgtccatctgcaggagccttgcaaggggcagagtggatttggagagacacaacaggctctcttgagccaggaaggcttcctgctcctgctaatgccataaagcccaccattagggagccattcctttgggtttttatacttttgattcttcaaaaggtaacgtgctcctgggaagcctcacatcttacccaggttattgggtcatgacttgggtgagggtctgcccctgccaggaagttagagagcaggggcccggtgaggatcaggggcagggaaaccaagctggggtgatgctggggtggggaagggaaggggaggatgccagcagcatacactcctgtgggagcagcggagaggctgggatgtgtgtgtgcatccataaggggactggatttaggggctcggggagccataggtcagagacatggctgagatgatgttcctgttagtatcatcacaggggcttcacacagtcaaggctcacacaaaatgcaaattgggtgactctctggatacctgcctgccacgtggtaatccagcgatccacctgcttcagtcccatgactctgctgctgtctcaacatgttgcctctagaatccaccgtggcacagggaggaggggtggagagaagcacctctgctcccccacaccttagctgggaggtgacacaggtcatttcctcctgtggcccattggccagacctagtgcatggcccccctgaagtgccaggggactggaaaatgaggggttgctcgagattctcagggagtgggtggccgggcaggacctgtggtgttcagtctgcagcgcgtctgcccacattcccgttctgtccttaccccagtctggccctatcgtttctgcagcagtttattcaacaagcacttaagccaggctgtactctgggaggacagtggtgagcaggatgcagacactgctgtccgggtcggacgggggctagactaacatcagccaacccatctcgaaagtgaggcccagcacaggctgctctgaaggcctgttggagcctgggctgttggagaggcattgaggtggctgctgcattggagctgagacttgagggacaacttggatgtgaggatggaggagtgtttccagtgaggagggcagaggaacaaaggtatgaaggcaagatggagcaggacctgctgcacacatcagggatggcgtccaggacctgtgagccaggagccactgctggggctggtgaggaaacggatggggtcaggatactgagtgcagagaaggctggaggagccaggatgagtgtagggagactggatgggggcggctgtgtggtctcggctcacacaagaagaaggacatgatggagatgggttatatttgggggtggactcgatagcacttgccaaaggaatgatatgagggagatggaagaatctaggatggctcccagtgtctggtttttggagctggacaggtagtgatgtcttccacggaccccttcggaggaaaatggaagttccattttagacttgctggctttgggtatccaagtggatgtgttgagatggctttgtgaaaatctgcagcctgacagcctgggaaacttggggtggggttgaggttgggaaaggggactttgagatccctggggagccccatttcccgttgcccagctgtggcctgggtggcagccccattttcatggctggagggctggaactttgctctgctcatgggtgcactggcttatcctgggtgtctgcagggccccagcacagtcaccggcaccctgctaaacagattcattaaaagggagggagttccctgcctccagagggtgcagagcagccaggatgagcgaaggggtgaaggcattaactgggccttccctggaacaggcagtctgctgccagctcacagccacccttgggagtcaggaaatggggaaaggagaggtgtgtgatggtggggggaaaggcaggagaccccacatggccccaccaaagagaacagggtttgaggcagtgtctaaatggcgcctcttctcagggtgcacgtgagataagagtggctggggccctgggtgccttaggctaggctcaccttccacatccctccccttttgggtgtcattcagcagatagtgtggtcagtaccagcctctgtctaaatggtggacaaataggtccaggtaggaaagcttttaagtgctggaagctgggaaattactggacatggcaaatgggagcaaaggacttcttggatcagtttctcctccacaattccatcctgagccaagctcccaacatctgggggcttcctctccttcagctcgcagagctaacccttgagacgtggctgcgtgtggggtcctgtggggcagccctgagtctcgcactgtgtggggtcctcttgcctacatgggtgactgagcccctgccagcccacagcagcgggcttgtgtggcatctgctttaggtcagcttcctgctgagtggccaggagagcctgggctgcaaagggtggggggagtcggggctggcgtgagtgtgagtcctcttcccaccctccccgtccagagcatcaggagcctgactgaggcccttcgcaatgagggcctggccaagtccctggtggcggtccccattctgtgattcgccatccccatgaccatagcgggcttccaggtatgaggcccactgccaaagccttcccccaccttccttcctcctttctgccttccctctctttcttccttgctcccttcgtcactttcttcctccctccttttctccctctgtctctttccctccccttctctcctttctccctttgcatttctttattccctctagtattgaacttccaaagtagagttccctgtcataaaggacctcaggtcccagaatcccttgcaggtctacccctccccacctacctggacccctgccccaacaaagatacctctctatcttcttcttcttagcataggactgctttaaagttgatgccagaagtttcttgacccttgggaagcctcctgttctctaggccatagtggacacctgaggttggggggacaggccccataggaatgggagaggctgcctcctccaccccattggtgggggtgtgccagtgctcaggaccacctgtgggggcactggactgctgggcaggtggaggggttaggggtatcatcaatgctgctgggctggtttgtttcagatctcttgcctccaaaaagacctgggggcacttagcaggaaaagccgagtgcgaatggagacacaggaggataaaatattgtggctcatccggaggaagcagagggattaggtggtgtcaggtgcccgagttgagcggattacaacatttggggcattgcatttggccctaagttttctgacagttaaatccaagagggagccatcctgaagtgtttccaggcaacagaaagcgtgcccattaatctgtagagcagtttttctctgtggaagtaaatctccagcaggaattgatcatgtgggtcttggtacaaaggacattgagaggtgcagtcaacagcatcttcagctgcagttttgcagaagatacaaaaatgctgttcagtggcccgtcctggcggatggaggcaggggtctaacattaaatcacaactcagctggggcctgggtgccagtaaggctggggctgggggctttgccttctgggaagctccctggatgccaggctgtccttaggacttggtgacccaccccagcataactgtgcattcactctcacccttccaggggtgacgttcaacatgctcacttacctatccagcatgggacacccaagcccacaagaggctggtggggagggttgaactttttggggagcaggcccaggcagcggggtgggagtgcctaggacagcagctctttatcaatctgcagatggtgttggacattttaacaaccagtgtggctattctggtgattcccagctgggtctcaaccccgcccctcatcttgctcctcactttgccagtctctctgccctgttcccagcctccctcaagaacccaggcgagcaccatctctcttcttccactctggcactttcccccactagctcccacgtgcaagtgcgtcttaatcactgcagtcatgggatgagggagaagctcctcaccctttcctgggccttcgccgtcctaagggctggtccctgggctcagccttttaggtgcatcagctgatttaatcctcctagtggcctgtgtggtggatgcaatcctacacccatttttcaggtggggaactgaggcatagagagtttaagtgccagtcctgggactaggtaatgcaaaaatcactgttttggtgtacatgctcacacacatttcctgtgtttctgtgttcactctccccccacacacatgttcactctcgccccacacacatgtgcctgtgcacacacacatgccccctcacatgcacatttttacatccttgctgcggagccttcaaaggaggtgctgggtcttgtcctccagcccgagcgcacctgtggaaatcatggttctgggatcctcccaccattccacacctcccacggccacagcgtgcagctgtggtcccagggcctgtatctggatgtggggggtgagggcttgaggcatggtggccccattactcacaggtgggaggacgcgagaacagtcgagccgctcttaaatatctctccacgtcgtcctcattaataactgtaatgccagcatcatttgctcttaaatagcttcatttatcaacaagcaatttgccgtggcgaggtggtagggacgcagataagcagacagggccaaagtgcttgcaagacacctgccaagtaccgtcctctctcttcctccatctcccaggggagcaggagaaagaggaggcagcggcaggaaacttaacaggaggtgttcctccaacccagagaggggccgcaggatcacctttttccagactcagaggagctgggcagcacaggacaggctggctgctggggaggctggcactccctgggccccggcgtttgtgtggcactcagggaatgctctgacagctctttcagccgcgtgcaggactgagagtcaggaggtcagagcccggccctgctctgccatctcctggtggtgaccttgggggtgcctttggaccacccactgtgtcatttgtaaacattatcagcaatgctgggcatcctctatcttgtttctgatctcaaaaggactgtgtctaaagtttttttcattaagtgcaatgcctgctgtaggtttttggtatatacattctgttgagttaaggatgttcccttctattcctagtttgctggggttttattacaaataggtgttgactttctcctatgcattgatgtctgtaaaatggggacttgaatgagcaacttacatacaagttcatgtacacactaaagggctgtgtcatttaggagtgtattggctgcaagttacagaaaattggctggcagtggtgtccacaaataggggtgtgtgtttttctttcttttcgtttcttttttctttttttttttttttttttgtgggacggagtcttgctctgtcacccaggctggagggcagtggtgcgatctcggcttacggcaacctccgcctcccaggttcaagtgattctcctgcctcagcctcctgagtagctgggactacaggtatgtgccaccatgcccggctaatttttgtatttttagtagagacggggtttcaccgtgttagccagcatggtctcaatctcctgacctcgtgatccacctgcctcggcttcccaaagtgctgggatcacaggagtgagccactgcgcctggctgggtgtgtgtttttcttataaaaagtggtctgaaagttggtggttgcagagttggttggctcagggaatgaatgacaccattagagacctcagctttttctgtctttggccatccgtcctgcattgaccttttgtgctcaggctgccatgtctgcgacattccaggcaggtgcaagggaggaggagctgaaagctctttgtttgagaggatattcccacctgctcccaagccaacttccccttccatctcattggccagagtcagccagggcaggtgaggctgtttgactgccccagcccagcaatgattcatgccccgaggcaggagatggtcctacctccactggctgtctgaacagattggggctgtgtgggcagagaagcagtgtggggtgggatgggcgtggttgccaggtaggcacatctgccattgtgggtggtcatgctggagtcccttactccagatgggtgtcatcctgccctcagggtgctccaattctatgacaaagccacatttgaacaggaggttgtccaggcgtctcagtctgagatgctcatgcccagctggcacttgagaagccacagagaagtctgacttatcttcctgggggactaattttatttgcaaatggatggagaaagaaaaattttatattaaaagaagcatcaatatattatggagtagaagacagagtttatgtagattttcaggtcagacccacttgaccctaagctcctggagccacgcctgtcctgtcattatgtagatgtcagtgacaacttattgaatggataaatgggagaattaagctgcgaagacattattaaacacaagactctgaatcaatttcatctttggggtctgcctctttggggtccttatttccagaggtactagtccctgtctcctctgcatctagggatgttttgatgtgaattactgaatgaacaggttatttggtggagactctaggcactctgggattacagaggaaagggaggcagaagaatgaatgtgtgaccatcagggaaggcttcctggagggggtgggccttgaactgggaaagatgggatgagaggaggggagcagcctggtgcttttgtagcacaggccagcctagagtgggggcaggaggcggggattatgaggggacacatgacaggggctcgaggggacacatgacaggggctcagctgcaagtaatgtggcataaggtgacatcactgtctaccagggtttccccaaatatcatcttacaccagacctccagcagagtaggacaggtatcatagtcctcattttctagatgggaaacggaggctcaggccatagccacagttgcatggtcagtagggggcgcagctggacctgacctggtgtgtcaaactccagcgctgtactcttgggctactcttcattgtcctaggccagggtctctagagacagactgagctggagattgctgtgcaggaggcttacgggggtgtgcaggagtgagggagcaggactgggcagagggagaagtggagctgcaatgcagctgctggaaaggcctcagccgaccctctggggagccctggggaggggctgatccctgctgagcaagagagccaggccttggtaccttcccaccaatcactcattgggcacagactgcccactgggagggacacaaccctgggccaggcatatgctctgtaccccttcccctgttggcctcccccacctccccaaggtgcatctagaaccagctgtttcccctgcctggaatggccttctctgctctctcacctctcacctccaactcatcctccaggtccaagttcacacgtcatttcctttatctctaaaatctactgtcagagatatagcaaagtgcaagacagtagactactacgtgtgtaaaaaagagaaataaagtgtatataaatatatatgagtgtgtatatgtgtatacagatgacccttgagcaatgtgggggttaggggtgctgaccaccacacagtcagaaatcctcatataacttttgactccctgagaacttagcccaagccgttcagacccgtgttgttcaagggtcagctgtacatgcacatacatacttgcttacatggacgtgacataagcgtgtctctagaaagagacataagaaactgcaaacagcggttcttgcaaagggctggatgggtaggaggctctgtgttccttttgaattttgaattatgtaaattaatggcataataaaatttaaatgaatcaaataattattaaaaacacaagtttaaaaagaatcgttaaatcatttggtggggtggggcctaactgctcacttttctccgtatggcccttatcaccatggtaatgaaataattcatggtgtggttatttatttagagtttgtttccaccccctggttgtaagtggtcttgcccaccatgggaaccccatgcctagacaccctggtgagccttggaggataaccagtcatcatcctcaggccagctactattctcacctctctccttctcccaccccatgcataaaaacagcctacttccttctcattttttgcttattaatgctctttatgaccacttatgcatccagcctagaggcccttgcataatatatccaccctgtgcgtacaccatcattgcatacataatatggcaacatctgcactcctcaggccttggcccctgcccctctctgtacctttctgggaacctcagctattgtccactaggtaccaactctgtgcccttcaaggggccaggccctgggtcatagtcaggcctgcaggagagtgggagatggaccatcaacagttgttttgtgtggctgaatctgccagtgagcacaggcagcatggagggaaagtcaggaggtgcctgggtggaagtgtggaggaaaggcatttactaagagaaaggaggtaaaaggttttccagacagaggaactttggcctggcaccttctcctgagtacaagatgccgtaaatttgggtacagctcctagagaaaaagatgggaatctttctgcgcaggagtgagggctgcctgccaatcttggacctgagtcactgagattggcagcagaaccttttctagtgctgccctggccactttaacaccccttttcctggtccatctgacttgtcaatcatttcatccctccaaaccgatagtatacccatgatccatctgctgcattctgttcccagccttgatttgtttgacccactcagagtttctttaaacatctgattgttaagacttaaacattgaaatgtttcttgcaaacatgaatttccagtttttgttgattgcacctggcaacaatcagtgggaactgagaaagctccctgccttaaacgggacatatgtgccctgcaactcactacattgttcacctgaacttctttcttcatctttttttcctacttatccctagtggcattgactaattaaatagcctgaacatgtctgtatcattcttgttcttaaaagatatttttgcttaatatggaattctaggttgccatttactttcagtactttgaagtacctttcagtactttcagtctattgactttgggatccactgtgatcattgagaaatcacctgtaagtttaaatgttggtaccttgaaggtagtctgtttttcttctttggttgcctttaaaatactctgtttttctttggtattctgaagttttactatgacctatctgggtttgaatttctatttatttatcctgctggatttcatttgtcttctttaatctatggagtttttgattaattctggaacgttctcagccattatctcttcaaatattgcatctgctccattctttgcttctggaatctcagttaaatgtaagttagatcatttattgtatcctccattcttcttagcctttctgttgtattttccatctctaacccctctgtgtggcgttctgggtaatttcttcaattttacctttcaattcactaattctctttccagctatgtctaatcctctacaaagctaatgtgtttgaaattcaaatgatcatattttgattcctaagggctctatttgaccctttaaaaattttccttggtctttactggtatttgcaagcctctctttccattattgaaacacagtaaacatgttttacattctatgcctgataattgtaatatctgaactatttgagggcctgattatgccatctatttttttctttaggttttcattcacagtgcctcggggtgtgtgtgtgtgtgtgtgtgtgtgtgtgtgtgtgtgtgtgtgaattttgactgtgagctactcatttggttggttgagagagtgattctttgagacctgagataaaggtcagagttcctccagagggaatttgtatttgtttttcttaagcacttaagctcactacttgtctgggactactttaaattaaattcttcacttaaggattttagatacccaggccgtgtgaatttgggctgcaaatgcagatgtgggccattagggttacaaatccttaagagtcacgttcccctctctattcagcaccacgatttcagagagttcattttcttttctttcttttttttaaagactggcttgtgtgggggtatgaatttatttctagtcactctgacaataagggggaggttctttggggtgcctgcttgaggggggtgtttcctattagacccctatgctgggtggggcaagattctgccttaggccttttctcctcttttctgggccccggggactgtaataatgaaaacttgggtttacctggttctgtaaatgacccagcctctctgagtttcttccttcatttagtatttgacctgagtattcttgatttttttatcagctcatttattcatttaatacgtttaaacacattttatctgctattttcagttgtttgcaaatttcaagttgatccaggtacctactgcatgttattagaatcagaaatcatgaccacttaaactatggcctatttgagagcaggatttttttctatttatcttatgacttttgttgattctcattgtccagggttgtgtctggcacacatactgaagccacatggtaggtcctccgtaaacgttaattgagtaacaagtgcctgagtaggtgagtgaataatgagtagattagttgataaaatgggagatcgtcatattacataggaggaaattgaggcccaaagaggccaagtaactttccaaagctgaacagtagttgatagctgagccagggctacacgaatgagggtcattagggacagccagggcctggctcagaacaggccaccctgatatcttatgaatgacttgggaaataatagtaacgactgacacttattgaacatggacttatgtgtttgttagacactttttaaagctttacatgtattaattctcacaacaagcttgtgtagtagatactgttattattcccattttacagatgaggaaactgaggcacagggaggcaaagtaacttgtccaaggtcactcagcttgtaaaagtggcagatccaggattgaaacacaagcaaatctagctgcagagcccaccctcccaactgctgtattaagaggggctgagatcacacctctgcactccagcctggacaacagagcgagactccatcgcaaaaaaaataaaataaaataaaaagaggggctgtaaccagtcttggctcccccaccaacctgggtgccattccaggtagccgtgcaccaaatgcatcgattgggtgctttaaagtcaggctgggagctcctcgcgtcatgtgatcacagattgagattgattggtggaggtctgccctgagaccctccttccacacactggctggtggcatgatggggttggggtactttgattactttgcagtgtggctgcatcttgcttgaacccccttagacttctcccccagtgctgctgtcagtccagtgtggctaactcatcagctccctcctcctgcacaccccaggaaacatcagtcaccttgagagaccctgagacatgcaggcaagcaaacagacttgcacagccttgggcacactgtcgaaatccaacaaaatgcccacagtgaccttagccccagacctgtttacgaggtaagagcttctgttgaaccaaggtagtgggtgttggtttggccaaggtgtttttggaggagtgagctatttcttctctttttgacctcagcagaggccatactctacgcccttcatttgtaacacaactaggagtatcacactttaatcctctgaggttgttgagatattcagtacagtttgtcagaggatgagggtttcagcaaagttggcagatgggggagacacacattggaaaagatgaggtaaagaggtcttcatagcaacaaaggagagcaggagtttagccccaaatctgctcctgtttgtggggtgtccagcagccctcgcctgcctctttgagcaattggagggcacttggtgggtctaaggccctgttcagctctgacgttctgcgattcccactggaaccagaggcgagccttccccactcgagcacacgcaggtcctggtgccagcaacccagggaggtcacgtccagggcttattgccctactgcgctgcccagcacagcttcacagtggtgccgcaccctggagagaggcagtttaagagggaggccccagctagagagagcacagagcccagagtcctgccacagtctccaggagtgaaattactcgatgttcaggaacagagggcattgaaagccatgggtgacaggtgtcacaggtggcacagaggtgtgtaggggccaatctctgggcagccccttggctaaatggcaaagggagctctctgcagcctaccctcaacttacccattcctgcctcctgcccacccacatttaccagttccatgatgtggggcctgagagcttctagctctgtctatactagactggaagggtagatactaattccaatggaaagaggacatctgaggactctaggagttttccctctgcctagttaaaaaccaaacacacccaactaaagaacatccatcccaattaggcagaccccagacaggtcaggcattgggaaaactgacccttactctcttctctctgcccctcaaacaaagacagcaggacgctccttgggatgtgctttgcagagatggaatggagtccttggtgtggcttttgacattacaagaaccacactcctgcaaacactagaaccaggtcactctcattttttcattcatccattcatccatcatttgtttagtagacattgaccacaggcctgtctgtgccaggcactcctcaaggctctgggtatacagcagagaacacaggtcagagttcctgccttcagggcgctcacagtcacgtgagagatgttgtccagaggatcgaaggccagtaaggacacagggcggggtgtgctgcgcttggagtctgccgtggggggctcgtggcctcttccagattgtgggattgattcagcgctcctcttgtgtttcccggcttgcccctgccacagcttcttaggcagcaacaaggccaaagaagtggggcaacttgcctaggctacacagaagggccgagagtggaacctcggcgcctgactccatgtccagaagcccatgctgtacagctgtgggcacactactcagcagtgctgagccatagtttcctcatctgttaagagagtgtgtagcccccagacagctcattgcgtgggggagtggtggggttgttggcaggggaatcccagaatcggtggccaggaaagtatgtgcattgtgtacatatttcaagttattatgattatgatcccaggtgctcaggatttggcctgagtgaaagcagctcaaactgcccctgacctgccacccttagaagcagagaggcccaggttccccacccatgaggtggtgacttgcaagctggcagggatccgggcagaaatcatctaggcagtgttctcagactccacactcatgcatccccctccacaacagagattctgttgagaacagcttgtttttccttaactcatttgctcatctgtccgtctgtccatccatccatccatctactcaccccaagaagagacatgcctgaggtaagaacagccagaaaagcccctggcccagcatttccccagttattatttcccattccactggcatcctttgagaggctctcggaataaagggcttcctgaacaaatagatgtggggaaggctgtattttctttaccaccttgtggagcttcacagcacacgttactgtaataaaggctctgagagatcctgcaggaaagaaacctgttcagattttttttctaatgcaatgttccctagatcttttggaccaaggaacgttttttcacagagcacccgttagcctgccagggaattaatgattcgcgaaatacactttgggaagcattcctttacacacaaaatccttttttttaattataatagcgtgcatagaatattcataagatctcttatatacctacctgccttcttatatagggatgactcatcattcagcacttccttggcctgtggttgaacatatcaccatgaatagcaatctatgatgatgctttgtcatttacaagagctagtgaagggactcaaattattttagttttcatttttcggagaattttttgcctttcccttttgtgagcagcagaagctgttgttcatttgcttcctattattgtccatgcacctgcttgggattaccataaatcgcaagcagcaaagtgccaagctcatcataactgtgtgtaaagtacaagtcaacaggctctgagtgaggacttggccctatctctcttttctgtaatgagcttgaaatttagtgcatgtattttgtgccatggcttttacctgctcaaaggcctttggggctaatttcctgctttttgtctatgtcttggataactgggtgtgtaggatgtgactccagcagagggaaggccttctgtgaatcatctggggctggtactggataagaacattgtatatggggtcaggcagtcctgaatcttaaatcctggctctacctcttcctagctgtgtgatcttcggcaagttgctaaacctctctgtgactcagtctcctcattggagtgcgggaataccttcctcgcgtgtttgtggtaaatattgaatgaggttgtgtgtgcaaagtgcttaacagagtgtctcccatacggtagatgctcaataaatagtggcaaggccgggactgcggtgaagcaagctggcccccagggcacagaaattcaggagacattctcagacttgtgcaagtacaggggcaggacctaagcgtgagtgcctcctgggtgcctgacttgcctcatgctagtttccaccctgtctagctgggtcctgctaccccggcacccataacccccagttgatctcagagactgagtacctggaaggcctctggtaggatgagagagacccagccctgcccctgtaactgcctgcccacctgaaagcaggtgagccccatgagatgaataaagggtgtgtacccagggagagaggaatggagaatgagcccagtgaaaagcctgaaggcgcttgctcacctggggccttcggagggtgggaaccaccacggagccccagccctgcccctgagtgggggcagggcctctgccaactgggctggacccccacttccctgtcaaaacttttaaaaacacaaacagaggcaagaacggcatttgcataaatctcattagaaaaagtgcaagtttcataaatcttgtgataaattagtgcgatatcattctcaacgtgatgtattaattttagggcaaaatgaatggtgctgtgatcattgtgggtaattacgagtctcctcaaagaggaagtgatttctggagggacttttctgacctccttcgcggcaggagggtgggaggagggcagggcagaagggaggttgtcttgctcacctgcttttatgattgcgcctttcttcatttcttttcctgctattgaaaggtgaagacaagctgggttgggtctctggctaaggggtggacagcaggggtacaggaggtgatggaattttgaaatcaggccttgagtcccaaattccccagagccaaattattttagaaaagaatcttaagccgggcacggtggctcacgcctgtaatcccagcactttgggaggctggggtgggaggattgcttgagcccaggagtttgaacccagcctgggcaacacaacaagacctcatctctattaaaaaaaaaaattgtaaaattagccaggtgcagtggcgcacttgtagtcctagctacttgggaggctgagacaggaggatcacttgagcccaggagttatgattgtgccactgcaccagcccaggtgacagaggttttggaaaaaaaaaaaaagaaagaaagaaagaaagaaggaaagaaagaaaagaaaaatcttaaatttctaggacctggactcatggaaactctaacttaggggttctcaaaaatgtggtctcagacaggcagcattagtggcaattgggagcttgttagaaatgcatattcagaacctgaaagtctgggaggggcccataaatctgtttttaatagctctcttggtagttctgatgcacactcaagtttgagaatcactgctctaaccgggtggttcttaacttggctgtacgtgggaatcatttgaggatttatatcagaatactgctgtctgggtcctgcactagaccaattaattaagacagaatccttagtggttggggcctgggcatccttatttttagaagctctccaggtgatgctaatatgaaatcaggttgagatgcatggcctcaaagccattaattaacatctttttaatattgggattggaaaattttgaacatgggaagtggcaacaaagcaaaacattttttttttttgctccacctgtggattggcctaagctgaatgtgcctggggtgcccccattgtagctgggttccacatgggtaagcacatggagaactggaagaggctcagggaagctggcctccctggaggagtgattcccattcttgcctgcccagtacatcacctggcgatttagaactttccaaagcccaagctggcccctaggtcagctagtcacaacgttgggagtgtgggatgcagacaccagtattgctcgaaagctccagctgattccagtgtgctgacaagtgtgggaactgctgacctctaggttttcctccatcacagtttctcagatatgtcctgaagattgaaggaacctcagaaatcatcaagaccctggatatcaactccacagcccattggaatcactcgagtggttcagcttgttcttaaatcccgatgcttgagtccctccctggagatcctgatgtatgtggtctggatggcagcctcgtagtggagagtcatcctccagccaggccactgctgttcccccacggtcacattcaggggactgtgaggatgggttcacgagtgcagcctcattcttgagctatggggagggtgactggtgacttctccctgtagcttagggcagaaggggacatcaggatcacttctgagaaggaaggaaccagcatgtgcctgcaagtgtttggataatctctttgtgagcctttaatggcctgcagtgctctgtttattttaatgataatgtcaagttcaatttgccgtcatttttcaacatttccttttgtaaagttaattgaacaattcaatgaattgaaaagtttcaggagaggggaaaaaaaacacacccaccccactgttatcactgttattaaatctggtaactacctcttggctctccaagccctgagacaagacttcaaccctcatgggcctgggagctgccgcaaggattcaggaaggtcaaacagaacattccagggcccctttattcatggctgtttcatgctcaggctgctatttcagggcagaaaaaaaaatatccagtctgccatggaccctggctgctggctctgcggtagctcattccccaagtgtccaaaccagattgtaaacccttgggagccgggttgggtcttctctgcctgtctatcctccgctgcggagcgccttccttgtacacagtatgtggaaaacagagccttaatatcgtagatatctaaactggaagggaccttaatgtggtgtggtggaaagaacagcgtatggggagtccagggaccaatttgagaggcagctcctccacctgctagctgttgagctggttgactgtggacttgtcaccgggccacccagccctgttttctcctttgtaaaatgagcttgttggccatatcaagaatgcaaatattcggccaagtagagctactccctcccctgtgtgcatcgtgtgtcactggcagatcacacacttcttcctactgacctcagatgcaacctcacactccccagcacgacacccacaaaaccatgacccggaggttggagtgggcacatgaaacttgacccatttgccaagattgttttcagttctcctcgtggacctctgcactttggccattgatgccagccccttcgtagtgtcagtggggaaggagaagctcagagacagcagcgatttgcccatggtcacacagctagtcctggctgagtgtgaaccagggccagccacatcagttctaggcccggctgattctctcagccttaaaggcagggacttctctaaggctgccttgctcccaaagcttctcctgtgccctttgagcctgtgttccaagtcctcaacctcctgtccttggactccctggaatgctcgtcctgagggtcacattcgggccaggtgaagggcagggatgcagttcttcatgcctacagtttgcaaacagctgccagtccatcctgaacttccccagggtcccggggaaaggccaggagaagtgtgcagtgtgatagatatgtaggtctgcccgctggactgtcagctgcaggagggcaggttcttctggctgcagtgtttgttttatcatcagtgcctacagcagtaccagggacagcaggtgcccaggcagtgtttgctgagggaatcagtggaggatgtcaacaggagggtcactgagcaatcccagctctgccttgtgctagctgtgtgactttaggcaagtaacttgacctctctgtgatgcattgggttgtaggggaatagagcacataggtgcctatgactggtcctcgcagccctcagcaaatgatggtccttatttgctatgtcagaggcagaggagctccgggtttctaagagtcagggccaggtccctgaagtattggtattcaatgtctgatctttcctctggggcatattaatttttaaaaaatgtgtgtgtgaagggaaggaaatcaggatatcaaagggatagctgcctcccatgcttattgcggcactatttgcaatagccaagatatggaatcaacctaagtgtccgtcaatgataaatggataaagaaatgtggtatatatacacaatggaatactattcagctataaaaaggaaatcctatcatttgcagccacatagatggaattgaagatcatcatgttaagtgaaataagccaggcacagaaagacaaatgtcgcatgttctcagtcacgtgtgggagcttaaaaagtggatctcatggaagtagagtgtggaatgatggttaccagtggctggggagagagtgaaagaggggatggttgatgagtaaaaaaatatagttagctcacacctataatcccagcactttgggaggctgaggcaggcagatcacctgaggtcaggagttcaagatcaacctgaccaacatggcaaaaccctatctctactaaaaatacaaaaattagccacgcatagtggcacatgcttgtaatccgagctacttgggaggctgaggcaagagaactgcttgaacccatgaggtggaggttgcagtgagctgatatcatgccattgcactccagcctaggcaacaagagtgaaattccagccaggtgccgtggctcacgcctgtaatcccagcactttgggaggcggaggcaggtggatcacttgaggtagggagtttgagatcagcctgaccaacatggagaaacctcgtctctactaaaaatacaaaatcagctgagcatggtggtgcatgcctgtaatcccagctacttgggaggctgaggcaggagaatcgcttgaccccacgacgcagaggttgcagtgagctgagatcatgccattgcactccagcctgagcaacaagagtgaaattctgtctcaaaaacaaacaaaacaaataaacaaaaactagccaggtgtggtggcacccgcttgtaatcccagctactcgggaggctgaggcaggagaatcgcttgagcctgggaggtagaggttgcagtgagctgaaagagagcaccactgcccttcagcctgggtgacagagcgagactccatctcaaaaaaaaaaaaaaaaaaaaggatagtgctgtgtagcacaatagggtggctatagttagcaataatttattgtatattttaaaagagctagaagagaagatctgaagtgttctcaacacaaagaaatgataagtgtttgaggtgatggatatcctaaatactgtgatccgatcattacacattgtgtatgtatcaaaatatcacaggtaccccgtaaatatgtacaattattatgtatcaataaaataaatacattttaaaaaatatatgtgcctgtgtgtacttcacttattcctcctcttccctgcccccagagcctctgggtttgtgtcgtccggctctgtttagtgcctccttcttccctggattagcctgtccccatcagtgcagacacctgtgtggccaggtgagcccgcagccccttctctgactctcaggagggaatggccgtcttgctggtagcaataaatagactgaggaaagccagggtgctagaggggagcccatccccaccaagtctctgcctcagggctgctcaccttcagaccagggtccacctggaggccgcccccatggggttagttgctttggggtgagaagaaggctgtattcaggagctgagttttggatttggataaaaggctttgtgataaaaaccatgagggttgtggaatgagaaagacttgggttggactcctggcttgctgaccttgggtaggtcactttacccctctgagcctgttttcttttcttttcttttcttttcttttcttttcttttctctttcctttcctttcttttcttttcttcctttctttctttctttttttgttttgtttgttttgttttgagacagagtctcgctctgtcctccaggctggagtgcagtggcatgatcttggctcactgtgacctctgcctcctgggctctagcaattctcctgcctcagcctcgagtagctgggattacaggcctgtgacaccacccccagctaacttttgtatttttagtagagacggggtttaaccatgttggccaggctggtcttgaactcctgacctgaagtgatccacccaccttggcctcccaaagtgctgggattacaaggcgtgaggcactgcacctggcctgagcctcagttttcctacctgtataacagggatgctaacccctctgtgtaaggccattaggagaaataagtgacagagtaaatgaatgaaaaccattgagtgtggtacctggcaaagagtcatgcccaggaaacagaatgctggtttcctttccccctgacagttcatgccgtcccctccaagtggacggagttgcaggagagcacaggagtgaagctggcctgtgggctttgaaggtagagatggttcctttgacccaggtcaagggttttctgatgacagtgagggcgtcgatcagtgaagggtgagcctagaggccgcctgcctctcaggagagaaccggccagtgtcagagctcactctactccctctgacttcccccaggtggagatattggtgaagcctaagatgaagaaaagagctcccctgaggtcaaaccaagttcaggacccagggcatttgagagactgaaggcagaagggtgggaggtgggacctaagacaaatgagattatccccaggaatcaaggcacttaactggcctgtctgatcccagaggagagacaaatgagatggcaggctccaaggccagctcaggctctggggagcccatcccagggagagtgggagggcaggagcccctggccctggcagggacccggccagccaggaggaggagggtgggtttcccttcttgcaggtgggggtgtgcagcaggcttgatggccatggtgcgacagttggagtgaggagtagttattctcagaaaaccctggccatacccgtggccttggaatttgaggctggggccctgctgtttgcaactccttggctcagctactcacacatgcatagctctatcccaggcggccctctcccggccaggacccttgcttccctctctgcaaaatgagaagggggctttgtctgtttggttctcacttcagcgataactagtccctgcttctgagctagcctgcagacaccaaggctggttctgtctctctaacagccctgagcctggcagaggcagaccactaggttcttggcccctagatggggaaggacagtagatcacagctggtgtgaagtccttttaggtcacaggttgcaaaagccttgctttcttgtgccttttaggattgattatggtggctgcatggaaccctgtattgtgaaggattctgaagttgaatgcagattcaatgggaaaaggtgctgtgattgattaataaggtctgtgtgggcaagagctgggactggctagctccctggccctagaaaagcagtagttaatcatgagggatggggaagaggagaaggaagatttgccaagcgtgtcccagaatatcaacttctaccttcaaggggtgatggcctcttgcctgctgtgcagaggtgcaaacaatgaatccatgcaggggcctggtatgctttcgggtgacagcagtctggcaggccgggcccaggggtgcagagggaaatgtgcatggccagggaggttgaggatgcattgggaagcactagacatcatggtaaggaattcgttttcattctctgggaactaagcaggcgtttgagcagagtgtggcacaatggaaggtgtgctttaaggagatgctgctgcaaggagggagcagggtatgttctcacaccgcttattcacccctccgtgttttggtaacaaatattgctttcatccttctctcatctagagaaaataaaaagccctgcagcctgtgctgccctgccagagtttctggcccgcccctcatctagcaggtactgctctccaggagccgcatgaccacaatccccaatcccagcccttgcccctcagtgcaaataacaacaataagagtaataacagtcatctcagcgatcagcatgggcccagtggggcctcaggggaagctgtgattgtccaccccttgcctggaaggcagatgtggactgctgctgagggccgaggccacggtggaggatgtgccaccagctttgcaactcccaaggggccttagcagtctggtgggcagattcctacctcctacctccaagatggggtacacagcccccaggatggggtacagggccggttcctcagagactggacccccagtcattgcacagctgtgattcctgcctgggcccaaagacaagtgctactgatttgggtgttattaggttttgatcagctatcctttcccctgtccatttgtgcacacagttaagaattaacttgctatactctctcttcccgttgtggctcagagaccttcatgactttggggggctgtcttttcctaacacctctgggcagttgttagcaggattcatttatttacccaatgactatttattgagtgcctccaggatgtcaatccctgtgttaggcttagggatatgacaaggaataggcaggtcaggctgaatgtgctgcgtgatgggcagggggttggggtaggtggtcagcaagtcaagtgaataagcagatcctttcagagagagaggactgtgaagacaataacgtggagtcttaggacactgagtaaccaggcgtctctttagctagactctgctgattgagaatttgaggaaggcctccccaacgtgctaactcgccacccgagaggtgaataatgaggaagctgccgtagaggtggagtgacctagggtaggaaccttcccagccaaaggcacaatcagggcgagggtcccgaggcagccacaaacttgtcctgttcgggaacagaaagaaggcatgtggggccagatggggctcagcccagtgagcctgtgagattcagtgatggatgtcatcttggaccagatcactagggccttagaaatggtcaatttaaggttttttttttttaatttaattatggtaaaatatacataacatgaaatttgccatcttagccatttttaagtgtatagtttagtagtgttaagcacattgacactgttgcctaaccgacctccagaactctttttctgttgaaaactgaaactgtagccattgaataatagttctccattctgcccttcccgacccctggcactcaccattctactttctgtctctatgaattggattactctaggtaccttatatcagggagatcacattgtactgtatttgtctttctgggactggcttatttcactgagcataatgtcctcagggtttatccatattgtagcatgtgtcagaatttcctttctttttaaggctgaataatattccattggctgtatctaccacattttgattatccattcatctgtggacagatacttggatcgcttcccccttcttggctattgcaaagaatgctggcgtgaacacaaaggcacagtgattaagttcttgaatgttctgctttccaaccctgaggttagactgggcatggtttgggtggcacagagtggaggggctggcctagctggatgccccttccccatgagggtaggagaggccaagtgcacagaatcctctgccgcactgattgagccaggagtcctaagactgggcctttcagtcatcctgggacgggtggagcttttctctgcatctaaaatgggagccataaaccaggctgacttacaggcagtacttactggtctggttgtttacggccagcgttttttctgattggttgatgcctgtactgtgcctgttgttaaatatttgaatatcatcctgctataaaccagctacaggacttctaacctggctgtgtgtgagcgtctcctgcagg[450 bp omitted]ttaggagggttctaacatgatgatgatagctaacattttttagctctaaccatggtagacaaggtcatccttatctatcatcttccacagtaactcggcgagctccgcttactggggcattggttcccggcacttcccggctgtgctgtgtttaggaggagcagtctctgatggccggaacccctcgggagaacactcacaggcgctggcagttagaagtcaggctggtgtgtgtggaaatgtgtgtgctgagggacagagggcagggtaccaatagcgtctgctgcggagacccagccagctcccatctctctatcataagagggcattccagcccctgtgaatagcagggtatcctccttaccgctgaaaaaacacccggcctcatccattgctggtgagaatgtaaaataatacagccaccatggagaacactttggcagttcctcaataatttaaacatagaattactgtatgttccagcaattgtgctcctaagtatacatccaaaataattaaaaacagatgttcaaacaaaaacttgtacataaatgttcatagcggcattatttccaatagtcaacagatgggaacaacataaatagctgtcaactgatcaatgaatgaacaaaatgtgttacattcacacaagggaatattattcagctgttaaaaaggagtgaagtactgatacatgctacaacatgaatgaaccatgaaaacatttggctaagtgaaagaggtcaggcacaaaaggccacatactgtattatttcattcatataaaatatctaggataggcgaatccatagaaacagaaaatggattcgtggttgccagggctggggaagggattcatggggagtgactggttcatgggcatggagtttcctttggaaaggatgaaaatcgtgtggaattagtggtgatggttgcacagcatcgtgaatgtactaaatgccactgaattgtgtactttaaatggttgaagaggtaaattgcatgtgatgtgtattttaccacaaatttttacaaaaggaactccagatatccttcagccctgagatgcaaggtatattgtttctcaggtgggaagcaaacctgtgtggcatgtgtaccccagggtcccccagccagagatggttctcctgcatggctgtaactaagaacactgggctggagctgaaccccagagactggcctcactcctgtaggaatagcacaaccataggttgctggaaacctcccctggtggagaaacaagccttgcttcccggagaagccagggctgggcccagcttctgtagagaggcagagcagcgctgggcggaggagtatgtgcccagctggaaaattgcagggcgtcttgtcttaaatataatattaaatcggcacctttaattagtacacttagaaaaggtcactagcaattacctgggacacaaagaaggcatgagcaggcaagagcccatgaagaagctgaaaaggaccattttgagcagcacataattgaggggaaaatggataaaagtccgggaaattacagggtgggtgacagcagctgatggccccatccctgtcctgcccagcgccccccttcttgggaggacctgagcgtcaagcctgagagagccatttgggatattgggcccagttgtgcaaccttggctggaaggccagggtggtcttcccagaatcctcttggccagctgggagcttggccccagatcctccacctgggctgggccctgaggtacagcaggtgaggattgcggtccagggggctgcaggctgccatggactcattgttgcacctggacaagcaaggcgcttatgggcctcagtttccccatctggaatctgcccaaggctttgggaggtaactcagtgtttcccaaactttgccactagagattacctgagagcaatggaaaagaaatgtatactcctagaagtcaggggaggctagaaattcatttatggctttagattatatctttacaaataaattaaacataaataaattaggccggacatggtggctcgcacctgtaatcccagcactttggtaggccgaggtgggcagatcacttggggtcaggagttcaatatcaggctggccaacatgatgaaaccccatctctactaaaactacgaaaaattagctgggcatggtggctgatgcctgtaatcccagctactggggaggctgaggcaggagaagcacttgaacctgcgaggtggaggttgcagtgagctgagatcatgccacttgcactccagcctgggtgacagagcgagaccctgccacccaaaaaataattaattaatcaatcaaatgctgctcccaatgtcttcctgttcgttttagtataaaacatttatttgtcaccgggcaatgcaaacgctttggaaagatgtgcttggtttatctgtgactttcacatacttcctcttacaccgtctagaaagagcaatgaactgggaatctgggagtctggaaacttgggtttgaaccctgcctttgtggctcaccattgtgctttgggcaacttgccaaatgccttcagcttttccaactccgaaatgggagggttgggctctgaagatgtcccaggattttactcctccttctcaccttctcccatcaccttggatgctgccatttcctgctctgctgttctgctgtttgaccttggagaagctgcttcacctctctgagactcagcttcctaatctgcaaaatggatagaataacaactaccaaacagacttgctgggaggatttaatgagagaatccacatgaatggaccttgtgtctggcatatcataagagcccagtgaatgtccaatgtcttccttttccagatcttgggcttcttgttaggatctgataggtcatgtccatgaagtcctgaatcttgagtttacatattgagtgttgagatatctgtgctgtggaaagaaatgtaggctctgagccccaaatgcctgggatgtggattccagctctgccatttgctgaccatgaggacatggtaatcacctcatcactctttgttgccttatccgttaaatggggggaattgcattatggactgaattagtgcatggaaatagctcagcttatgcctggcttatgattagggctcagaaatgtttgctagcatcatcatgttagaactgtcctaaaagttcttttctagataaaattccaagaatttggaatcctttctttctatctagcttgattttcagagctatttggtaaatgtgagagtcagtatttggggcaggtagtgtctgtctcattttataggggaaactgaaacctggaaataagtgatttgccttaggccatggctccgatctcctcacccctttgagaatcagaggaagactatagacattgtcttcggaaaatgacgcgctgtacacttatcacattttgtatacagttctagtgagtttaaggacctcctgaagctaaggagaccaaccatcccagtttgcctggggcttcctggttttagcacatgtgctgggaaatgcttcagtcctgggcaaagcagggcagttagtgaccctacctgaaagctacacaggggagctgtgagccccaggagatgatgccctgcacttcttagggagggtatagaccaggcatcctgaagcctaggtgccctcaggccagggctttgcttcctggtaagggatgacacctgcctctcaatccccttcttgaggatgggaactagaccttgtcacccagttctagactggagttccttgaggctcagctacatcttcttaacctctgtgtactccagtgctcatcataagggcagcacctggtcactcttgaatgaatgccaaaagattttgcaaagtattctgaattagagaaggtgcttccatttgcaaaagacagaagtccaactaaactgacttaggccaaagaaaaggttgcaaggggaattattagctcatatagctgagaagtccagaggatggagctaatgtcagcagagctggtgacagaccctcagaaagccatcaggaatctgtctctccatacatcatttgcctctgttttcctttgtgtgcttcattctcagacaggctcttcttgtgtggtgccaaagatggctgcccacagtgccaatgagcaactcccatgaaagagagctcctctttcccagtagttccagcaaaagtcccagggctggctttgattggctagtttgggtcacatgctcatccctgaaccagtcatcatgaccagggaaatggcacactctgattggctagcgctgacttatatgctcatcttggaacataagacttgaaatattgggggcctgtcctcatctgagccacttggagaaggaggtcttcaaattaaaatcagagaaaggggggcaggcagaagtcataagtgtcttttacacactcagaacatggtgagtggtggttccctgataccatcatgacacactgtgacaagtggaccagggtggaggtggggtacctggatcagagctcccagatgcgccagggccttgtgatgatccgtggcctgctggaggattgctgaatggccactccctgctgagagttcagccacctgggcaaggtaggaaggcataaacgtgacctctcttattttccctctgctctctcccttggctactccaggttcttctgtgacccagttgctggcccaagacatggacaatgaccccctggtgtttggcgtgtctggggaggaggcctctcgcttctttgcagtggagcctgacactggcgtggtgtggctccggcagccactggacagagaggtatgacttgcccatacccctgccccaattctctcctggggacaggaggagacactgggggaaggacggcccgccatcttttggcgtcttcctctaagaccccattctgactccacagtggcatcttcctgcctgaatggtattcctcttcaagggccaatgctggtgtctggacttagggttggaatgggtggctagaggtgtctccaagcaagcagctacattggagaggcaagagggacagtgaccctgtgttcatcccttgtagaatggccctccatggagggtacaagtctacccctacccccagtaaacattcccccaatatccagagaagcaggaattgacggcatggtagcccttagcaagttaaggtaaagacgtgaacacatccccaacccttaccctctccttgagtttgaggaaggaaccatagaggtgtgtagtgacttgctcagtgtcacacagcatcttagaggcagagccaagactagcacccaagatgctcggcttctgtcttttattgctctcttaaagcaaggatccatattccacacctgcttccccaacccaaagggcaatgctggtattttagggaagcctttgggtgcctggttccaggcaagctcctagggcaatcctggagcccctcccgccccatttagggcccaggacccaggacctcagcaccgcctaactgcccccctccctctctcacttttctttcagaccaagtcagagttcaccgtggagttctctgtcagcgaccaccagggggtgagtgttccctggggccctggaggcatgttcctggggtcacaggatttctggacccctagggtggaagaggccagagtcaggtggcggcgctaattgcccgcctttctcttgccaggtgatcacacggaaggtgaacatccaggtcggggatgtgaatgacaacgcgcccacatttcacaatcagccctacagcgtccgcatccctgaggtaggagccactagggttacccttgggggtatcagagacctgctgctccccagaccaccatggtgtaggtgaagagtcaggtggggagagcagctgtggctcttctgcccagacctcagcccaggtgccaactctgagcaggttggcgaacatgctggtaccctgggaatcggggcccagcctggggttgggaagagcagttgggccggtaggttgggagccttgtgctggaggctgagccccacacctccagctggagtcaatggtgggacaagagttgggagaagcaggtgttgcaccctctttccttccactcgtatccaaatgtgggcctgggcagggtgggtgggcaggcctaaccccagatcttcctgctttggccagaatcaggtccctccaggactcagggagcatgcagttctaggaaggggctttccctagccccgcgctctccaccatggtctcccaggcccctgtactgtgtactctgagtatgtttgcatgagtgcatgcgtgtaaaatcaagccattgctggtaattgagaagtacaaattattgcattacaaacggttcgttaataagctggctgccagctcccgatggcaccagggttcccactgcttgcggcccctctcctgggtggctgatggcagtcttatggtctggcagttagtgattcaaagactctgaagtgggagggtaaagggcttctcactgggtgtccctcgggcctgccctcggggttttgggctgggcggtggcagtgaagggttgggatgggaacagtggaaggtagaaccctctggaaaggcaggttggcaccatgtcatttgagttctaactccttgatccaatgactgatcagggagtaaaaagccctgagagaatatcgcagtcagttcatggatgaggctgggcatgggagagtgacttgcccgaggtcgcacagctttaacttcgagccacctggcttctagggcaggctcagcctccctcgagggtgacgagatcttgctcatacaccccactccctggcctctgttactgagctgcgagccaacggtcctatgctggcaccagatggaagagaggacagatgtgcaggtggggatgcagcggaggcaccatgcacttcgcctgcctggggcgggagagaactggggagcccgcagtcctaaacatgggggcatggtgctctgagctgtggccggtgtgcccagggactgcagcttggctcctgctctctctcatttggaagtctccctaatttaattaagggtctctacgtgccagcctgcactccgggcctgggctcagaaaccaagggcacggctcagagttaatgagccttggacccattgctcagctgccatcctggcaggcatggctgccctctcttccctctcatggggcagcagggagccgcactggcaaggagacgaggggtcatgtccctcctctcctgcccttgggctgggggccagccttttcctctctcctgcttcaggagatgtgacttccaacactcggccctgttggaatcccctgggattctccaaaggcctgtgcctccaaggagagagtctcttcaagtcattcattcatttatttaacaaatatttattgaatgtctgctgtgggcttggctctgagccaggctgtcattgtgcagagacctgggaggccacaggaatgtggaatgacaggagttagaactagaggcaagagaccctgggtccagcccctgctctgttcccagcttgctgaatgtgtttgggcatgtcacttcacctctctgtgccatggccctccttatctaataaaaacaaagggcaggtggataaagtggcctgcatgatacccatctgacaaggagagggtaggctgagaggagccagctgcaaaggacacaccgtccttggaggaaggcccacatggtttacttgctcgtgtgtaaacatccctggttgctttagtggcctgatactcgatgccctgcttggggctgctcagtgtggccagtggggatgtggtatcagctggacggaggcctggctactcctgatctgaggtaccttgacattgaccagcccttgcctggtgtggtcacctgagctggaaactagctgcctggctctgaccgcagctggggtactagcccagagtctactggcccctgccccggaaatgagcccaagctttcctgcttgcattgaggtcaccctggaaaccccaggcccctgccctttagagtgtgattcagcagcaaagggccctgcaaatgtgaacagggtgaggatgcaagccagagaaatggggtgagggagcactgcagaccctgttaggtgtgaatgccagggtctgccagggtgatcagagaaatctcagcaggcttcctggaggaggtgggtttccagcagagtctggctgaggtaagcagtggttgctcttgtgctgtttcgtgggaagagagaaactggagtcaggacacctgggttctagtctgctggcttcaggccctacagctttcaaactagggagttgaacccagccccttccagggctgacatcccatgatcagaggatgaaacccagcaggagaaggtccttcccatccttcagcaccttatcgttctttgcaggatggcggagaagctctggtggctgcttccatccattcaattcctctcttggccatctcagccatctagggccctaataatgatggagtctgttgtgtgcagaacccaaggattggcacagggagtaagttacagggtggcaaatccaggtctatctaaggaagagcttcctaataataagactgcccacacacacccatgcacacacagtctatgcccctgccttgctgagaatgtgctgagctccccatccctggagttatgcaagcagaagtaggaggactacttctctccagccatctagcactgcgtgttggggaagtgatgaatcagagggtcccaaacatgccccagcagaatttcccaggggactggttagaaagcatattcccaacctctgcaattgtgaatcagtaggctggggagagccagcccaggaagctgcattttttacaaactcctctggtaatggtgagaacagccaggtctggggagccttggaggatcccactagaggttttctgagaggtgctgaggggtagccaatcttggatgtgaactttcagcccctccatggctgcctggagacatgacccacctggacccaagtcctcaggccaggaacagcagggagtgggaggcggttcaaggctaggcattgccccgctgcctgcctctccttggcccccactccctctgaaagcctctgccgggtccagcccccagctcaggagaagctgggcaggtgtgtgtttgagtttgtttgttctcgttcccctcctgcccaccccactcccctcactaagctgttctccatgtaattatccattttatcagggtgaaaggccctgcaattcacttgtcgaagtcctaacgaggcagtgtagatgctttcaagtccataaagaaaagggaaatcctgctagaattggcaacttaattcaccaagccagcctcgacagacctcattaagtccccgtgtattcatttcaggctaatggctgtcatgctgactgctgtttgatttgctgtaatagacttttatggcgttccaatttgctcaaacgtgtttgcctgtgtctgtgcccagaggtgctgctccagtacctccgttaggggcgcgtgcccgcctcgctgaccttcagcactgccccctccctgctcctcccagggccaccccctcagccctccagtgtgccccagggaggtgaccctggtgctggggtgtttaggcaggaggatgggtgtgaggttagaagtctggtggtgccaggtggctcactgggtcagggaatctggaggacctgctggagtctcagaggtggctgtccttgaagttctgacaagttcagcctccttagctgggcagtctaggcctttatccatctagcatcaacctacctttcccaacttatttttcggtattctcttctgctattccttcatatgaactctcctatcagccatagagccaattcaatggcaatggatacctgtctgtttctctctctctctctctctctctctctctctctcacacacacacacacacacacacgcacacatacacattgtacttttctaactagtactggagttcagcctaactcaactctgcctgtcgttcaaagcccacatctcacctaccatgttcggatctgcccaatttttttttttaatgaacacagcaaacatttgttgaacagctactgagcagggtccagggattctgagctgacttgggcatgcaggataggaaaaaatgctaccatttcccaactgtgtgactttagacaagtgacttaacctctctggatttcagctttcttatctgtaagatgagcaacaatatctgtcttgcaggattgctgtagagaatgtagctaggaaaagtccttagcacagcctgtggcttgtagtgtattcagtaaaatgctggtgattaagaccaaggtctttgtccttggtgaaggcaattttactaagagaaagtcaaataagtgaatgtctaactacatctaaatgtattaaatgccatggtagctttgtatgtgcacagtgtattggaaacagtgtggtctgtacatgggggctatttgtttggggccttagaggctgagtaggagtttgttagagaaagagactatggtgtctatgaatatcactcactttcagggatcctatagcttattttcatatattggaatttcccagaggaaagtcaactctgatttatgattagagacactgctgaggagggacagtggctaagtgggtgtgtgtcctttgcaggtccccactgttacctcacagaaacaaagccaggctggaagtgagcctctgtgtccctgcccaggtctctgtgacaggtcctgtacagatccttgtcccatggcctcaggtgaccagcttgaggtggggatgaggctactatggggaagggctggagctggggtgagatcctgggagcctgagaggtggagggtccttgcctgagcctcagtgctggctgcgatcagggtcagagccgaagccacgcctcctggccctgggccccactaacctgaaccacctctccatgtcccttaacaaggatgaaagctgctcattccctgtacctccttactagagatgggaaagcagagagaagggtatccctggatgccatttgtcaatgaaatcaaatacataatttatttctatggtgacagtaataataaatcgattgttgttgttggtttcctgtgtgcccaacactgttttctgcatgggatctcagggagccctcaccaccacctcctggggtagccactcttgtcattcccatcctacagagacagacactgaagtaggacagttacatggcatgcccaaagctagtcaaagggatggagccaggattaggaggcaggcctggggtggcacgactttttgacatgtagcttcacttctacctgcaaagtagaaataattatacctgccttgcaaacatcgtagtgaggattaaagtaaatgagatcactcacgtagagtgctcagcccgggtcccaggataagtgcttgctcaggagatggctgtggctgttgtttgtgtgttcatccctcccgccagactaagcaaggactgagcttggtcatctgtgcatcctcagcaccctgccccaggcctggcgtatggactgtgctcagtgtcttttgagtgaattgggtgaatggaattcacaaatgcagacagccatgcggctccctctgcctcttgggcggtgtgaggacaaaaggaacatttacacaaagtactttgctcggccagctggtctaccgaggtgagggcttccttactgtgcatggtccagggctgggtaaggagcggtgaggcctagcactgagctggcaagggcactttcacatgtgccttgcactccactttcctcccagacactgaaagcaccttgccctctgctggtgcccactagttcctggatctcagccctgtcatcctgtgtgctttggcatgtgaggagccctggagtggtggccagacagggtccagagcgtgcagaggtggatttggtccaagaggccaacttattagcacccaccgcagccagcagcagtgccccagctaccttcccacatggcgtgcctgtcagatgctgaatgatttataaactgcatcctcaggttgcagcgagaagctggggggggagatgcgagggggctcccactggcttgtgcctgccatggcccctgaggtgacagctccactcatgagcgtgtcatctcccacgccaggagaggcagccccttgacaggccatattaatttataccttggggccacgggccttggcggcccctctgcatctataaccatgcacctattgatctgggagagggagaccaataaatcatcgcaggggctctggactcctgcaggccacagccagagtgggtttttctggctgagcggcagccccagacgatgtctctatggccctcggcgaccaccctgaggtgcctgccctttccctggtctgtcccctctgtcagcacagtgacacatgcctggagccctgctctcttgcggcaggcagatgccatcgcctgcggcagccaggacagcaagctctgggctggtagtggtgaagcgacatatgcttgtgggcagagcagcagggctttctacacagtcctgagggttgtgtgtgtgtatgtgtgtgtgtgtgtgtgttcttatttaaataatatcttctgtatctcctagtgttttcactgtctttcatttgtcctcatgacaactctgtaagttaggggggaattattcttttcattttatatataagaaactgaggccaagacaaattcactgacttctccaagttccccagagtcagatagacctgcagcatgttccatcctgtgtcctgcctcccagagggccctatgaactcgttctcacctgccagcatctttgcatgtattgttttgcaatttgccatggcctgcttttgatttgcaataagttgcagggctgaggccctgatccatccctggctggggtaagcgacagggaactctgggcctcatgcacaggcttaggaggtccagtggagaaactgtactcagagctcactgctggctgtctgcagtgaggaccacccctgctgggcatcaccttgtagctcaggacccagccacggtcatagtgacaccccttccttgtggcctgcagtgttagtgtgctgcagaggcacctccgtgatttcggtcatcagctgtgcacacagcattgtttgtgagaagcaggtgatgacccccttcccctgcccacacacacacaggctaaatgccagcctgctccccttgcctgcagggaagattcaacattttctgccacctctttctggttcttaggtgccaaggagggagtcaacagggtcccacaaaaccagggccctgagctcagcccagccacacactcagaagctgcttgcttcctcctccacccagtggggtgaagccaaggacccctggtccctcatgtcccctgtaacaccacctcttccatgcccattgggggcgtggccaaggctgtgggcgtcctccaccacccacagcaccacgaaagaggacagcgtgggagcaggagatggagggagcccagctgtaattattattttgttttaatggtaataatgttcttaattacatcagtttcctcgccgattctagctgggagtctttgggggcccatataattctattgcaatgattgcgggaccctctgccatgaatacgaagcagggggactgtgcagagcccagctctcaagcattagggattctacggcactcaccgggacaccttttattgtgccccctgccctttaaataaagaacctctaaatggaaggagatgatagctgcctgctagttctgctgcagtgttgggctgtcagcctcgcacgctgagtccatctgccatttttcagctcctttcttttaaatggtttccttgcccccatggtggggcctgatggagggagggtacagggtcttctgcctgtatgccttttcctccaggcagtggggcaccccaagtgggggcagacttaggaaaccaagggtctagaaaggccccacctacagccaagggcagctttgtatcgtgagaacctgtgtccatctgtgacatggggaccagacttcaactgcattgtgatggggctgtgcacatgtgggctctaactgcacactgggaggccataaacaaggtgttagcctctctgagcctcagttttttcatctgtaaaatagggatacactgagttgtgaaagtttaatgagagcacgtgtatgaagcaccacatacataggttgtacttggtaactgatgggtattaccttttttcttttctttttcttttttctttttttttttttgagacagggtctcactctgtcacccaggctggagtgcagtggcatggtgtgatcacagctcactgcagccttaacctcctgggttcaagtgatcctcctacatcagcctcccaagtagctgggactacaggcacataccaacatgcctagctaatttttgtattttttgtagggccaccagcattttgtagagacagggtctcaccacgctgcccaggctggcctcaaacttctgggtccaggcagcctgcctgctgcggcttcctaaagtgctgggatcacaggcatgagccctctcgcctgacctgaagagtattaccactgttatgaaaagctttgagaacttcaggaaagttgcctggaagtccgaggagctcgacagatggactcatccccgtggactgattggctgaagtcagggcattggtggtcaggaaactgacattccagtggcagtcaggaaatgtgtgggaaacataaaacaaagacatggcaagggaaaaaaatgaaagagtcatcaagaaacagctggtaataggcctagacttccacgtagactctgtgaaaccagcacagggtgaccctggaggtgacttaatccagccgcacactctgtgggcgagcaacacactgagtaagggtcaaggatctgcccagggtcaccccgcaattagtggcaaagcatgggccatcaaaggtggctggggaagattctcaggaactggcttccagaacctatgaaacggagctcagccttgggccagaggcacagcactgctttcccaggtaaggcctgagtgtccagaacagggctgggatgagggtgctcccctctgggcagctccccaaaccccatgagcagtaggcccggactgccttcttgatgcaggtcacaggtgtccacaggtgtctgatcagccaccagcacactgctattgttttcctgtttctggggtctctacagtttttatcttggtcccttcacttatcctaacaagttcaagtattgtccaaacagcctggggacaggcctggcagcccctgtgacgtggaggcccaccacacaataggcttgttttgatgtgtgcgcaggctgcctgacccaccttgttttctaccaggagggggaaaacgagacagcgcgagctttgggttgatggaattattataatttctctgattctttagcagcctttaattacttagcaactttgtggtgttggctggaagctgtgagggctgggctctccctctttataataaccttaagtggaagccacctgtccatctattaaaaagcccgctcttctctccagatgagataatgccaccgagagatgtcacccggggcataatcactagatacaatgtaatcgtccccactcactgtcttcatcattgatcagccagcccacctcccaggcatggggcactgccagccccagggagcccaatgcccactcacgtccttgccccggagagtcgtgggctcaggctggtcccctctcccaatcctgctcccaagagagggaaatggtgtgggaggccttttcccactgaccccttcccatccctgcacctcccagtctgagcccacacttcccaccattgctgagacgaaccctccatttcagaaatccatcccatccgtgtgaggctttgagcccctggtgttcctgtcattcctatcccaataccaagtggtcactttcctgccacccagcctttgttcctgcggtgccctcccctgagatgctgccatccaagcccacagcaccatcttccttcctgccaggagccaaacccgacacttccttcctcagaaccatcccgtgggagagggtaggggaggttggtcctttatccccattctacagataagcaagccaagtgctagagatgtcagagcacatatccccttcagaagcagctgctgagggccggccccggctcttcacttagtcctctctcctctggatttggaggcacaagtctctgctccttatacccacccatccgagcttctaaacccgcctcccaggtgggccctctgcctcttgaccttggcccagcctttccttcctggggtggcccctggccccccacctgcagacaggggcggtcgcctgcctgtgcacagtaagacaagtgcagctcaaccctgagtcttgggcgagtcgtctcacttccagggctcagctgctcctctgtaaatgcttgtcctgggcctgtccactccatgctgtctggagcttaaagcctcatgccagtggcatgagttaattcctagagtattttttctggtggcccccacaagcttacacaggttttttttttgtcttattttttgaggaaacgtattacttaagcttacatatggagaagcaaacactcataaatattcagctttatgagtgattgcaaagtgaatgcatttgtgtaactgcacccggatcgagaagcagagcctcaccagcatctagagatcccactgtgcccctccctgtccctctcccttcccttaaaggtagccactgtcctggcttctaaccccgtggcttgcttttgcccattgtcattttattatatccattccagtgggtttctgttaacatgtaagcccctgggagcaggcagccagcttcctcttgggggccactccccacactggttaggagcatggtattaggagtaccacagaagagtttgaatcctgctcttaccacttacatctgtgtgtcactgggaagcttactgtctctgatcaaatgcatgtggtgctgacacaaggtccccactgtgcaggtgatatgggacagtccgcctatacattgcacgcaccagggggagctaacccctgtggtcattaccttgagacactctctcccttgtccagggtcatctttcaggtggatatggagctgcctaggtgctgggataagaggctggatgggtgaagaggaatcatagggaggtgaatgggatggggaaaaaagttggatagagaggaaggagaagggaaaaaaggagaggggtcttttcccctcatactgtctccttccatcctcagtgtagtccttccagttggtaagaaaggtgtgattgtcttcatgttagagctggggaaaaaacacccagagaggttcagtgacttgtccaaggtcacacagcttgtctcacatcttacggctcttgtctgccccccaaagcaagcccaaatgcatttaacccttggaatagacactcagggtttggggttttactgcccggctgctgcctttagaggagccggccctgagatgaaaaggtggaagcagggagggtgtttggttaggggagggattcatccaagatgacctttattgtgttctagcacctccagcctcccacaaagcttctgttcacatcagcaacccaatctcagtcctgcatgggaaaacacaaaaatctttaagggctccttagcggctagaactgattgttttttcctttcctggtcaaggctggggcagggccagggcaatgggagaagaataataaattcttctaaagcattgtctttctcctcacctcccccaaaccaccagatccctcaaactcggggactaccaaaccttagaaaaaaatattccgcccaacacagcccaaaagatggagatggagggaaatgcaatagcagctattggggcggaaagctctaaatggtgtggaagtaatgcctaaagtgtgctggcgattacagacatttccacggagccacactcgggaggcacgggtcggagccagcagccggggggaaataaataaataagtgagcaagccttagagatcccgtttaaccgttgctgtgcagaagggagggatggggcaggtcactggtgaggggcaggaggagggtagagaggctcattcatgtattctccatccatccatctattcattcaaatgtattgagtccctgggatgtgccagggatgttgcaaaaacctttctgtagtgctctgaagctgacgaccagaagcccggaaggctggcggggtctcatcccggccccctctccagcctccccttaaagattctttcccctgctcttctgtattcctgcacctccaccttctttgtggtccccaagggcactaggccacagggcctttgcacggcctttctacttccctggaacacatcaccctccccgtttttcatgaactcccagcttcccctgggatcttccattcctaattcatccctcctcccaatgcagaaagatttttctgttcttgggctttcagagcagcagagcttctatagctttgaccttgaggtgtaattactcacatatatgcaggactatttgatcactgttagcttcttacgggtgactgtgagctctgtgaaagcaggggcagggacatgtggctttccaccgtggacggaccctcagggcctggcgcacggtggggactcagcggatttgttgcaggatgccgtccctgccctcagggagcttcctcccgctcctctgtagcccatatcctttaagagaggaattccatgaaccagcccttggtgtgctctcttccaagacccgtgctgaaggtagctcagaagtgcggttcgagctccctgccaggccgtgggagaagggctgagtctggcctcgtcagtcaaaggcagctaggggcaaaaggaggatgccttgctcagggctactggaggaaatcgcgtcatctaatggggctggagtgtggtaagcagagtaatgcccccttgcccaccaaagatggccacatcagaattcctggaacctgtgactgtgtgaccccacatggaaaaggggattttgcggttaaggacctctctgtgaggcctctgtaatcaccagggtccttataagaagcaggtaggagggtcagaggagaagacatgacagtggatgcagaggtgagtgttgggatctgaggttgttatgttgctggctttgaggatggaggaagaggacaggagccaaagaatgtgggtgtcctctagaaactgaaaaagggaaggaaacagatttcccttggagcctccagaaggaacgcagccctgcgacacctgtattttatttcattttattatttacttattttctgagacagagtcttactctgtcacccaggctctagtatagtctcagctcactgcaacctctgcctcttgggtgcaagtgattctgctgcctcagcttcccaagtagctgggattacaggcgtgcaccaccatgcccagctaatttttgtatttttagtagagactgggtttcaccatttggccaggctggccttgaactactgacttcaagtgatctgcccacctcggccccccaaagtgctgggattacaggcgtgagccactgtgcccggccgacacctggattttagccccctgaggcccatgttggacttctgacctttagaaccacaaggtgataaatctgtgttgttttaagccactacgtatgtagtaacttgttacagcagccataggaaactgactcaaggtgctttggaggcagagcagtgggacatgtgttctaaagtgcacccctgaagcacccccaggctctacctgccttgcttctctgtggccttcaggcaggaggatggaagcaggttgtctgcacaacagtgggaggctggtggtttttgggaacaatccacgagggccagccgtgggcagagcatccaggactagggagggtagctggctgggaagaggccccatggaagccagtaggggtggagtggtagagtccaggaacccagagctgccagctgcaggcaggaacccataccataggtggggagagagggagagatggcaggtacggggtgctggtggtgctacatccaacaagtggccaccacactgctgggacaccacagaggagggttcagcgggggcctgagcatccgtgaccctcctgggaaacctggcttcttggcagcagcccagaaaccagagaaagaggcgtccctgcttggcttgctacagcagagtggcagaggcatgctagagtgttgcttccatgtgccaaccccaccctcattcattcattcatctactcactcaccaaacattgcctgagggcctgctgggtgccaagcccatgcttggtgctgggaacccaagaggaatgagtccctggcctccagcagatcctggctgaaagccttcacccacagcaacaggatgcaagacccagtgcttgaggacccagatagccaccagcaaaagctcggccctctgcatcgctgagggggtggagcagggggttcacccatcccagctttggtgctacaagaaagccgggccctgccttggttcccaagtccctggtcctcctgtggcatgtatcaagcacatcttcctctaggcggtagaattgggtcaaatgagcttcagatgagcctagcaaagtggctgtccctgtcctgtcccacccctacacttgcccccactgcagcatccagcgctcacctgtggctctccacgtgggcccaggaggcaggaagagggactgcctgggtccaaggtgagcagagggacttcccccgtttctgagttatctgtctgcttctctatttctgaggtgggcggaggccccaaaagatggaaaagggctgcctgaagttaggggcatgaaggaggaaggggcagggcacaggcctggcatgggctcagatagaccgttccctgcactgacctccttctccagtttctgcttatgccactcgtatgacacctgggacctcttagtctcaagctccaggattcacaaatgataaaaaatggggtctgtatcttatcatttccttgaacctctaaaccccaggggtactggatggaggggaaacgctgaacagcaataataataacgatcatggagactgcatgcgtcactcgggtgctttttataaccaatctatggccaaggcgttgggattctccctcttttaaaaatgaggaagctggggctcagagaggttaagtcttgcccacgtcacagagcagagatgggatgtggactctgtcagtcactcccagcaccccttaccatgctgcacctctattgaccaagggctgggctgcagaggtgtttatgtctcgagtgtcgggcgcatgtggccggggttctcagagaacccagcagatgacagaccattgtgagagtggtgctgggctcgtagggcaggacacctggactgtggcaccttgcagccttcctgaggtctcccaccacccctctctccagccccaccccagtgccctaggtcagcgtaggacagagtggggtggggatgccagacacctctctcagtcttagagagccaggctgggcagcttgttcctggagagacagcctcccgcccctgcacagggcacgcacgcgtgcacacacctcagttgccacagccgccctgcctccttctgtcccgggtgtctccctcacgggtcagtgcccccaagtgctaaatcatgagcaaatcagccacagccagcgggaggccagcaggacacagggagggaatgctgccatcaaggccattagcactgagcttgccaggtcgacgcagcacagctgattggaagagagcagcccagcctcctcctctgggccctgtgtgtagcccttcaaggtgtgacgtgggacgggacagtgtgggatgtgtgtgctgtctgatcattcactgggcgtgcacagttcatggcctggatgcttggttttgtctccctgtgagaacagtgtccacatggggacagcttctcccatgcctggggtggtttagaggtgttccatcttgaatatagcagagaagcaagaccagggcaccaggagttagccaggcctgggtatgaattctgaccctgtgcaagtgatttcgcctctctgagcctcagtttttctcatgtgaaatggggacgatcacaaactttataaggcttctgcaatgcacatgaagcacttaggaacaggacttgcctgctgcaggggacccttgcatgtcacttccagcatagaagaggagagatcagtttgcgtccacctggacccttttggctggagcagacctcacctccctggtccccatggctggactgggatgtttccatatgcttgggggcctctcatctcatctctctgggcctcagtttacccatctgtgcagtggggttagtaactttgactctggctagcttcccggctggtcagtgttataagaaacacatgagccaaagggtgtgtaatggcatgtaaaccaagagtctatctctccaggccgtggcctggctgaataatgccatcatgccatggcactaaaagggtctcgtagcattcctgtgcccagaaagagaagacagggctactgtgacaagaaagaccatcctggggtaggtggggtatgtcactccaccgccaggcctcttgggacttgggtctcggtgttctctccctaaagaaggtcatgggtcaatcaaattctaacagttaatgtagaggcagggcgtatgttggtaaactgaggtccaggacctcagtgccccctcggcctggccagtgccttgggacgggtcccttcccataactcacccagagggctgagcagtgactgtcaggcaggcaggcccgtcccttctgcacggctggccttgcagccggcctgcggcagacacagcttttttgtttttggttaaaaagcctcatcggagcgttatgatattggaatgtgaagggtaattgagctgaaagctattctcttcctgcgaccagcgcgataggagtgattgaggtgcccgggcctccgcagcagcctgggaatcctgatgaaaggtctgtggagagataggggtctattggcaaggagtagagccaggcccccagaaccctgttccccaccctgggggcccaagcctgccctgcaacatgctcccctgggactctgagctgccaggctgggcctccgcccacctggggcagatagccaaagcccccacatgctggggatgggggagggtctctgatgataggtctttgagcagggggatggggcactgcactaaaaccagcagaacaggttgtttcctgtgtccccaagccccctgctcactgctttgtctttggttagcacacgtctgtttcccctgttctatgggagggtctctctctctctactttgagtctctcttcccccatgttctactccacctctgccactatttggacaaccccagtgttttctcagccgtattttaacacacatgtgagtcagctgagcatttgttaaaatgtggatcctgattcagtagctctgggtggggcctgagactctgtttccactaagctcccaggcgatgccagtgctgctggtcctccgacctcactttgaagacaaaggttctaggaagcagccagggccatgggccaagcaagagtgacccagatgttcaacacaggactcagctgggagggacccacccagggtggcaacagccagttctggagcagggccgccctctggggtcatgcacgtagtacccggtgcagggaggagagcgctggtgagatgcagcccagcactgctcactgctcaggaagctgcgtatcctggagcggggtggccttgtctggaggaaggagcatgcttttctcggcacagaggggccattttttcatggagctttgcactcatagggtagggtccactctgaagggtatgtttttctaagttgtcacaaaagcaccagatggcatgtttctgcatatccctattcctccctccgtcacacacccttccaatctcagaacatctagcagaacatggaaatcaaggagaagggaaactagagtgtatcacactcatactttaagactgtctctcccttactcgcccccagctccacctggctgggtggctcccggccacctgagccctacaagcccaagaaacaggccctttcctgcctcccacctcctccttacccacggaactcagctggaagggttaagctaggacaggcccctctcacccagcctggggtgggaacaggtctgctgcaaggaggaggtccttaaggaaagagactctgacccacccaccccagcctgcagcttacccctctctgaggtccacttgtaactccctctggggctggatggagactcaggcatttgcacacatacacacatacagacacacacacacacacacacacacacacacacacactctccccagactcagtctctgcctggccggttattaattgccatgcgggctgagctgaatgggtcccattaatatatgcttcagcagctcctaggagcccgggctggtgctgggatgccacagcttatctctgtcagccaggctttccttacacaggactccactggcatgtaacaagccctccttgggggctctggacccgtcggccaggctgggtgaggagagagaggcccacctttcccggctctgtctggccagctcaggccttcctctcaccctgccggtgcccacagtggggcctctcagcagccggagtcacagtcccaggacaggtgaataggcctctgcagactgccaagccgttctccacccgccgcctggcctgaagcaccccctttccactctgtgttgctctgccaaggaccgtggggattgtgctgtcattcttgttgcctggctggcatggcatcggggggcaggtgtgtgaggctgggtctctcgaggtcttgcaggtgagcagagctatcacatatttctccctctttcccaagcacctacaattccgacagcctctcatctcacatgtccccaaccagggttggcattcacagccttcgtgaccatcagaagagggaggagtcagaacactcatctccccaaccttctgtccgaccaatgcacagcatcatgtgcagttaatccttaccgaacatgtcccatgggccagaaactgtgctcagcactttctaggcatcgtttcattcttcgaccaccttggaggaaggctcattcactcttcccatcatgtagataaaaaagcagagacccagaatgtgactgccctgggttacacagctggccagcagacctcagaatatgcatgatacatagagagcctgtctgaacaccttgctttggcatgaggctctcggctctgtggcaagttcaggcatctctacatcataagaaaattcctcctatgtcaagctggtataggcttccctgccatttgcaccacatggttccagatttgctggttgggatagggtctatgacagttcacccctaagaggctgccacggggttgaacccagcccttgggcccagcagcagcagcgtgtgaacctctgactagcttgtaactggcttaccagggtttataaagagcaaagaggcctcagagctgtccttcatttgccaagactcccccagctgcggacccttgggctgcattctagctttttgccagtgcaaacaatcggtgtcccctcattccctgcataaggtcataagcccagcatcacctcttcatgattctgaacctccattgacacccacatgtctctaaaaatattgtattttccaattctaagatgcccatttgccccttattttaaaatatatgcagttgaaatgtgtgtgagttagtcgcccacagcctttgcctgcacaagtagtagctgcactcaccccactagagtgactgctctgtgctcattagccttgggaaagtgggcatggcttacccttcccagccctagggtagggatggggagccaggctgggtagggagggggagctgaggtagcggctgaggaccagagagcctccatggcccatcactgcccttgtcttcctagccatagacaacacccatatttggcacttcctgtgcaggcaggaagtggtgacatttttgactcctacacatagattggttctgtgtcactgtggtgcctcagggtcagctttgaaccaagatcttctttatacctttggtctctgaatgtgtgattcagagccaaagaggggaacaacagtgtcagtgattccattctgctcacaaatttgattttctaaggagttgaagagtttggggctggactaaacgtttctcagtcttgttcaaaagacccttagtccccagggaaactaccagccagctcctcccaaaaatggggagtccctcagagagaccccagagcaaaaggtaggaaaagctgtttgggagccaggaaggaggggctgagactcctccaggggcctaagatggggaagtgagttagcttgaggcatcaggacctttgcaggaagcccagtcagccttctccttccccaacaacagccattcccagaagcccttgggcaaggagcctctaattgatgaacttgttcctctgtagctgtcacacgtcttcagttcattacagccccatctgcctctcacagagactgctctccgccagcctcctggctgcgtctaagggagagagcgcctgcaaccgagcagctgggctctgaggccccgattaccttggagagtccaatcagggtaatggcaggcccttctttaggagcactgagcgtcaggggtggaggggagctggtggaacttggagaggtgagttaacccttagccttccagatccagaggctggggatctgtgccagccaggcacaccccacggcagaagccctcccagaggggccctctctgaggtccacttttaactccctctggggctggatggagactcaggcaacctgaccttttgagtccccagccctgagctttccttatactaaggccttctgatgagtaggattaagtttgatgttggcaagttttcttttgtttttgtttttttttttgtttttgtttttttttgagacggagtatcactctgtcatccaggctggagtgcagtggcacactctcagctcactgcaacctctacctcctaggttcaagcgattctcctgcatcagcctcccaagtaagtgggattacaggcatccaccaccatgcctggctaattttttgtattttttaatagagacggggtttcaccatgtgggccaggctggtctggaactcctgacctcaagtgatccactcgccttgccctctcaaagtgctgggattacaggcgtgagccactgcgcccagccgagtatttttaattgtctgtgtgtgcccagcgctgtatctggcactgtgggtgtgacactctccctgtgttctggcctctgctgggtgggactacgtctttgtagaccatggattgctggcactgcctgccccgaaggcggcttggagaagcggcatggtgagctccggaatcacaagaccccttgattctcatcctgtttctgccatcagtcagttgactttgagtgtcacttattatctggaccttggcttccttgtctgcataatgaggacaggaatacctccctgccacctcacagggttaggccatgccatgctgtatttagcctttgattttatgggtaacaaattcaacaaatactcaaatactcattggcttctcggatatggaagacacacaaatgaaacaccgccctgccccgcagaagcctgtggtctaatgagggagacaagtagaaacccacgcaattgtgaccctaggctggctggacaccacacacacacacacacacacacacacacacacacacacacacaccggctggggctgcagaggccagaaggcacttagttggggcagcctgttaaaagcgtaggtgattagagctatgtgacacaggacgcagcacatcccagtcagtggtttggattttctcctctttggcactggagaggttggagggctttggggtcagggaaggatgcagttgtagctctgcttttgggaggggtctctggtggctgcagagacggtagatggggtggcagagcaagacgtgcaaataaatattctctcccccagcccgctctcattaccagctgtctaaatctataactctgttctaggaaagagatctcatcccacttcctatttcccagcattattttttcctgaggtttcaaaagcagcacctttgaagctcccactgtcccctcctcattcccggccagggtctgaattttaaccatcctattttctttaccgattttatgataaacagcccagtgttttcccacacatttcctaagtgtgtcaggctgtccctcagggcactgctgcatccctttgcgccgagatgcccaatcttgtccccaccctggatacatgattgtccccagatcccactggttccttccaggtggccagcatatttccagcccacccccgatccataaactttggagccaagtgtccatcatctcgggctgaatctgggtcaggctggctcataaactagcccacggaacaggcccctcaactccaccacagagcacctgtcctgatttttcacagttttcttgccactctcatgtctgggggtcttggctgcccctagcaaccaccacagcgctatcactgcggagaaaaacttcccatcgctgcggaatccccacagccccatccttgctgctccccttactcaagtcagtcttttgctactgatacagaaatgaaataattctacttaaaactctctgacccctacactttcttgaaatacctttcattcctaaagttcagaagaatcctgccagcttgacaagcagacccatctgcattttccagcccagttctgccaccaccccctatgtcagaaccaacagttaaactcatgtgatagtcagagccacttccctgaaatgttcgaccccgtgacattttaaggttctttcctttgccctgacttctgctgtccagtggctctgttctgagaatggcagttgctgcctgtgctggaagatatgacaggtttggacattggcacagccccaaagtattgctccaaaccaagaagcaaggcttgtggggatctgtgggattcattcttgctctaaactccagggtcctggaggcccctcctggtttggacaggctgagggaagaggtccttccagctgaggaagccagtcattcctggcctgatgcctgaagagcccctgtcttcccctccctgtgtgggctgtcaggagagggcccctgggggctgggctcactttgcctgtgccctccgcggctcttcagggaagcatggctgactgcctgctccatgcccagtcttttccatccagactgctcattgcactttttatggcttggagctggtggtttatggagcaggagaaagacagcagtaggactgaaggaagggcagactggttgggagcgggtggatggtgcttgtaacctctgggtaagcccaaagacactgtgtaaattatagcctgtgtcttgctccgggcccactttgcattcctgatcaggtctccatgttctaccgggaggagggtgagctctgattccctcacacagggcgtggcccctcctgcctttcccagcccgttccggtggtgaggagtcttcggaaccatgagcaccacgagtcagcacctcctgcatgagcctgacttccaggcctagtgggctttgtggcactgtagaaggtttcgctccacatcctggaaaacgccaaggaaaatgcctcatggtgaggccactcagggggtctgaagaagtgggaagaaagcttcatccatagacagacaccctcgcatgggctttcaccatgtggagctctgtgggataggacttgacctgtgttctgcctggtagccagttctgagtgttccccaggccagcggcaactgtccctggctggctagctggaggagatggaccctgatgtgagccccagggcagggacttggttatctgccagggcacagctggagcccaccctgtcccatgtgccctgaggacatgagggtttgagccaggcaagtggcattacattttcactgtgctccggcccagatgtgctgcataggcagctctctccacacggtgttgagttgggacacagggaaagtgcccattaccaaaacagacaatatcaggccaagacagacagtcagggaaatggccaaggaaaggacacacgctctcggcagaagtcctcgatctccaggcctcggggctggttgcccgagatctgcatgggctgggggtcagaaggcaagcagaaggtgcacgcgccttgctgtggcatggcccctgccctcaggaagcctgcgcttgcatcgtgggaaagggaaccaaacatagaagtgagcatggtgtcatggggacaaggaggcacagggagggttactccatggagagcaggctgtaggtgctgacaggcctctgtggaaggagggctcgaggcaccctgaacggtatggcttgatggaggccaaggcaatgaaggggacacatttagggagtggacagaggagcagaaggaggaatgagtttggtctgactggggctagtgaggaggaggctggttcaatggagccagagaaggccctgggcaagagggaggggtgggctgcgaacagtggaaggaatagactgtgagggctttgaaaggcaggtttgcttttgatgtaatgaaaatagtgagtcactgaaggttttagagtgacggcatgacacaaatgagagtaggctgggaggaggacgatcacgaaaacaggaaatgagtggacaaggctgctgggatttgggttgtagattgaatttggaatggggctggagactcacttttgggtggggcagggttgaagacagtggacaatggaaatccattgctgatattcaacgcatagtcccctgtcccatccagacccaaacgggtcagtagggtaagctggatatgtgatgtgatggggaaaggtcttcaggagaaggtcacaatgaagagaaggggccaggatcccaagtggaggaggtggtggaagggacccatcagggtgcagtggggtctctgggggccaggagaccatggaatacaaagatgcaagtacctgagctgtgctcctcttgccatgggagacctctgctgtcctgcgagccttgaggacagtctggcctataaaactggaatgagaggcagaaccatttggatatttgattgcgaggctgctctgaaaggctccatattgccttcgccaccgtgcactggacaggactgccacaggagctggcgctgaccctccaactgctccccccagctccatctccattttcccaaccttcatgggcccatggctgagggcctgggggtgaaagcaagaggcaagtgcccaccctttggggctggcaacccctactccccaagcagaagagcagcttggttccctaattgaataatatgtggaaataatgggatttctcctagaatcatcggttatgtttcggagccaaatcataacgagaaagtcattagtggtaataaacacagcggagagcccgggacatgatccgtcagggatctgacacggtggggaggggtagtcatcccatttgcattttcgtttgctagcagaatgtcactagcattcctgcccccctcaaaaaagtcaagacactagaaaacacattcatataagacatttttcttggtatcactgatgctgaggacagtgcagccaggagtagcttggcctctgccaagtggccttaaaaactgggtgtttttaagggaatataaagagcctttctcattttgatgtccaaggagcccagtgatgaaggaacagtgtgtggaccgcaggcttttggtttctcctcctgcctgtcccatcagtccatcccaaaaaaaccccagctgaaggcatctcagccatttatctggctttatcctaggccccaaatcgacagtgacagtggcccttgaaggagccctgagtttgggcccacgctgtgttaactgagtcaaacatcacttcgtttccctctcctgactgtttttgcgatgatggtgttattatcatcttatttcacaaacaaagagactgaggccaagaactgaagccgactcctcccactcactcggctggtatagagcagagctgggattcaagcctatggctctcccactccctcagtagggagccctgcacagagtaaagctgtcggtttccctctaagcctcagcagccagcactgtccacatcactgagtccattttacagatgggagtcactgagatccaaagtcaggccaatatgtacagcaaggccaggaaaaagatacgcaggtctgcattgctcctggccctacccgccccaaccaggtctccatggtcacgttgctcaggaagaacaactacgaaagtgatcaatgagttcatttccgatacactaggggttgacgaaagctgagaacttctcacagtctccagcatgtgttaataactcgccaccaggtcccccagtgagggaaaatatgtcagcctggtgcctggcagtttcttggcttattgcatggccaccatcaacctcccagattccagaggatcaactatcagaattggaagggaccttccagcctgtctggcctcactcgacgtttgggaaaactgaggcccagacgagtgaaatgacttgttctagggcccgtgattgctggagccattggcccgccccagccaaaagccatttctcttcctgcttccctgtcatgtccaacatatttttttttctgtttctccgattaatctgattttagcaaaacggtacaaggcaagtgcatcaagactgtctgatgctgaggcgaatatactccagcaaatgacaggcagctagaacaactgccttgtccatggatacagcgtgcaacaaactcgcaggagtttgcaatcattcataactgtattttcttttctgtgaatgagtgcatctgggttctgaaagtataccaggtgcttttgcctgccctactctactaaatcctcacctgtggccagtgtgggagttcttaccgctcagtatagatgaggaaaccaaggctggaggcagtgttttgccaagttctcatggttggtaaagggacagaataagaaatcaggagacatgtgtagggacgagagaacaaaagcctgaagccctgaaactgctctcctcacttgattttgaccctgggaacatggctcagcctgtatccagggaacctggggagtttccggtgccttggtccttccagtccagacatgaatcctcctcacgctgtggctctgcctagggaactaccactccctagttctctccccactggtgggacaggtgtgtgacagtgtcctccagagggcagacacctggacccatccacgccgtagcccctttgcccttcccctgggaaccccagccaggaacccagagtgagcaccctggcttatggtgcagccccagcctaggaccctcatgcctgtccagaccagtcccagccctcctggacccagcccacctatagcctggcactccagggctccctcctggctccttccagcaggagaccaagtctttggaataaaaatcagaggtgtcagcttagtgtgcagggccaggggaggaccacttgcttttctctctctctttctctctctctctggtctttctttctctgcttgtggctttgtttgttagacgcatgtcaagcctgatgaactaaatgatgcaaaactagagatataacagctccttttatctcccatttcaaaacccaatttgttcctgctgtctcctgagggctgcattgcaaacccagcctctctcctccttggagaactatgcatattcaagccctctccctctcctgccttcccactccactctacttctttgctcccttctctctctttcctctctcccttctctccatacctgtttctcttagactctctaccttctttctttcccatcttctcccatttacccctttctctgactctcttgacctctctctgtctccctgtttcttctctttctccctctcctgcttgctccccacccatcttcccctttccctctccttgaagacaggctgcatgtgtttgcctttgtcttgttaaatggtggaagagcaaggatgctcactggtgtagcgcctggcagggagcaagttggcttcagaacactttctttgctgcctggaccctggtggggagccagggacctcccttttaacaggaccccgctagtgtgctggtgggggcagtcctgggtggaccatgactttctgctcactaaggatgtggggcataggccatctcagatgttaagccgtcaggcagtatgatcttcctccggggtagggggatggagctggagggggccgaggctcacgtgcagaccagagtgcacaatcctcctgggtctgcactagggaacccaccctcttatcagcccagaccctggaccagaaagcagctcattctcctctgcctttccccctctcactaggcaatttcagcttgactgggttattcagtgcatggtgctaaggctcctgcaggcatgcctgtatgggccagttactagactgtggtcaaggaatgtctcacccgccccagccttcccagactcacaactactggcccttggagattgatagaatcgtggggtctgtgacgttgctgcctgcacaaaccacacgtgctgttggtgatgacttagctggtctcactaccccaggaagaccccctgcttattccccccatttcacttcttccctgctcttttggacagagaaaggaaaagaaggctctgagatggggctagagaaggtcagctcaggaaggagtctccacctaccgtctctcagttgtgccgaccagggccccagctgagaaattccccagcagcccagctctgtgcaaatcccaagtgcccaggtgacttcctgtcccttgggtcttgttggactggagatggcaggccctgatgggagggcttatccagcatgacatagccgatcaggctggagctaagaccaggacaaggtcttctgcttgctgtccctgggccagctgcacactttgggtgaatgggtctctctcatgttccccagtttccaccccaaagtctggttcttggaacccaggttcctcccacgcaggccctacccaactccatccctctggtggtcaggaggtaaataaggagagggccccagatctcctgcaagcccagcgtcccttgcacatgctgccagagccctgctcctgagcacacaattctcatgcagctgatggcccccctggaaatagacagtcatcaggctcttatggatctttcaaacccccttctctccctaataatccctcctctggggcggtattgattcccagccgctggccgcctcttggtatgccaaggcccagtttggggtggataaatagctgtgctgtcattttcacgcagcaattacccgctctgattcctctcctcctggcccccgcaacagccacacggtcacctgcctattgacaacacactcaagcctcagccagccgggcagggaacctatggacctgtgagccacagcaaagttagtaggaacagagactttggaaaggcaagtctggggccctggccctgggctagagggcaggtcccagagctgcaggctgctaggaggaaacttcttcactctggacattgaggagcactgtggagagtgtgcgtgctatcatttgatgggattcacctgtgcatgtgtggctagagaacttccggcaggagtttctgcacccagctccctccttgggttttcccactcctggctgctctgggggtttggaggccaggcttagttcagtcttacatcagaggtcagcaaagattttctataaagggccagagagtaaatgttcaaggctttgcaggccatatggactctgttgcaaccactcacctttcttgtgatacaaaagcagccacagatagcatataaaagactgaggacaacgtgttccaatacaagtttatagatgctgagatttgaattttatataacttttacacatcacaaaatattattcttcttttgattttttgctaagcacttaaaaatgtaaaaatcattctttgctggtggtttcaacaaagacaggcagtgggccagatttggcccacagaccatagtttgctgacccctgatttatatctacaaaagacggtaaggacttttttcctctcctcattttccagataaggaaactgaggctgtgagaggcagtggcttggtcccatgcaggaggaaggcgccttctatctagggatcgctcagtgtgtgaagaccctctcaggatcttcgatgtagttgacttggagatagaaaggtggcgtagcttagtaattaacagccaggtatctgggcatcacagcctggggttggatcccagctctgctcgctccatgtgaccttgggcaagttacttcttttctccagaacctccttttcctcatatggagaatgagggagagtgggatagaggacaaaagaatccctaggatcgtccagctgggagaatattgattaatctgtgactctgtgatttgcagccctcaatcctctgtctttagggtcttgctgtgcttaaggattcttggtcacaaggctgccacctccgatggcaggactcagggcctggcctccctgcctgcccaacagatgtcagttctccagggccccctctgcccacaagtctttgccctgtacagcctctctctgggctttgcagggaggctgagctcagcaggcgcccacctaggcaggaggccgagaagataaggccagccaagacctggctgctgatacctggcgtgaaattgaaaagcaccagactcctgcctccacagcctggtgccctgagggagagaaggctgggaatggtgaatgaaactgacccgcccagccagcagggccaggctccaggctgccacacttcagctctccccaccccttcccctgggggaggcacaggctgagcgggttcttcgaggctctgaacagcaagcccctttccagggtggcagcgtgcagggggcttctgtgagcctaggggctttagtgggcccctggttttgaagtgggggacaaccaccaaaaaggggaattggatgggagtgcccttgccttgtggaattaggcctgtccagaggccagcgttgcagtgctctaaggtcattgtaatgcaaggctagcaagtccagaacttctcagaacagcccgaatgcacagacttatgagacgctgttcctccagggccccattcagcaggtgtggacaccaaggcccggagagctgagcacccggccccacccaggagtacagggagttgggtggggacccaagtgtctgatttctggagcagggctttcacttctgcagcccagtatggtccagaacttgtcaccctcatcctcaggcctgttgtccccgaggacctccattatccagagagcactggaagaaaccttgctgtagtagacctgaggatggggacagctcccctctctccttaccctcactgtcaaagcacccacagatcagatgtctgatggtaatgacctctccagggtctggcccacagcatgtttattagggtccatatgcagccgatgctgtccatgccgggtgaatacatgccaagtgatttcctgttcacccagttccgcatagatgattctggttataacagtgcaagctaagagggaggaagtcaaccattttttttccatcagcaatctgaattttacaagtcctcatgcttctcctagccactctagcaagggaaaaggttctttccatttgacagatgggaaactgaggcccagatgggcactgtgattaccttcaggctctatagagttcaggggccagggtggagctgaacctcccagcaccctcttaccagccaccccaccccatgtggggatgtggaggatcccagggctgctgggacctgttgcttcacagtgacttggttctcccaaagctgctaagtactgtagagcagaatgaagtgcagcagacagatccttgggcctcttagagagtgccccaatttgtaaaacaaagcttgagaaggagaaaaaaaaaagatggaaaaaagcaaattggaagcaagagcaggctgtattttccatcccttcaaccatcagctgctttaaagggccagcctcgtcctcgtggggcaggataggataaggaggcaggcctgagcttttaatcagagttatgttagataaagcttttattattcacctggctttattatagctctttcctgaggttagaagctaattttcctggtttttaccgaactctggtctgcttggctgccacagatgcaggagaggtggacgggagtagcggaaaaaagggagatgggggtagaaatcaaatcaaataaactctcctcatccagtggaccgagagagtgggcggaaaacaactctaataacaggggaagtttccagaggtggaagcaggctggtgaaatcaggcctaatcagctctagcagaaggggttccaatcacccccagcctcaccagggggagggcagagtggacgaagctggcgatgggagtaggctgggggctggacagtggcaggcaaggcaatcagagccctgccagcagagcctgccccacgcccgctcccaccctctgccttgtgttccagccacaggagtgggaatgctggcagagggttaaccggttagtgaccgggatggaaaagaggaggagcatacctacaccaggcccggggccacaggcacgttgccctgggacacgctgcacaccccaaatacccctcccacaatcaggcatgaagtagaagccaccaatgccacagacaagacccacgaggcaaagaactttggccacagctatctgggggaagaagatagtgctccgttttctaactctccccaccttcaaagggagtcggatcattttcagttgacttctccgccagtcaggagcccatcgaatgatgttccaatttcttgacagttagagagtcattttatggctagatttagaggttggaggtggtctgtggctggggtctggtgtctgtgactggtgcagtgtgtgccctggggtaaccctggggacagagtcagtccccgaccccaacccctggtgacagtagcaggaggggaaagccacgtccaccctgtaagttactgtcgaaggagggattcgcatccactaaacagccattaggccagaagcaccagatgcaatagcttgaaagagacagcagtgctcaccccagcctttcctgggggttgatcatttaatctctttagctcctgctacaagagggaaagaagactgcagagaggagaggtgatattgagacaggcaccgtgctcccaggccacggcaggggagggggaggacagagcagctgtccctgccagagaggtcagtggccttcggagaaacccattagaccgttctcatccaccgtgcgtttcattaaaagtgagacagtttgcaccttccactttctcgggctgtcttcaggttgtcgtcatcaatgagcctgccctgtgtcccctgcaggggctgatttctgtttgctccataaggagacccgatgcttacccccaaagagtcttttgcactttcagttagtctgataagctttagatgccacataccatcttcctatttgctatcattcatttattcattcaagaaacagttcttcagggcctactgtgtgctaagcactgttcccagagctggggacgcagccaaacaaaactgatggagtccctgctgttggcacctttcatctagtgggggagacaagacaaccaacgcatacatctatgtctgctggtgagaagggccacaaagaaaaataaagcaggcaagtggctagcgcaggctttgtggccagggagggcctctctgaggacatgtgagcagagaccttgagggagtgaagcacgcattatcttaggggaggtgactctccaggtagaggacagagtgattgcagaggccacccccaccccccagggagtgacgggcaatgccaggaggacatctggggtggtatagacacccgagggaagtaccagggccaaacagaagtaagactgaaagcagagggttttggagtcttgtgtaacccggctgtccaagtttgcccatccaaggatttctggtcttgcagcctcatttcccctctgatctgatggccacagcattctcacacccaggacagggaaatcactgttttccagctcatatcccctctcggtgtcttgtctcaaagcccctccgcctctccagtgctggtcatggtctccttaccaatgccccttctccatgtttatttcagcaactgtaactcagtccaaagcatcttcctctctacctttagagcttgtggagacattcgtaaaagaaacagaggcatttgctcgtgcggaaaaatggattttgagtggctcctctataccaggcagagcgatatgatggtaccggagctactgtggtgagcaaggcagttgtggagttttaatgcaacgcaagcaattttaaggtggtgtaataaatgctgtgatggaggcagtgcagaatgtgggctctgggagcccacagaaggggcacccaacccaggttcagggaattagggagggctttccagaggaggtgataaacaagttgggactgaaacatgcataggagttggcctgcgtgtccactgcacctagaacacagaacatgcctgatatatagtaggtgcacggtcattattagtggaatgaatgaatggggaagaatgttccagacagacagaacagcatgagcaaagatccacaggtaccagattcaggcagtggaggagctgggaactaggacacaggtgcatcgcccttcctgtcacacctcctgacatgaagatgggcactctgccttcacagatgccttcagactctctaggtgcctgtcagtgtgcctccacttcccagcaggggctaggacacagtgctcggtgaatatttgttgaatgaatgagagggagagacttcagagctggtatttcccagccatctcattaaataggcagatgaggggcaggtcaagagacgggtggccagggtgtcattcattcaacagtgatgtttttcagtacctgtttaatacagggcactgggccgggccctggggacacagtggagagcagacttgggcatggacccaccccaaggagcttacagtctagtggggagtcagatggtgaccagagagtcacctaatgtcagtgggattggagacccagagaatagccaggtaactctgagcaaatacagccaaggacccgatccagactgggggtcagagaagcctctggaggaaacaggcctgggtgagatgtgaaggctgaataggcaagagttgggggtgaagatgaggaaaggattctagcagacggatggcacaggcagcggctggaggcagcgcaacacccagttcatctgaggaagtgcaaggccagagggctggagggaggcgaggagtcagtgaagccgagaagggcaaccaggcaggccaggcggcgcaggtgtggaagggcttctgtggtgtttatctggaggtcaacaggaagccactgtggagttactggaggactggaatagggttgtggcgacacgcccagatatgtatttcagggcattcatagcgccacgggggagtccacattgcagggccagagaggctgtggagcccagtgagccggtccccgcaggggtggtggtgggtgggagggacaggagcaaactgctcctggaggcagaattgcaaggaagagtctggtttctggctcagtggtgggtgcagagggaatgtattgacattcatggagccggggacacagtttccagagtttgttcttaggcgtgctgaatctatgccgtctttgagactcctgcagaggcatcaagtggacggtggcttgtttgggacccagagaggcctccatggagatgggagtgtctcaactgctgtggccagggctaagcagccacttggcgtgcttgactccagccgggaacaggagccggaagagaggccccgtggggtagggtcagtcggaggctggccgctgctcctccagcctgcctggagcctgtcagctgcgtggtgacggaatgcatttctctgcaccggaatagatttgggctcagcagttggctctaagtgctttttgccctgacgttcagaaatgagcactggggcagcgggagggctgggattggggagggagcccaggggacagggccacagcctgcgggggcctgctgcacgcctgagtaaatacgtgtttgccacatcacacgcagtcatgcggggtggagacagagaggggagagtgtctttgtgtatgtgtgtgcgtggtggaggggggtgatggcatatggacttgagctcctaatccagtggcctcagagtacaggaatatctcgaggtccaggaggggtgcacagagcctgacagctgcctccaccgaatacgtcttctttatcttcatgtagatcttggtcagaggcaccagctctcctccaagtggaagggattaggggacaggagaagcaacatcagaggtgggctgggaagaggtaatgtagagccccaacttggggaaccaggaggaaaacacagtcccatgtgcatgtgcagcctccctgcaggtctctgggtgtgtgatgccaaaccttgccaaggggggcactgtgtacacacagagacagagggaaaaaggaagtagtacagtcctcagggtagtacttagtggttgtcattttatcttttaggggaacaactttggtataataaagacttcatttaagatcagtgttgagctgcctcctttattagactgcaaagcctgtccccatgaagaagccactggctttgccatacttaggcaaagccttccagagagttcttgaaaaaccagctctgagcctgactaggcctctatcttggttcaagagaaatgacttcctgcctgcaatcaccataaccgatagctcatgagacagagacagtaaataattgttccacaagtttcaagagcaagcgtaattagtacagttaacagtgttaggtgattaattggttcattcagcaccattgtgaatgaggcagagcgtaagcaggggaggggccagagcccccagacacccaaatgtggatatggcccactactgatcagccaggatctgacccctgaaacagcagccaacagctaaaaggcattcacctccaagagctggggctccttgggccagagcagagggcaggtcactgggcagggcccacagagtttgtcccattagtggacattcagggctggaaagaactggatttggcttccatattgtttcacctgtttgccaaaggtcagaaagctgttgtaagtgaatgataagactgaccgattagcccatataggaggggagggggcacggatgcatagagtcccagcctgtggggttggagggactccagagaggggtcatctactggatctcttgaccactgagctgaactgctctggggcatccctgtcagaggagactgggctctattttaaagtcctccagggaaagatgctctaaacaggggtaacaagcagcaattcaaatcatgtgccaactccaggccttcgatggaagctgcttatcagcatgttgggtagagaatcccgaggctcagtctgggaagagcactgtgcttgactggcactgcctgccctgagtgcagaacagaggagaggcagcctgcgggccattttcagatcaaaatccacctgggtcactcaggcgggttttacacttttctccaaggtagtttcttggggcctcacttactgccccagagaagcgaaaacggtcttgactgcaacttcaaggcactagagggtgtgagagatgatcaggaaggcagctgcagacccagcttgtggggcggggtcggggaggttcctttcttgaccttgtgggactacaaggtcccacagaccttgaagcacagagcagggtggagagttgggaccagcctgctgggtttatctagctatccctgcctccgccaggatattaacgggcttcccgcagatggaaacttctctttggaaacagggtattgggagctttagattaaggcagagctgagtcccaagactggccctcctctcaggagctaggaataaggccttgagctctctacacctgtttctcctcctttacaatggggataaagcctcagggactgttgtgagggctgaagaggagaaagtacgtaaaacttctagtacagccttggtcatgggacatatgaattctcccacagatgttctgaggtttggggtgacacattaagaccagactgactattccagtgacttggcaggctgaggagtcggggatcgcttgaggccaagagtttgagaccagcctgggcaacatatcaagagcccatctctgtaaaattaaaataaacataagtgagctagatgtagtagtgtgcacctgcagtcccagctacttgggagactgacacatgggaggattacttaagcccaggaatttcaggctgcagtaagctgtgatcgtgccactgcactttaccctgggcaacagagtgagaccctgtctcaaaaaaaaaaaaaaaaaaaaaaaaagaaaaagaaagaaagaaagaaaaggaaaagagaaagaaaaaagacaaggctgcctgtgggaaacgtgttgagaatgaacagctgcttcaggcccaagtccaccccagggccccagtgctgttactctttcccccaccgtcccatcctcaaggccactgagtgtacaccaggcatgctggatttgcaggtgtgggggcagcatcaattatgctgctgacacggggcttgctaagcctgggggaagctctgggaagagaaagaggagtgtcctggggtgggtggaggagggaaggaaaagcagatgtagaaaagtctggaagatgcttcccctccaccaccagagccagcccccaccggctgcctcccctagccaaaaggcaaggcttcctcgcagcagaaaacatatacacatatttgcaagctacagtacaaacgagcggcaaacctaatgattcgtgattattatttgaagggtcccactgttacagatttatttgtcatttcttgtaataacaccgacagtaatgaattcgtttgtattaatgtgagtgtcacgaggacttccgtcgaaattccgcattaattaacgtaccattaaaacaaagtgtcgcccaattaatatctaacagaggtaaggctgccagggtcctcttcatctgggtttcatttgtaattcatggtattagcatcctgcttaatgaacgtcatttgcaattcctaccgctggtctctcccacttcctgggggaaggtcagggtgccctaggagctgttgggcccttcactgggcacccccggggccaggaggagaaggagggaggggtgggactctgtttctaggtggaaatcgagtctccgcattcttcattccagaaggggcttggaaggcccttggaacttcctgatcggttggttatccacttcagttacccagaagataccttcttgaggttctggtagggaagagaaggctagtttgtttcttggtcaagcctgatcttaacagatgagaccatggccatcctaggaaagccttccagcagggagcacccaggattctggtttccctcttttcttagtgtcagcctggtggtcttctcatggtctttgtgtgacatgagaagactatcagactgaccccaaggaccctcaggacctctagctgtccctgaagccagcagtggagcccagtgggccttggtctccgagacacaatagaccaaggaattggaccctctgccctgttcctcccacaacccctgcggcagggcccacctcccccagcagggacagaggcaccatcatccagcctttagagctctcaggaccccatcctgggacagctcctgaagacaacatagccgggcaccctcccctctcagggaatgctcctcaggtgagtggacctccttgggctgtccccgcccaagtataagaacctgaggctgccactggcaataatgaagtttcctgcagtgatggctactaccgctatgactgtgggccaggcctcaggctgtgtgtctcagaatcattactgctaggcccacagatgcaggaggaaggtgttattgcccccattttacagatgagaaaactgaggctcagagagcttcagtacttttcacacagaggtggaagaggggaacaagacaggtgtctgggttgtcacattgatgtctctgtgtcctcccatcctttccagctagtgatccacatgagagctggagggacagggcaacagggggccaggcctctggcgtcctggcttatagtgcccttgactctcagaaagtccttccttcactggtcgcccacatgcagggactgtgccctgcagtcctggcacatggcaggtgcccatagccagccgtggggcgttttaacctgtgcttcatctgcatgagagtgtcatatatctcactggagagtgaggctcagaaaaaaaacaggaaagggagggagaaatgctttcattgatttttgcttcagaacgtgctgcctttctatattccaaggatggtcccagagcaaagaggctggcttggaactagagtgccttggatttgaggaaggactcacaactgagcaggaagggagtgcggagtgatgtggttctgccccctcattggatggacaaggaccggaaagccaaaaagctttgattcttgtccagaatcacacaggggaccctggtccagggtcttctgtcccccatccagggctctttcttccaccccatgctgcttccctcgaggttaagaatgctgtgtgtttgggaagccaccttgcatccatgtttggacaaggtaggggacgtcagggagtcagcactaacatgggcacctgcaggcagaactcactgcagaaaccgtctgtgtgaccaccatccagtccccccactcccagcttcagctttttcatctgtaagacagggttcctgggctagggcagtgcttccccaccttggctgtacatgagaacttgatgggaatttaaagatacagagtcagggactgggcgccagcctgctattttttaaaagctccccaggtgattctaatatgcagccaggggtgtgaaccattggaatagacattggaataggatcattcggtccttcttcactgattgaagcttaagccattcctccaaggtccccagagcccagtgactctgcaactgccctctccctgcctgggtccagctccccgcaatctcctcaaaccccccggccctcaccacccctcagctcctctgcagccccgttcgaaccttccccagctctgtctgcccctaagccccagggcaccaagtgacaggttccacttatcacatcacaccgcctgaagggccggcagcagtagcctcaggattggagaggcagaaaccacaccaggcctaccccaccacactcatacctgcccaggcctctgctgcccccttcacccactccttcagaatgtacactcacccaggcttgggacagagggacaggggtgggaggagtccgaggggcaggggaggagagacagcaggagagctgcgttgctggagctgtcttcttattcagaatccatttgttaggcaccgcttcccatagatgtaaggcccgccctgaggagatttgcatattcattttgtttaacatgattcatcatcatgcaaaggaatgaatttgggggctgggagatggagccccatttgtgagcaatagatctgggtacaaagagctcagggcagtgttagaggcttttgcacacccagagtggtcccctttgggatggaggtgggagacatatgatccccagagggttccctgggagttttatctctgctaagggcaaagcagggacctcagcctttagaaccttcccctccccttccagaccttcccaccataagtaacatctgcaaagcactttgcagtttactgacccttgtctatacacatttccaccttaacccttacacagccccgtgaggtaatagcattatgacagagccaaagatttactgagcacctattatgcactaaacactttacacgctttgtctcccataagcctcactgtatctccatgaggcaggttttcttttttgttttgtcggatttttgtttttcattttttgagacaggatctcactctgtggccccagctggagtgcagcagtgcagtcacagctcactgcagcctcaatgtcctgggctcaagcattcttcccatcttagagtcccaagtagctggaaccacaggtgcacaccaccacactggactaatttttttttttttttggtagagatggtctcactatgttgcccaggctggtctccaactcctgggctctagcaatcctcccacctcagcctcccaaagtgctagtctttttcttatttaaaaaaaattccaggagactccttgcgtctctcagtcaccacttttcagaatctaccaagtctcaaggttactgtatgcctccagcccctgcagccctgggttcagagacagtgccctggaaccgtgatggcccagcttctggactacaggctagctttttagacaggactcttcttatagatcacatcgtatcattccctggatttttctcttggagttttctgcctctgcagaaagttgtgagaatttttttttttttggcctttgatttttcaaaatatgtttccatagttaactcattttatctccaccccagctctctatagaagatagtatagggattactatacccatttcctggatggaaacactgaggcatcagatgtttatgttgacattgcatagcaacagagaaggaagtgggaagttattggagagcagctggactgtgacccagagtctgggacagttgtttctgggactttcctaatcaggccagtgtgcatggagaggaatacaggcaccacacggatccttcctggtctccagaagcttgtttccaagtccctacttgagggcacgggggtatgaggcttccagcagccaatcagaccaatcactctggctagggaggggtatgagattatgactctaaatagctaagaactggatttcccaactcatacctttattcttggtttcctcccatttcatggagaggaaaacagaagcccagcccacgagggagggggtggtacctggtacatgctgcctggtgttgaaagcagatgtcctgggcgctggggccagggtgggtatcagggctgcaccgtcaccacggccctccctgttccctttttctttgcgcacagcccttagcccactgctgggaatggaaatagcattctttataacgtgaaattatttcttccttagtgtttcagcctatagtgtcactgttatgaactttggtgccactttgactcttgatcctttgtatgtgggccagccgtccgtccctgatgcatgataccctctgctgccacgtgctctctccctctgctcctgctggtctgcaagtgagaagatgcagggggagcctggaggaggcaggtgcagggacggccctggaatattgtcagtgatggcaggtggcactgggggatctccaaattctactgtcattcattctacaggaaggtcactcagttggagtcaagggtaaggaaacttgccttggagctccttagtctctgaataggaaggagctggggctgtttcatgcttgggtatcacacttggccttgaaagtcaagctcctgagaagaagggagggaggccccagatgtccctctgatgagactccacctagctctgcatgtccagcatgtgtgcatggggtgagggagagggtgtcttgccccagacccaggcatgtgtgctagaaacctgggtggagccaacagcctcttctaagaagggagggagtgtcagtcattgggtggtgatgtctgacgtctgctctctaggggaaatatccaaaggaaggcaggtcaaaaagacagaggcaccatgagcacaggcctggaaggggaccacactttggggctggcacatagaatagctgaactgaaatcgaggacctcagtggagcagtagtgaaagaagagtttaaagagagaaagtttgttgagactatcatgatggtcaaggcttgggagactttgccttggagcagatgatggtgatttggggggaaatgagatgctggatgagtgctttaaggcagggactttcaggatccattgcagggggcagagttgaaagggaggaggcagctgggcaccatggctcatgcctgtaatcccagcactttgggaggctgaggcaggcagatcacttgaggtcaggagttcaagaccagcctggccaacatggtaaaaccctgtctctactaaaaatacaaaaattatctgatcatggtgacacaagcctgtaatcccagctactggggaggctgaggcaggagaattgcttgaacctgggaggcggaggttcatgccattgcagtccagtctgggtgacagagcgagactcggtctcaaaaaaaaaaaagaaaagaaaagaaagggaggaggccactcagtggtgcagccatagggaaaaactgtttttaattttgatattaacctttatcaaagtaatatatgtatgaatttaaaagtcaaatagtacagctcagcttataataaaagcagcagaccctgattcattctttaccactcctgcttcccacccatagagaacctcattcaatttctgatatttacttccttatttctaaatcacatgcctatacattgttttagttttgaatattatctattgatttttcacctatgaaggatgagaatttcacttttacaccatcctctaccttatctttgctatacacacacactggagcatgcaccctactcttaacattcactgaaccctactcttaacatatatacaccctacacaaacatcctactcataactttcactatgtcctactcttaacatacatacaccctacataaacacccttctcttaacattcactatccatcctccaaacttaattatatttctctttttagctaaaacagcatttagtgtacacagtattatgattatgtaaatgttattcacagctgagccacataatatactgtaattatatttcctcttttattttctctagaattagtaatcacttctttttttgtttgtttcttagtgttccttaatgcttgatgtagggagcctctcagcatattcaaagtatattgagtttttaaaatttgattttcatttttcttaacaacattctccctggagtgtccaccctcctgtctcaacatgggccagctgtgctctgacttgtgtggtgttctggaggcttgatgtggggtgggcattggagaggaaaagagggtcactctgaggaatctgttatctctcttctctattggatcccttttcatgaatgtcatattttcctgtttcttggtttacagtttcttgaagtacactcttcagtaattttcagaaaaaagtgttcatgggaatttttttcacttcatctgaacaatgcgttcatgctatgcttttgtttgttgatagtttggctgtgtatagaattctggaatggaaatagtgttctttataatgtgagcttatttcttccttagtgtttcagcctatagtgtcactgttatgaaatttggtgccactttgactcttgatcctttgtatatgaccttttgttttctctctgaaagtctcaggattttttaaaaataatcaacgtttttgaaacttcatggttttatgcctcagtatgagtctttcttctgaacacatactggtctctttcaatctggaaacaggtccttcagatctgggagattttcttatgttactttttggatgatttcttcctcttcatttactcttttttttaacttatttatttatttatttttgagacagagtctcactctgtcacccaggctggtgtgtaatggcatggtcttggctcactgcaacatctccctcctgggttcaagcgtttctcctgcctcagcctcctgagtagctgggattatgggcacccactaccatgcccaactaattttttgtatttttagtagagacaggggtttcaccatgttgaccaggctggtctcgaactcctgacctcaggtgattcacctgcctcggcctcccaaagtgctgggattacaggcatgagccaccatgcctggcctgtattttttttcctctggaattcctattagttggaatgttggatattctgaactgctcctctaattttcttacttttctctcccatttcatccctttgaatttgtttctacttttggggaaatttctttatcttccaactcttctcttaagtttttaaatttctactgggccttttttcctcttggaatattctttttccaaagatgttgtgtcttgtctttctgaggatattaaagatgcttattgttgttattcctttttactgttttttcccactctgtctttcatgttagaggctcttctcaaatgtttagtgatccttagttgtctcttcatatataccagtgagttcacgtgtagctgcctggaagcttgctgtgtatgtgtggagcagggcatggttgggactgcttgttagccagtgggctccattatgggatgattggaggaggacctggctgttctttcgagggatctgcaacatgtcaatgtttgtgttttctcttgcaccagttttcctttttactgcctggagccttcaggaggctgaatggctaaagagaactgaagagggatgggattggtggggagggtacagatttcctcctaacctccctgttttcagtgcctggttcagcttccatccatgagtccagaacccaactaactcagaccctctagaaagtaaatctcacattttctgcaagagttggggaagggatctgggagtctaaccactctttttaaagctgtttggccccaccccattccctcccactcagcatcacctggtgtctccgggtcctgagcttttccagtgttctgagatgccggcctgagcttcagctcacccgtctcctaaggcagttataactggcccatctgtttccagtttccagaattttgttgacatctctcatctgctgttgtctcctctcctgttctttttgcccttgtggatttgtgcatttttaattcctttattgtcattttggtgaggggctgggacaaaaacagaattaaatggatgtgttcaatctgccatgtttaccacaaaatcctgattcttttaaaacatttattgaatgccttctatgcacaagtgacagtgccaggactaaagaggtatccaaggtaaatagcaaaaaggaagaggagggtgaagagtgggagctgggaaagagggggaggtctcgtatggctgcagcaggtcaggagggccattcgataagcactttgatgagtgtctttcagggattccaaaaagccagtacacagctggaagctgtgaaggagggactctgaggagggacttggagatgggagggtgctgagttggctctggaggagaccagaacagctggggagaccagcttaggcccagagagatgtcctcgagccatgtcagggtgtgagtgacttagggcccaggccacagagctggcagcccaccccggctctcagagcatacctggcacattttagatccagtacatttcacccaagagagcaaatactggtagaaagaagagatgtcgtcaaattatcgctccccgattcctccaggcagagatgccggagtatgggtacacatgggtttatgcacacatgtgcccctccctgaccagaatggggctccctgagatatgtgttggtgccccatgggcattcgcccctcctgcttctctcccctatactgtcctctgtgtggacctcgtcctcctgcgctcaagtgccttcctgcctatttgagaaagaaacatagcccacctctcccatagaccccatttctcctccatcactgctcccccataagctggaatgccacaaacccccatatttggaagtgacatcctcccaaagcatcccagtaggagaggcgcctgctttagcatccaacagaaaccgaagtgcagatgtttctcctctgccccaggagcccatgttcagaaagttccttgcctctgacttgaattcttcttgttccaatgggagcccattttcttattctcagtgaaagtgtgcaattttgaagtaccctccttccttcctaagctcttttttggctacagctccccaccaaacctctgttctcttacctagaggcgtcttcagctgccaccctcatccccagcccttccagaccaggaagtcccacttgaggaggggccctgagcccactctccacccttttctctggaatcctgaggtctgggcacagaaaggtgacccgactttgaatcctgattccaccacttacaatctgtgcgaccttggacaagtggcttcatttctctgaccttccattttccccatctgggaaaaggaagcagggagcggaggtgtataaaaatgcaactgagggcagaggatgggagggcagaatcccactagcccctctcctctccccaccccagccccagcagacagctgcccagcctctgagtagcacaggaggctgttaccagctctgatccaccgagaagcctgcaccttgtcaggactccatctgtcaggaatttattactaatgcattttataacaggctctgtaataagatattaaagactgtagcagcatctagcaagcattccataaatattaataacacctttagagatggcacctatggtggaaatggtagggctttttgccaaagtttggtcaagggtacagcataaatcttgaagggggtgaagggagcaggtgcaccctaaaggtgagagggtgtggcgtccttcttttctctctctctcctatcttcctttctcttgctgcttaatttttgtatgtcttttcctctgttcataagttttcctctagaatgtctcttttttttcctgtttcagttagttcctttctccccaagtttcctttcctcccttttctctcgcaaattatctttccactttatcccgttttcactctggccctcagtcctgcccctctcactgttctcaccgcattttcctctgtgttcctgtgctcttccttctccttgcccctcctccctgcccccctttctttactgctctctctgtctggttcctccttcctgcctctctgccccactccctctggccttttctcccttgctgcacaccctccctcaccctgttccagtgagcaacctagccacctctggagaggcctggagtgtaatgtaactcacactgcatgtgagaagtgagctatttatcattattattaacaaacaagatcctttgcacggcagaactttcccagagtctattcccttgtcaccccaggagtagcaaaaagatttatttgtctctgaattgcacagggtggcccatttacagcaggtccatcagaagtgatatggagcttaaatgggaactggaagaggcaagacctgccgtgggttacttggcgagagagacaacctggcaggtgcaagaattttgaaggggataatgcctagacatgctccctggtcccctgaaggcatgggtgtacatttggggagacttcctttgaaatggcccagaagccataagggagtaggtgggactgggcaggggggtaccatgaaggaggggaggagggaagcaggggtggggcagagaagtgggtcaagaggcctccctcagaagcagaagtgatcatgccccatggggtctttcttccaaagaccacggctgctcctttccagcaagaagctggacccagggcgagtgtccacaatggaggtgttggaagaagctaccctggaaaggaggagcccaacccccagctgcaacaggcctcttggtgctgcttctacaactccaacccgtgcagccccaaccccagacactccaagccccaccccagacgccccgaaccccaccccagacaccagagcgacatcttccactcattctccttgtcctcagatggcaaagtctggccctgccgagcatctctcttcaaggcctgtcctggctgactgtgtgaagtccatgatcaagccatcccttgcccgtccggccacctccccatgcgcatgctgataattgcctgcaacctggatttgcacgttaataggagtgtctggagacggttaaaaagaagagggagctggcatttacccaggctccttgattcttctccccattgtaacttccagcctcgggtggcgggcactgtgccctcattagcagtccaggagtggtggcctggcactttgcttgctgtgggcgctaaagaggtagagtcccatcagcagagggtctgggtgagcctggggcagagccatggaaatgaggaggccctgcccatggctgggcatgttctggggggcaggagcaaggagctgagacccatgcaggccagcgtgagcaagtggggtgcccatagaaaggacggcacaggcaggtcccagcaccgcagccatgggcaggagacaaagtcagcggggcctgggacagccagggtgggaggctcttggaggccctcatctccattttttctcctgcactgtgctctgctccgctcactgcaggtgggcttcctctgactgcctgtggcatctctgccaccctgtaactgtggcttttgtgtggctctcggcctgtcatggtgcccactccagccagataacaagatctttctttcagattctcagagaaaattgatttaatttctcaggccccacctgattggcatggcctgggtctgaagtcacttggaacaaacatgagtgcctagacccatcacctagagcagagctgtggtcatgaggagcagctgttcttggaaggagggtgggtggggaggcagctgttggtatctctttgggtggggtggaaagagcactccgtatgagtcaaggcacccgatttccactcttcgactctgtcatgatccacttgtgaggcctggagcaaggcacatcccctctctgggctcattttcacatctgtagtccaccctaggaaatggggaggctggactagatgaccccaaggttccttccagctcctgcattccagccatccagggtggtgtatggtcaggactggcttcctcgtttaggagcctcccaggcccccaggtgcccccctcacccctgcctcagatcccacccctcccctcacaggctctcaagcccattgtggaaggtcttctggggctcttccatcctcatcttgtcttcagcagccaggatccaatcagcagagatgttctctttctgaattttaaggtgcccatttgtcccaagttcatggtgaagagattcattaactgtttacactatttctaatacttccccctttatgtggggctcatctcaccctgcctgtaatgatattttattactatagtaataagtgcaataaccatttatcgagtgttgctcagtgttgctgtgtgtctggcccaaggagactctctttttttcacaccttatctcttataatactttttttttcttttttctttttttttttttcttttttgagacggagtcttgctctgtcacccaggctggagtgcagtggcatgatcttggctcactgctacctccgcctcctgggttcaagccgttctcctgcctcagcctccccagtagctgggattacaggcacgcaccaccacgcccagctaatttttgtatttttagtagagacggggtttcaccatgttggccagcctagtcttgaactcctgggtaggagctgctaacagctccattttacagatgaggaaactgaggccaaaaagaggtttaacagcatatgtctgcaatctcccaggggaaagttccagactcaaagttagggagtctaactcagaattcatgctctgagccaccaagtgttactccctgtagcctacctggaaacccagatgcacctggccccataaagcaaatctgcttgcattgagtctgcagatctgtgtgcatgtctgtgcatttccatggaacagcagctgggtgttcagacaagcccccagtgtatgtgctgatgagcgcccctccttccccgcatctacttccctgatagagcatggtgcccaggacctgaaatgcaggaagtcagcattcttttctctccaatagtttgtcccttctaagtatatgaatggctccttgccaggcccatttaaaaccttctctaagttatgcagaaattaaatgggttttcaccgcagggcatgaaacataatccaagaaggtcagacgtggagaccatcacttctttttccccttttccaccatttcctgaatcttgctcttaaatcctctgatcagatgcagaaggatcagagaggcttcccctcaggaccatgcggtatggacagtcaaatgtcctcgcctccccgaggcagggagctggagagctgacatctcacgggagccgtccctctcctctgggcgccagcttcatacagagtggtttaagtagactggccgagtgctctgaagtgagggccggctaccctgtttcctgttgttgttgttgttgttaaatatttggtagaattcaccagtgaagctgttgagtcctgtgcttttctttgttggaagatttttgattaccgaatcaaataaacataaaagcataatgttgaattaaaaagcaagcttcagagtgatctattgtatatgaaaaccatctatttacaaatacccacaaaacagtatcttatattattcatggctagatatagatacatatgaagtacaaaagcagactttcacacagggggctggcagctctgaaatcagaatgtggccctcctttcttgtggcaggagccgtgggcccccatgaagtgtttcgttctggattcatgggactggctctggcacttctgtgtgatctagaaagagagagggcaggacagagaactgtgggttagctgagaacctcagaaagatctccttaaggtgggggaggggtggtggaaataagggatgctaaggtacccagggcttagcaacaggggaaagttctacccctagggctgaagggaaaggagacgaaaattgtattatcagagcccactgagagttggggccatggaagagagcctgctggggtagagctggagggggtagaggaagtaagaccccaaactctttctcttcctgctctgggagctcctaccagaacttcccattggcagaatccagctggaagccagccagcaagagagcctggagatgcaatccattgagagcccggggattggggaaaggcagaactgggtggatcatggtgccaggggagtgggtagacagggaatgccctggatggtactgttaatatcagtgcttcttgacacctccctgccccacccttgaaggtgcccttgtctgtgcccctctaggtttccagaaattaaaattgcaactactgtcttctcagcacttatgtgctagaatgtttacactcatgatcttatgtattcttcacactaaccctgtgagatatgattagcttcagtgtacagtgaagggattaaggatcagagagattatgtaattaacccaaagacacacaacaaggctgggattccaacaaatggtctgtccatccctgaaactctagcacttgtctgctttgcccccttgcagacttgattctgttttggagggaatgagcatcttccaagcagctgaattaggataggcaaacctagcaaaggaaaagcacattcagacagccagaggtgtgagggagcccgctgggttcaagaagtataaatagctccatgcctccaggaaataaaatgtgaagggggagacaggaatggaccacaagggcctgtgttctatgcaaagggcactggggagtcacggatggtgaggaggagaggggcgccctgcatctgcctcctgtccccagtggacagagtggttggaacaggcaggacgtgagcctgcccattcaggttgacacttgtctgctgatgggggcaaatccacaaacccaggaagaaccctcagcagccccatccattgttctccggaggccctttccagcctgaccaggggccccgtaaagagcacccctgtgttaagtgcatggtctgtctgtgaagggctgccaggagggaggcttgaggctggtccccaaaaaggaagcctgcagcttgggcagccaaggagcatttgacagaggaagcgaaaccaccaagaaacaggtttggggaccgtaagacccctcatccagaactctaggttaagcaaatcatctttggaactggtgctctttacagccaccaggaggccatcaaaaaatgaagaagaggaaaagaaaagatactgcattttaaattttggggcccctcctagaatgaaaatgacaaggcctcgggtctggttggctgaaggatgtagagaatgggctttgagggactcagccctgatggcgcagctgctccgcactggctcacccttgtacttgctttgctctcatccccagaatacaccagtggggacgcccatcttcatcgtgaatgccacagaccccgacttgggggcagggggcagcgtcctctactccttccagcccccctcccaattcttcgccattgacagcgcccgcggtatcgtcacagtgatccgggagctggactacgagaccacacaggcctaccagctcacggtcaacgccacagtgagtctccatgctggggccccggccgtcccagctgcctcttcccaccctggaagagagtgacggggcattccaatgggacattgacccagtggcacacactcgatgatctataataattatagtggtgacagtcatgatagaaatgaggctggcattactgaggctttgtgctgtgtccctggcaccgtgctgagcactcaaagggactttaaacctcaagcagccccgtgtcataagtattgttaagatgcccactttgcagatgagaaaactgaggcacaggagcaattcagtgactttccatggtcacccaggagcccgactccatagcctgctcgggtaacttccttgagacattcttagtgcagagtgcctcttgctctctgggacacaggacagaggtgttcacccagctgtgtcctgacaccatccaacctgcagggcccaaaggagttcaggcatcctgcctctactccacagagtggtgacattccacatcatccctctgtgccaagcacattgctggcccctgggaattccaggatgagtgagtcaagggcagaaggcaggagagggtaattatcccatctgatggctgactctgttgagggtcacacagcccatgagtagtggcggagcaagaacccaaaccaggttgtccacctctcagtccagtgccctgaccaccatgccccatggctagacatctccaggtctcaagaacatcgcagcatgccctttgtgccagctgtttgggagatcctggggaacaggcaagccacactctaaatagggtcctccccctacccgccccctctccttgctcccagctgctgcctcagggcatagctggagccatcagctggcagcagggccgtaagctggcctgttgtcccttagattctgttgacaaagcttacgccaagagcaaaaaaacatgggagtccctctcaaccctccaggtcctatctgcctgacactcagcatccactcctgacccacatagctgtcaaggggcctgccggcagcgctggggggctctccttggtaggtcacaggctctagatccaaggctctggatctggactgggtccagaatccagttttgaaagatggggtgcccctagacttggccaagatgcagagagaggcctcaagacccaggaaatgcgaacttcttgtttggccctggcccagtggctgtggggaggtcactgcaggtgacactcacgttctttccttctcccctggttaagtgttagttgcctgggaggagctgtgtgctgctgtttgtaaaactgacctcagaggtcaaggggacatgcaagcccaggatttgctttttgtgcacatttgcctgcaccttccatgcagcctggcacccacacatgcgctgcccctccaccgcactgtttgcacacaccagggcccagaaacacgcagatgcttgcccgctgtgggataatttccacccaccataaaaatggctttggaccgtggggaatagaccagagctgggcacaggcaagaatctgggtggcggggcctatcaagaggactgggctcaagctgggatgatgaatacagttaaattgctgttactctcccagtaatcaggcttggaagcagcagaacaggaggggccctagaagtccctctctagatggcttctcccttgcttctggaggagctgacaccgagtccttctcggggctggtgctgtgcccttggctgctgagcacttccccaaggaaggagattctcggcctggcattgcgggcaacagtgtcagttcccagccaccactgagctggtaccaggatggggaaattgaggcatcctctgggaacaagctgctgagagccatgggccccagagttacagctgggagcctgacaggatcactcccctttccccaccacagagtccagagtgggctgggcaggggcatttgtggcatgaacaggactgcagtcacaggtatgggacagagagggcctgtgccaggctagacaaaagccagctgcctgcaaaagcctggttatggcaaatcagagccactggcatcccctgtccaagaggtcaggggacttgttttgagcttccccgctccagccctgggtgcctggtggtcattcaggtccctagctgggagctctccccatgggcagtgcccaagcctgccgtgtgggccccagtcctggagcctgggaggctgcctgccgagaacctctctgctcacctcctgcttccagaccttcctctcccttgcagcacccactcccatccctaaaggccctcccaccctctcattggctgtccctgaggattcctaaagacaaccagccctcccttctcctaggcacagcagctccatctctgcaggccaggaggaggcaccaggcttcttggaactccaggaatgccttgcttcattcaagtcaccccagacaaactaagggagagctaacctggggacagtcgctcctcaaatcttagctcagagaatgttcgagcctgaggggccttagaagtcattcacttgagccccttcatctcacagaaaaggacatcagattcccagggggaaaaagaactcatttgaggttactcagcaaattaagagaccgaactgatgttagagccccaagtcaaaactgttagtggcaaatttttatgtgaaaggatctgagtttgagttctggctacacacttagaagttgtatgactgtggacaagttactcagcctctctgagtctctgttaactcatctgaataatgggctcatcataactacagatgcgagtgaagtgcccggtagagtggctgccacgtcatctgtacaaagcactgcagttactattattgctggctattgttattcagttgcagcaggctacttaaacagtagaagatagatttggagttttctttcttgccaagcattaaaaaaaaattttttttttgagatgggggtctcgctatgttgtccaggctggagtgcagtggctattcacaggtgcaatcttggtgcacaacagcctcgaactcctgggctcaagtgattgccccacctcagcctcctgagcagctgggactacagatgcatcgttgaggttttatacaatgaaattcccaactgacggtttaaatattgcttgcctggctgcagggggatggcctgtgtgacctctcaggagtctttctcggagtcccccagatgtcacagaccctggagctccccctgctggttggattgggaaaagtcactgaaccagtaaatccccagcccaaagcaagggactcatgaatgcagggacacaggtgccagattaatcccctctgtggcctttcttctgaggagtccccatctttgtcaatcctctgctgccctgggatgagtgggggcaggaagtgggcacagagaggggtggtgacctccagctgaactcagcaaaggagctgagggcagcaccatatctactccaagctggtcatcccaccaccggatgtccaaggaagtcaggcctgggctactaggggctggaggtctagctgtaccccagccctgctttgtaacactggataagctgccttcctctggaccttggggatgctgtttgtgttttcctgtacagctcagaaatcaccatggcttcttagaattcttaagcttccttttactaagcccttccctgctggagtgcaagagcatgggtgtgtgtgtgcgtgtgcatgtgtttgcacttatgtgctgcacggtgcaggtctgtgtgtgtgtgtacatatgtgtgtgagtgtccccaccatcactcaacctaaggctgtgtgttctctccgctctctaaggatcaagacaagaccaggcctctgtccaccctggccaacttggccatcatcatcacagatgtccaggacatggaccccatcttcatcaacctgccttacagcaccaacatctacgagcattctcctccggtaagactcctggcccttccttctcagaagtcccttctcagagggacttccttctgagctcctgttagggatgggccctgttagtgggctgggctcctccttggctcctccgcagtccctgtgcgtggcagtgatgagtgttctggcacagcgaaaccccagccactcttcacaccacgcccatctcctcaccctctcactctacccaaggggctctgtgtggcaaagaacaaaggcttccagggcaagtaacggggagccattcagacagacttatgtggagggatggggatcccatggaaaattcagcctgtgctgaagaatggactcagtctggctccacagaacatcagtgtggctcagccgtgtctctgccgtgtcagtctgtccctctctgctgatgagcactgccagagagggtggcagctgcccttcttcaagggtcctcttggccccggctcttccctgcgagcttgcagctccttctgccctccctaatgcccagtctttggatttcttaagtccaggtttccaagaaaggctcctgatttttctggtgtgttgcaaggtcataggtcaccagcctgtagatcggctacccatgggtgtcttagaggacaaaacatgcctcggcccactctgcaaggctgtggatggagcagctttgctcagctgtgggccagacgggcaacggcagccatctctagtctcataaccattcgtgcgtctgtgcaaacttgaatgcaacaccggctgtgggtggaaaaattagaaaaatgcgcctcccctaggcagtcacaatccctggtcattagcttagggaacagcgtttggggaaagaaaaatgagccccttcttttgagagaactcagtgtgcttaaaggaaggactcagctttgggagcaaagtggggcacccgcctaaggctcgtgagcgttcagggccccacccgcacccctgcacaggctcacagaattgagtgtgacaggtgagcttcccttgactggggtgcaggctgtgctcctgggcctgacccctcatttggagaccatggctgccctggccactggcctcccttcacagcatgaggccgcagtctcctggtgtatggggctggcatttggccacttccttcttgggacaggtgtggagggaggctctaagaagcaggatcctttccggcctgctactgttgagtgtttgaagctgctttgagagtagagggggacagatcaatgcccccaattccccagccttctctttcttagcattccgtgggcagtgggagcccctgcttttgagactgaaggctgtctcttctcagcacagcccagcccatttcccatgactttcctagccccttttctctctgcccctagcccaactttgccaggccgataccttctcagcatcaggtcagctgtgacgtgctgttttcagatgaggcagggcccacaatctgcccatggcccctggacatctcctgagtggtcagcactcttgaacaacttgccccacctctgctcccctgaaggactggaagcgtgcagttcagcagggacagggtctgctgtgggcataacatacagtgtgtgctcaggagatggtaatggaatggataaatgaacaagcaccctcaccctgggcagaccagcatactcaccatcctgcaccctctccgcccctgtgcctgctcttgtcgccagcccaaagtccacccacccatttgttcccagttcactctctacctttcttataattttttccctggcttcttccctatccgtcccagagatagcaactcctctccctcaaccctggtagaattaactctctctatgctgtgtaattttccacttaattatagtctcgcctgtaatgttacctatatatgtgggttacttctgagcccccagtaatcaaggtacctgagtctctgggacatgatctcatccttcctttgggtctccagggcatcatgcccagagctaagtgcagggaagatgcccaaggccaactagattgaagtatagaacatggcagtggctgggcagccagaggagctcagaggagtcccgcactgccgtactcactttggctgaatcaaacggcctcctgaccaggtcctcactgggaaagggggataattgtgcctgcagtggtgcctccctctccttagggttttaacggttggagataatgcacataaaacacacagcaagtgctgccaattagcggacattaaaccacgctgggcagtgacctggtcagtcaattacagtagctaggttgggttggggctcccagcttcagcttcctttcagagtcgttgtagttggcaagaggtgtgttcttggtgtgagtgtcccctgagacccctaggttgtctttttctagtatctttttagtatatcgtgcaatgctaagtttgcatgcttttatttcagacctgcagatttctgagctgtccatccattgggtctgcacttcatccttttatgcacccatcagacattgatgcggctggtcccatgtgcaggccccatgctaagccatgccctctgctctacaggtgatcccacaggcccctgctaggacaactcctcagtctcagcaaaccagagccttgccctccttagcttccggtctcctgatgctccatttcttggcatatgctgtgattctcctctctcagacgcaaggatcttgatgtctctttgcctcaccagtattgttcctttgtctccacaagggcactaaggcccatgcccagggagctgctagacccccgatctgggtggtgcaggtttcagccccacagcttggcttatggctgggctgggggagccagaaaaggcagtgcattgagggtttcagaccctccagcctggcccggctcccctggggcccacagaatctgcctccgtgtccacacatctctgcccttcctccagtctccacacttgaggagttctcaggttccctcgcctcttgcagagcctctctcctgcaggccgattcccttgcactgccagcctgatccttcccggctgctaattggtttctgtgccttgatctgggccctccatgtccctttacagtgtagaaccctgatttaacgcagcattcccaggccgggcccaggctgagatgcaccctggcctgttctgcctcccaggccagaggaccccagcacccccattcccagccttgcctctgctgccccggggcccccaccggacctttccccactctccccaactccccctctttatctgcggctcacagcatgtatgcctccccctatcagcgtatcaggttagcatgcctcatctaaagtgtatatattacctaataaaatccttcttatttgggattattgcatcagattttaatttcctcactcgagcagcagcatgtcggcctgcccgtcagtgaagggccgatagaaggtgaaaagagcggataaactgcacaaattactgccagccgatgcctatcagcctttcgactggaattgactggaattaaggactgagaaataggatttgctacctcagaatctgctgtggcagctctcatcggaagtccccttcagcccccaccagcctgctccccccaaggacgcctcctactcctgaagcaagctgcacgttcacctttcaagtccttaatcccgtcatggaaatggggtagggggtgtcccggctgagcttgctgagcaggaggaggacgtgggtccctgaggccaggaacagcccagctgggctcctgtgtccacggctttcctgacaagggcatctttggaaggggacaagccacagagggaagagaagtccagcttctctcaactgtgtccccactgcccgggcctcagaggctggggctgtgtctcacacctcaccccctcctcatcttggcacacgcactgggtgcagagccctgagcccttgcctcctccagagagcaaaggggtcccccaggcacaccccacactgccctccattccccagtcacctccgcctccctccaccccaccccccactgcaccatgtgactctcagcaaatccctgagcactctgagcctcggtttgctcacacatacccccatgtgaggaaagagagagagggggaaccttgctgggggccccacacagtggaacatcgtagacactccactagtgccagttctgccctggaggctgctagctgtcctcacaatgcacagaaagccacttgcctctaggtagagatgattaatatggggtgttggggagtctgaatttgctgaaattctttggaaaaatccacgtggatgtgcattttctggaaagaggcccctgagttgtcatcagatgcacacagcgattccaggcccaaataaagtaacaatcacgtttatagcattcaccatgtgccaggtgctcttctgagtgcttcacgtttatcggctgctgaggggtggggattgtgatttttacccattttatagatggggaaaacaaggcagaaagaggttataagtaacttactcaaaggattcgagcgcacgcagtctggcagcagagtcaaacccttaaccaccttgtggtgcttttctgctcctcccattacaaacagcggggcccctgcaggcctgcacactgtagcctctctctcggaggcgtcctactccctgaaatgtggattcctgtgcagggcagaagcccttggcaggtcgcaccctggcgcacaccccagctggactggctccctggagaagcacagcaggcagcgtgcccttgggagcagggtcggctccgggccgagcacagccgcacttctccatcccccgtctttggaaataagtttcagtatattgaaaatataatcactgagcctctgaaacaagagctgtgggctcccaggagcccccattcctccctgttaattccttctcataatgtttccagtctttctggctgcacttgtattaaaagctcagggttttattaaaagtggatttatttacccaaaaaaagatgaaaccccaaactttgccaggagcctgtcagagcttgcttcgtagaagctcgggtatgactcttttaggaagagtccccattgtcctcctgtcctggagaaccgactggcctccacagagccctgcccgcccagggggcctctgggcagccccatgcaggagcccagcacgggctctgaggactgagggcacttttgtcgccaggtctcctctgcacaagcctgcaccagccccctcgtgtctccccctgaggatcactgtcccaggcctggcctagccctgctctgcatgtgtgtctgggacatgcaattgcccctgagtactgcttagtgactctctggggtggtgatccagtgggcctcaggcccagttatcctagcaagccaggagagcacggagcaactgctgtgaagggatacaagtgcttggggagggtgaggtggggggtgcccctgctgtgtcatggcagcgagactgggtggagttagaggaggggtagcttgccccacaagagcgcagggcatgcgtgtcagggaacaagcctctgcacaggtgaagggggtgggggtgcagctcgggcttcagcctcctgctgataaacagtgagtggagggaagtggccgaggacacaagagcccttcattagccatgcagatgccagggttgacatttccctagggggtggggacaggcttatcttgctctccatcacccaggggaacactgtggcctggagccagagcctcaggcaggcatggtgggcaggcatggctggcactggccatggtgtgataggacctggggaaccaagtaaaggctgccccaggcaaggggcgactcagcgagtggtggcggtgaccttccaccctaaggtttaagggctctgtgaaggtttaaacaaactcttgtttgttcgtttgtttattcagtcaatcaatcaacccatcaattgatattcgaatgtgccagttgtatgccaggatctcttcctaggacagtcttatgcctccaggcacttgcctgagctctgccttctgcccagagcaccttcctcttcatgttctctccctggcaaactcctactcatgcttcatgacccatgctgaatgttgccatctgtacgaccattcgccaattcctccaggtggacttctccccttttttgtacgtttctccatgtgagccatatgtgtattcgcactcctaatatgcgtatagcagctgtctgctcagatgttcttgacttcatgccataggctgtgctccccaagaacgcgttcccctggcttcctatactgttagttccagctcctgccccttctccatcagtgctgcagagagaatgagtaggggtgtgggcagagccattccaagcaggaattgccaggcacagtgctgtgtgggccatggttcctagggccatggcggcctcctgagttgccaccgtcatcccccgagatacctgctttcatgatttatgctttcatccctaaagtagttgagccaccatgttctcctttattcagaccccagtgaaaacaaggtcccaggctttttgctgttattcttattaaggtggagggaaagtgaggccagagaggtgcagcaaccttcctaaggtcacacagcaacgtgatgggtggttgagcttgagaccagatctcttgtctcttcgctggatgcccctcatctgttcttccgtggtggtccatttgaacaagggatatgggaaggggaaaggggaatgataacatcggtaaggtttggcctccccgtggaccctagggtgtttgcctgggaactgcagtgtgtgcccagggcagctgatgcctgagcccttggcatctacttcctgggttgcccttgcagccaggatcagcctggggagggaagctgtgggtgccatgatagctacaaagaaagacagcagccaggggacccaaactcaagtccctcctctcttctgcccagggcacgacggtgcgcatcatcaccgccatagaccaggataaaggacgtccccggggcattggctacaccatcgtttcaggtaagacagaaggctgcccctctctcctctcacccctctgtcctccacccaaggagagccagtaggcatctcaggctctgagggctaaggagaggtctgcgggcatgtgggacagggtaggagacctgactacagggacagtcctcgccaaagggccaggaaggtgactgagtgaaggcaggaggaacagggagaagaggtgctgggaagccgacagaggctaagctgtctgggggctgcttggtgggcactggggggtgggcgcgtgtgccgctgtccaaggtctgagacggttgggcactttggggctctgggcctgggactttggtgactcctatctaacctcctgcagcgctctgggtttgtctttttcttctcgtatttgatgaaaaggtggcagttctagcatcattttagaacaaacggagctgcaactacagctgatttcatgttcttttcacatttccaacccttaagaattcatgtcgcatctggaatgttgcgggggggaacatcagcccccttgccgcccagctgccttggttgagcagaatagtgactgacggcagagatggttccgggtgatgggatccctgacccacgccccacccaaagactgacaaatggcagctctgttcggctgtcccagggctgggtggttttagagcaaggttgccttgaggatgtggtgacaggctgctcgcccacagactctggctctgcccacccccccatacatgccatacacagcctccctgcccaacccacgagtcagtgaagggtcagcctggtgtatctgggcaggccaggttgatggccgaaaggacatctggccaccaggccagattctacccactgcctctccctaccatacccccacatccccagaactgggagtggcattgttggagtagcatcctgcccctaaagctcagaggacagcaaagcatagtgatcaagaacatggaggaggatggagtctactgtgccatgtcattttcactgggtccctgtccctcaatttgcctgtacctccataaaattggagcaacaagagtacctacttcaaggtgatgtaagggtcagatgatttaacatataaagggcttagttaacgtatgtaaagtaccatgtaagtgttagctgtggttattactacagctagcagctaatgctaccttgggaagctaggggttagctagtaggagggagacacctcatgtccttggcaatgcaggaaaccaggggtgtcatgggctccctgggacccgcagctgctgacatgactattgttgcacctctaagcccagggaaccccaggacccagagcaactcccagcccagcacaggtggtgactggcagcaggaacatgggtttgggcctctgcaccaccccctcccccatttcattattctggtgtccagcacaggacctggtgtagcgtaaaccccgatatgtacttgcaaaatgaatgaatgtcactctaggggagtgagttttcaaactccagcatgcccaagaatctcccggggctcctaccaaaactacgaagtccttgggccccatggagattctccttctggaggtctgggatgggcccaagaatggtcctttctcacagcaccccaggcagctcaggtgcaggcagtcttcagacggggatgtgaggaagccaggcccaggaaggaaactgttctgcaggaaggcaggacctgcctgggaatcgaggccctttctaggtgggcagagcagaaggggaggcctgtcttggtgctgatcttcttcatgaattttgcaaattgagacacagagcaggagcctcccagtgaccaggggcttgtgctggagaactgagggaacaccggtgagccctgggtgatggagctggggagccaggacagagcggcagcaggaagggggtgctgggctgggcaggggcgtgtctcttatgtgctcacagcctccgggctggttccagatataccccagcctggatggaggtggggagcagagagccaggacttggttcaaggtcatgcttagaatgggaactcctgcagagaccctgtgagcccatcctccagggcgctggcccattccaggttcatgctgggtgccaggctgccagtccagacccttaggtcctctccagtcttcaaagatggctccagccagacccacctctctactctatccttctggggaaggaggctggagatccaagctgctaagcctttggtgtctgggctggactctggagcttggagtccgggcacaactgcctgcagcatctccagtggcaaaatctcctgggacaggctcccaagtacaaacaacagggtgagaagggagacccaggatttgaaaccacagggaagggatgtgtgtggaggcgagggcaggagacagaaacttctggaaggcctgaggcattcagcatagctttataggattcccactgccagcacagatgtgtcttaagggcttttagaaaggatgacaaatgggttacctctcacatgccagctttgattgattggtaatggctgcctgcagaggatcatggaaccaaataggctcatgagtgcagtattcaattggcagagtctgctatggatgtggcaagggatagggccactgtttgacaaatatttgccatccttgctatgttaccacttgaacaacacgtgcagggtggccttagaacttcctttacctatttcgtgggtgtttgtcagcacctcacttcacccaaacccctgttgggtaatgagccccttgagcaaatgacagccctgctctttcttacctaggtaagaaaggtaggtaagggtggctcaacagggctgcccccaccccccattcctacccctttctctgtggccctgggctggcacagtctccctgagagccatcctcagcatgagcctaaagcaggctaatgggcaggagggcactgtccccaggggagcaggtggacagcaggctaggatttggcctcatctctacttccttccaccagtgtagacgtggctgaaaagaacattgtctgccaagggtctgtctcacacacctgcctctctggtgacatttggtcacagccctctcctgggtggcctggccagtgcctgtttattggaaagcaggcagaagggatggttcatgtcaccctgagggcatcttcacagctgattgccccaagcttgccctgagtgcccggtaggggcctgccccagccctagctgctcaggaaccattttcctttgaaagaaagaattaagggctttgtagggggtgggcagagccaaatggagagtcctgagtgtcactgacatgggtgacttgagtctctggggcacccccagaagcctgggctggtggtggctctgtctgcagtgggtgaggtctgtctgccccacgtggctggagacaggcctgagcccacaatggatccgtggcccacagttaacttgcccagtcccctgaggccctgtcccctccaggctgtttatcagccccgcagctgtggggatttatgtctgcacaccagtgctttccccattactaatgacccctctgttttgccaagaacaaagaggccttcagcactaagttatggctccattgccatcaatttgttctcagccctttgtggccaaactgagactgaggaatgacaagttcccacagaggacctggcatgggccccatctgctccctcagcctgtgcctgccctgccacccacaagtggcatcattttcttgggggcctgaccaaaacagagttctgcaggctcccatccccaaaggactgcccagcctgtggtctcaacagacaccccctctggcctcatccttcctctgccagacagccacagtcctccttcaaggggcagctgcactcacccccccaacagagcactgaacttggagtcagaaattgtgggttcgaggcccagctgtgccacctgccagcaatgtatctgagcaagatgttcgacctctcaatcctgtggtcctcgcccgtggaaccaggttaataatccacacatggatgagagggtgctggagagactctaaagggccataaaatattaaggattatgcattgtcaagtaacaagcaggacccaggggtccttgggactcattcattcatttcctcctttatttgtttgagcacagggcagtggttgagagtacaggctctggagccgctgtccatggtagtgacctctagctgtgccggccagtgcatttgcccacaagcccatgtagctactgggcacttgaagtgcggctagtctgaattgagatgtgctgtcaataaaacacataggattttgaagacctagtgtgcaaaaaaaggtgataaaatatctcactggtagtgttttatattgatgacatgttgaaatgataatattttggatatactgggtgaaatacaacatattattaaaattaatgttatctatttcttttttgtggctactagagaatttaaaatcccccatgtgcccatattctatttctgttggtggctgtgttctagagttaggtggcctcggcttagcttctgccactgaccagctgcataaccttctaagcatccgttttccaatctgtaaaatggagataacagcctctgcctcacaggcctgtgggggtttagtgagctgagccgagtcagcactcagaagagcacctgatctcgtagctaaggcactgagcagcgtggactcttcattcccacccacagttgaccgagggccttccctgggccaggagctgtgctaatgtcctgagaagtggtggagaccagggcaccatcttcgccctgggaacctgcagtttggtcaggagacagacctatgcagcggcagctttaatacctcggtggaactctgtgaagaggaggcacaagatatgctgatgttgacatgcagtgatggctccctgggggcctgttagactgttttatctacttctgtgtgtgttcaaaaatatccatgataagaagggagaaaagatccttgggagggggtgcctcatccactcaacgcagggtggggagactccatgaggagagatcacaaaagccaggcattgcaggaggagtaggaatttgccggaaagaggggcggacaggcagaaagaacagtgtgtacagagactctgcagtaggagaggagccacattcatgcatctgcagtagctcagcgtggccgggcagagtgcacaggggaggcggggtgggggcgggggtccggtgctgaggccgcagagggaggcagggcgggccatgcagcatgtggagtgcccggctcaggagaatgccagccctggtcctgggagcagcagggggccacctggggggtcttgggagtggggtgcatagtcaggattgcgtttgggaagcccactgtggtcaaggtggagcagacaggttgggggacagcaggtaggagcaggtagggaagaggttggggtgtccagctgagagacagtcacagccccgactgcccagccacaggccacattaggagacagaggccaagggggcatggaggccttagaggaggtgctgataggacaagtgctgtgggtgagggcagagctctgtcctcttttcatgctgaaaaggcttaatctcttcttgcggcccacatccgtttccccatctgctgtcgtccgcagctcaggaccatccccgagtgacgggaggagaaccctgtttattgggtgcctgccgtgcaccaggcactgcctggacacaagttatccctcaaaacagtctatgagagagacatagacaaggaaagcaaggctcagagagtttacatagattggccaatagtcacagctactaagaggcagagcagagatttgaacccaagtccctcgggttccagaacctcccagtttccatgacaacccactagttctcaaagtgtgctccccagagcagcagcatcagcatcatctgggaattattagaaatgcaaggttttgcatccccactaaacctaaagaatcagaaactctgtgggtgcgcccgggcaacactgatgctgctggtctggggaccacactttgagaagctctggtctaaaggagcgtgtgttctcaatggcggcaaaattttgtactggggaagatcttactcttttaatgtttaaagcagatttacattatatccatggtgttgacatttcatgtcgggggaggaaagcaattacgtaaaaatgtctaaagtggctcctggggcaaggggttgagtggggtgggtgatgatgaagagaaggttgagaaaccctctagaatcaagggtaggtgagaaatatcaggccgaaacccctcactttcaactttcaaggcagtggcctcacttccaggtcacactggggcactatggtagtgaaggacagagccttcccttgcttgtctctgaattttattttaatgctacccaagtgaggaggtacattgagtgctttaaaatatactgaaatacatgaaaatacactgattgctttgaagggaagtctgtgtgtgtgtgtgtgtgtgtgtgtgtgtgtgtacgcagggagaataatcagatacagtcagacttgcacaacctcacaccccccacatatgccaataactgaatcgggcctctggccatggcctagtgggggacagctatcataggagaccatcgtgcgaaacacttcaaagcccttgtgattaagctgcttggcattttcttcccctgagaagtaaaaactcaggaaaagcagaattgctttggaactctgaatcgcacaccacagctcctggcttagggtagcacaatggctgcctggaagccccaaacatctcagggcatcttggggaatggctcacctggctggagccagaggtcaccaggaaggagtccagggcagatcagagaggggtggcaggacatttgctagaagacagagaaagcaaaagaagtaggttattgagtgcagctggggtcggggaagtgaacgcggggtcaccaggagattcatcagttctgggtggattggagcaggaagcactggaatgagggcgatctgctaacaggctgtggctctaatctgtccttgccgcggggaggtctgggggtcattgtggtgacgtacaggaaccgagtcagcaggctctggtgatgtactgaaaatagatgatgtgggaaaaggaggagacaaagaaactactaacgtctgagtctaggtttctcggatcatggtggtggcctaggcagaaaggggcatattcataggaaaagcctgttaatatctgtgaatgccaccctagacccacatgtaccaaaacaccccattcttcatccatggcagacatcactaattgatcccagcacaaggatgggcctccaagcctttcttacctgccctctggcagccactagcagttgagaagcattctctctcaagctggaacaaacctgctgtccaaagtgcaggtttagcccatttgtatcctgtagctctcttctttcaagagtatctagggacagagcctctagagggtttttaatttaattatacaaacacgctggcctgttatttgcagttctctcccaccatcatgccgaaacagcaataatgcatcacaccaacactcactttctcctgatgagccacagaaaagtctgcacttcttccttccccctgatctttcgccctcttctctgcagggtgtgcttcctgccagccggcctctcctgatgctctcatgagctcgcctttgtgataaaccagtctttatagccatgctcatgattccctgttcttcctctctcctttaatgaggtcctgtatgctctttgtcagcaacagtggcttgccccttgcttccttcccataaataacactggtgggtggacttttaagaggtttcactgaagcacagtctaggactctccctttctgcgtctcgtcttccccataccctccccatgggcaggagtctgtctctgtcccttgctcgggacatagagtgctgtggaaacaccctcaaggcctctcccttctgctagacctgagtccacttccccagctgggcaaagcatggactgcacgggccctttttattggtccactcagctcagggaaccacatctctgagccagagccatggctgaggcagctctgtggggttggggggtttctagctcatggctggaggttgttttggtgggcgattctggttaccacatgtcaacaggaacttgtctttttttcttttttgtttcttttctgctttttcctcaatctgtaagataactgctttttattgactttcaagagctttgagatctttggaggaataagaaattagccaccattcagtttgcattctctttctattttaacttggtccacctctggtacacagaattgatttaaacgtaattctcggctcacgattaacattggtccatgtgtagctctcttttgtttcattcttagccttaataatattgtggatgcctgtgaaactcaccagctcacctagagcaagaccatcacccatgccttacctcgccttacccacaccttattcataccttacccacaccttaccctcaccttacccacaccttaccacctgtgtgttcctcctctaccccattccctgcctcccatcctccagaaccacatatttgaatcctgcattctcttattctcttccttttggcaaatatcttatcgcatatatgtggatgacatattgcttgaatttagttgtctttgaactttattttacaaatatcatgttatacataggctcctgggactcctattttatcctcgatagtatatatccaagactcatccatgctgtcaggtgggtattgtttttcatgtttgctatgcatattactccatcatgggagaatactgtagtttattcatccatttccctgttgatgggttgatttttgctattacaaactgtgctgctatgaacatctgtgtatctctctctggatgtgtgcaagagtttgccttcagctacatacgtcatctctcacccccatcataacccccaaatgtggctggctagagccatttaacagatgaggaagctaagacgcaaagagctcatgaaacatgcttagggccgcatggcaaatgagcggcagatccaggattcaaacctagaccttcctgcttctaaaactcacattttttttcctgctattgtttgctattctgcctgagaagccaagggattcatgtcagcctggtggtctgtgtgtaggagtggaatattaagattcattcaatcattcctttattcattcattcatttgttcattcgttcattcagctagccagtgagtacttattgagtggctactgtgtgccaagctccatgctagaccctggggaccaactgtgaactgaaagccaccatcaccaccctcgtagagttcacatgttagtggagaaaagggatcataaataaatcagcaaagagagtgtttccccgctgtgttaaacatcaggaagaaaataccagggtgaggagagggtacctaggaaggcatctaggaaggggatttaggaaggctggaccagggaaatttcagctgcctgcatccacctttccaggttatgggcatgggaggagatcctcgtagctcccacctcagaaaaggtctccaatatcttctgggggctttgaacctgagacgagcccctctaagcagctcagattcccagctccctttttcatctgactccctggatgactgcttagctttcaaggcagcccccagccggggctaatctgaaataaaagtttttatttatctagcttgatacctggtgcaaggttaaatcatacaaaagaaaaagcaataagagagaaagattaagcataaggcgctgtcttaggcatgcccttttgcaatatggttacaaagatattaagcctgaagacacccacaagtccacattgctatttccttgtctctctgggctcagcttagctgctgctggagcaggaaggatgacagaacttggtgggggccgtaggagggagaccccctggggtaccctgcggagagggtgagcagccagatggagttctagttactcagcccatcagccacctcccaccccacacagctctgattcatggcttccctggggaacaaaaacattgacatctgcacctacgtttctatcagcgtgtccgtgtcatcagtatttattatgtgcctgccacgggcaaggcaccctggggagagagagcaggcaagaaaccttcatcacaatcccttcccacagtcagcctgggctcaaatctcaggtgaccttgagccggttacatccacctgtgcctcagtttcttcatctgtgaaatgggaatattcatagggttattttaagcgtcagatgagttaatacaagtaaagctctcaaaacagtgcctaacacatagtaggcacactttattattattatttattattattattagcattaaaaaaattatagtctagttgatgacaaacacaaacaagaaaaacaatgcctggattcctcagcctgtaggtattaatggggtctctaaaaatccagatttcactgactcgtggccttcctccatgtctgtataaccctaagacttcagttctctataaaatccccacaaaatattgcagaggcacctacaggatggggaggaggcagttcccctgcactttctaactgccctgccagctctcctgccctcatccctctgggtgttccctgcacaaagccgctgcaggtgggtaactcaccaggcctctgctgtaggcaccctctctagcccctgaaatggcccagcatctcctgggcgcccatgaccctggagccagatggattgtctgctcatccccctgctgcaggctgcacttgggatctgggtcccatagctccactgcctgagccctgtgcactgcgtgcccctccccactcacacgcaaacagctcccccagctccagtctgcagcccttccctctacagggccaggaaaggccatgaggacaccatgccaccctcctcacccatctttcttacagagcccattgtttaaagtaatttttttttttgagacagtctcactctgtcactcaggctggagtgcagtggagcgatcttggctcactgcaacctctgcctccagggttcaagcaattctcctgccttagcctcccaagtagttgggactacaggcacccgccaccacacccagctaatttttgtatttttagtagagacagggtttcaccatattggccaggctggttttgaattcctgaccttgtgatccacccaccttggcctccgaaagtgctgggattacaggcgtgagccaccgtgcccagcctaaagcaatttttttaaaagaaggaaggaaaggaggaggagaaaagaaagctttcttttagccaaaatatcagcttacttaaagcccaccccacccattccccagacatgtccagtacagaccctagggagaaccaactacacaaataattcatcatgggtgcctgaagcatggcatatgtaatacacactttcggaggttaggaaagggtttgttctccccaggaaaggcagcccttgaaggagagtttggggagatggtgaggaagaagggttgccacccgcagggtagggtgtgagcacacgctcccaggaccttcccccaacccctgccctaacattctcctgcacgttggaacccacattgggaaaggtttgaatgccaaactagggagtaataatgacatcatattaatagctaccacttcttggatgtgtgggaacggacctaaatgctttacctacatcaactcttttaatcctctcaataaacccatgagactgtcctattactgttatccccattttacagaggaggaaactgaggcccagttgcctaagatttcatggctggtaggtgatagaactggatactgaacccagcaggctggctgtaagcccatttttctccaccgctccctgccctgagcacttgagcgggctgccacaggctgagaatcactgggtctacctctggacttggctaaacttcctgtgctcctctgccacctctctctctgcctctccgtcaaatgctctgagtcaattaactggctgcccccattcaaatatttgaccaatatcctggaaacagagatttcagagcagatattttcagacattcattgaagtgaacaaacattctggcacagaacgaaattattgctcaacatctgattctgttgggctgtgcccccatcccagccttacccctccccaccacttgaaggcatttctttttgggtgcaaggtgggtggaatcaggctgcttctgctttctatctcactgcccctcctaccccctttgactgccagttcgtgaggatctccccgccctcacttgtaggatcacgtcattgaagcacttttgaatccataaaggcagatgctgaagggcacttcacaacgacgtccggcagaccaaggattattttaaaggggcttgtgactagtttttctttataatgacagtggtagtaccaaatgtcagcaaaagcaatttagttgagattgaaaggagcactttgcaaatgaggatttgagtccctgggatgctttcagtcctctttagaagtctgtaggagctgggcctggtggcgagtgcctgtagtcctagctactccagaggctgagatgggagaatcacttgagcccaggggttcgaagctgcagtgaactaagatggccccactgcactccagactccagcccgggcaacagagtgagaccctgtctctaaaaaaaaaaaaaaaaaaaaaaacaaaaaaaaacaccagtctcttctctagggactggggaattggccattcatgactcagcatgtggttggcaaggtcttaatgtgccagcttccacatgggtggtcttgaggagacagacaagactatataaatggaaactgaaaatgtaaaaccaagccaccaagaagcttgaggatttgctacagaggtaaacgtatgagaaatcgctcctccatcacagcatttgctgagcggctggtgctgtcagtaagttcctgggggagatcagaggaggccgagagggctgagggctggggcagaggcgaggataacagcttcacccgaatgctggttccccaactgtaagatgatactcccaagggatgattttaagtggtgcatggatggggcgtgaaataacattgaatcacacaaagagacggttattccattcttgattctcttacagaatttccatttctgtcagttctacccaggaaagggttcagttgggtgctcatgtctttagcacctcttcaactgggctcgtgtccccactggacacaaggagagctgctggagccttcagaggccaagctgatgcagctaaccatggaggcaaacgacacaggctcatctccccatgttacagccaccctctacacatggctgatgaactggttctccatgtgtgatacccttaaagagtttttttaagatgatgtttaaaaaaattaaagaaaactactaaacaaataataatagaagtttcatacatatatagcagaaattgggaggctggcatccacatgactgaagatcaggcaatgctgatgtaggagtcacttgacttgggcctttccttgactgactttccttctgagagtcacctcaatgcatgtgaagggctcagaacagctcctggcccagggcaggtgctcaggaaatgccagctctctgttggatggaatggcccttggaaatggggtgcactagcacccacacggcaatgtttttggcgctgctgctgggactgaggtgtgggttggttaggtggcaaggaaagcatcccaagcaggagaggctgtgatgagcaaaggcttagagggaggaccaagaaacatttaaaggacagtggacagacggatcagactgcagaaagggaaagatgaagatgaacagactgaccagactgcagaaagggaaagatgcaagatgatttgaagggtcttgggccaagctaaggagtgtggattgttcctttcagggcatctgtgtttacaagaacccaagatctctcaggagctcaggaaaaggggcttgctgtgaggctcagggttcccatggacattctgagctgaccctcctcagcattggatctcctggctcaggaactaggaacgaagcttggatgttttctcctttcctacagcatctgtattcatttcctatagttgccataataaaatgccactaacttagtggcttaaaaaccacagaagtttattctcttacagttctagaggtcagaagtctgaagtgaggcttatggggttaaaatcaaggtgtcagcagggctggttccttctagaaactccaggagataatcccatccttgcctcttccacctcttctggtggctgccagcatcacttggcttgtgactgtgttgttccgatcccctcttccctggtcccattgccttgtcctctcctgtagtcaaatttccccctgcctccctctaatgaggacccttgtgattacatttagggcccacccagacaatccatgctaatctcccattgcaagatctttaaccaaactacatctgcaaagtcccctttgccatgtaagtagcatgcagagcttgcagcgtttcggacctgggtgcatttgatggccattcttcagcccaccacagcatccgtgccctctctgagcatctgcctctctctactggctcccttacagtctcacctgggccatgatgtctacactgcctcttcttcgcgccgctcttgaaatgccctttcagctgctgtcccagctgccaagcacctctacactctagttatcccattctgagtttcctagaggggtcagattggccagcttaccactacagcagtgtccaccacaagccgtgggagctggcagcctgagatgctgtcccctaggcagccggtacaggagagggtggtggggccatgcgtggggcaggccccaaatacatctagtacactttcaaagatagacagactgatgggacagaatagagctcttagaaccagacccagatataaatatgggaacttgttatatgataaaggtggcaccgcaaatcaccgaggaaaggatgacttgtttagtagctggtgttgggaaaactagctcaccacgttgaaaaaaaataaagcaagatccctaccatacaccatataccaaggtagactccagatggattcaagacctaaatgtgaaacgtaaaatataaagctcataaaaggaaatgtgggggtatatcttcgtgaccttgtagtaggaaaggacttctcggcacccccggagcacatgccatagaagaaaaattgttctacgtcaaaggagttccaattcaatcagaatatatagacaaagttaacagcaaatgatatatggggaaatttttgcaacaattaaaaccaaggaactaatagctagcatatataaggaattcctgcagatcgagaggaaaaagttggaaaatccaatacgaaaataagcacaggatattcatagagtgggaaaccccagtgactggtggacacatgtaaagatgctgaaaccgactaaaaatcaggggaacgcaaatggtaactgcagtgactaacctcttcacaccccacattgacacaggagccaaatcctccctgtttttgtgcagcctgcaagctgagaatgggttttaaatataactatttttaggcctggtgcagtggctcacacctgtaatcccaaagctctgtaaggccaaagaggtggatcactgaggccaggagtttagaccagcctgggcaacggagtaaggcctcatctccatgggtgtggtagcccatgcctgcagtcctagctacttggaaggttgggaggattgcttgaccccaggagtttgaggttacagtgagctatgatcatgccattgcactacagcctgggcgatagagtgaaaccttttctctaaaaaggataaaagaaagaaagataagtatttttgccattgatctgagggtagtaaacatgatctgtgaactccagttaagcaaaatgttatcccccaccacaaaaattccattcttctcattagcaggactgtagtataaaaaattgtgctcaattattattatattttgaattcctcaaaaatgtttgtggaaatttgttttctttcttcctttctttcttccttccttcctctttctttctttctctctctctctctccctccctctctctctctctctgtctctctttctttttgacagagtttccctcttattgcccaggctggagtgcaatggcacaatcttggctcaccacaaactccgcctcctgagttcaagcaattctcctgcctcagcctcccgagtagctgggattatgggcatgcaccaccacacctggctaatttttgtatttttttagtagagatggggtttctccatgttggtcaggctggtcttgaactcccgacctcaggtctctgcccgccttggcctcccaaagtgctgggattacaggcatgagccaccgcacccagcctgctttctttctagtatcaacataatgtccttgatttggcctcttgacctgcaaagtttgaaatattcactatagccctttgaaagaaagtttgctgacccccacacactctgcatcagttagaagccacatgctatcaggttgaaccatataaaatccccattttcgtagtgacaaaatgatttaatgtcagcaatttgttatggttcaaattcatagacatatatatacagcaaaatagattaatatttaatttacccacagggcaaaattactgacaggatgtgccatgagaaagggctctggcattaatatactgagatatcagccaagggcttgggatcacataggtccaagtttaaatcctggctctgagttcagcttcctgtggggccttgacaaatcagttctgtaaatagagttcaaaatacctacttcgatgaggcattgcacagcagtgcctggcatatagtaagtgcagggtaaattactatcgatcacgagttcattgacatcacctagagaaaatggctgcctttcattgtaccatcttgaaagaaggctgctagggaaaagcagggaggagcctctgccatcctatttctctaattagtctgcccgttcccctcttttccatcttagcgatctttctgtatccctcccctccttaaaaacttatcttcacactcacctcccccaggaagccttccctgaccacccgcttgcatcatctacttaactgacagtagcaggtttgtcgcccccattctatttccaatgcggaggttcatgcttactccaccatccttggaccctgtgcccaggacagtgtcacctctggcatggccacctggttggcctggggttcacaagtatttgtctctttgacattctttccttccccccatggtaaccactgaatccctgggaatctgcaggtcccaaacacacggccctcacaacccagaaaggagccatcctttcccaaggggcatcccaagcacctgcaggggccttcccctgtcatccgccgagacaacgctctgcgggagtcattgcctcccactgtaccctgagaaccagaggcccagccttgatgtggcctgcctgggactgcccaggttatgcgtggcactgccagcaattggcaccaaaccacccacacccatatccaaggcctttctgtcacaccccagccactttcaagcccagaggtgaccacgtgactccaatgtccctcctgtgaaatccttctctttctcttacctctccagggaaactgaagcccacaccaactgactttcctccatggtccgtgtgactcagaactgctaattggggcttggctctgggcagccccctctgtgattagcactggttttccctggcaccaagggtggcgccttctgcctggccctgctcaggggtggtgggaggcacacacctcagcagtggggagagactggcctacagtgagagaggaaacaagccccttgaaccccacttttttgcagccataattaggatgtcggtgggatcccacacaaggatgtcatgcaaggccctctctcgaggttgcatcttacacttacaacaagcactatcaatatccccatttcacagataaggaaattgaggctcagaaaggtaacataacatgtagggtcatgctaggccaagaagtggcagagccaggattcgaacccaggtctgcatgagtctgaagtcctcagggaccaccctcctcattggatggtcatgacaaccctgtcatgtgcagaccctgcctctactatttccatcacacagatgggtaaactgaggctcagggagctcaggaaactcaaggccatatggttggtaaagtgatagatactggctggcccctgatccagcctttattcggtccactgtacacagacccttcccttccacgccaggacccctctccctccagtgtggcagcatgaggggtaaccaggagaggagctgagggtagggttgctctggacagacatgagaagcagatgggaatgggtcacaaagttgttggataggtcacaaagggccaagttgcagaaagtgctggaagccaggtggacttgccgtgttgggcaggggggagcacgtaggatcttacaggaggagtgaagtgctgaactggcactccacaatgccccttgcccagcccgccccagggcctgcctcccagccccggtccccacctccccgctgcccggcactcccttcctccctcccaggttggggacattgggccactgaggtcaggtctttgtttgaaggacagataattaatcccacaaagtaatccccagcacactctggcagatttatggaggtcgcctctgtcctgggaactctgcctcatcatctttcatttcccaggcaaagtgactgacttgttatatcataggccccacgccaacaggaatttcatttaggggagttctccaggtggaaggagattgataacccaggcctgggcaggaaccgatggcagtcctggggccgggagggtggggagcagagcaggcatcgccacctcctctgtcccctagctggtctccgtctttctcccaacatggggctggtttcatggacctcacctgtcacaggccacagggacccggatatcatccagttgagcctttccaagccccaagatgagaaagcagaggcccagagcttgagaaagggactgtttcccacctggctcttggggctactctgccccagctgtcctcaccattacttctccctccccactccccacctcatccgccctgaagctgccacaggtacagggctgtcaaggacaggggcaggggctcctcagagcctgctgtggtggtccttggagcctacctcccaaggaggctcctttcagtgcaggagggcagtagggattggcaggacctggcagctcatccaccaagcagtgaggaaggagaggtgtggccctgggggtcagggtagttgcttctggtctattggctctgcctttagcttgctagacagtttaatggctaccattgtccacctttgcaatacaggactttggacttatttgataattcataaatatttatcaggcacctctcgtactcactgctggggatatggccatgaacaggacagacaaaactgtcgccctcagagcctctcttctaacagagtgtgtactctgttgtatccatgatcccgccccacccccaccctcaaaggcggggtaggcccaggctgtgggcaactgggaagggaggggagggcctggccatagcacagagagtaggggttggtgtggcaatgtgtaggcaggcaccagtaccagccttgccaacttggcagctccacgtcgacagggaccaagcatggtggggctggctccttcctgaggctccacccggcctttcgtaattaaagccgtaagtcatcttccgacgggagcctgtaggctggggaggccacagctgaccttgcttggggtttagtgctgggagggagagtgagtacatctgggcagaggtttgtagagggagctgaagatcaaaggctgccctctgttctggcctaggctggggacagtgtttgggctctgaggctctgcttggtgccaggagcagtgccaagagcttcctccacaagcaaagaggttacttcctcttttctatgagtgctgagtctcaagcttgcaaacaccccaagtgacgccatctgtctgtagcaggaccctttgctccgggccctctccaggagggcctatgcccagagtttggagtgggagtgctatagggtatccactgctttggagcacttcccagagagcctgccttccctcctgccgacagactaggggtctgtaacccagaacagctgatggggaaggaggcagggccaggaacccatgtaattgagaaggacaccaggccacgcatctgtagggtggcccagtgggaaagacccaaaagtcgctcctgtgacttctctttttcaaaaaagcggccagaggctttggaaagatttgggttgtggagcctcctccctggtcgaaaaggcaaggacgtctctctttttcctgtttctcgcttgctcagcagaagtttctgcctgtgtgagccaagggatgggagcgtcttgggacatccctccctatctggctgggctcattcatcaagcattctctgaacgcctacttggtgtggggcactgggccaagggcttgggacataatatgacatctggggctgagcctccagctgggaggatgagggcattctggaggcaggctgccgggatgaaatggccaaccacccaccccaccccacactccaccccacatcccagcccgggacccctggcctttgtcagagaagcagggccaagttcactggcaaatgtgaaatattaaatatttagaaaagtacagaaaccaacacagcacacccccatgtattcaccaccctgataacatttgttgacattttgccatatttgctttggatcttttttgctcttctttttgttcttgtttaagaaagggaacattgcagctattgttgaaggcaccttttctttgatttcaatcatctcagaggcctgttctgtgagcgctgagcagaaaaggtaaaaacctctgatcctgacgttggcttcaaaaatggcatccctgacttgaatgtggactgtgtcttaggtgacattgaggaatcatttattttatttagggtgaaaatggcatgttttgttgcatttttgaaagtccttatgagagatgcatacagtatgtaaagatgaactgggatttcctctgttaacaccgtgaaaaattggtagtgttgtggggggtgattttaagataagattggcaaaattttgatgattgttgcatctgggtgatggtaccgagagcttcattgtgctcttgtctctacatttgtgtttctttgaaattttccatagtaaaacttttatgtgtggtccccaaagcttctcaaagcagaccagagagccacatctgacctgtggcctggacaggagtccagacttgagccagacttctggtccacccatctggtgccagttctgcttctaacgtgctgtgtgttgttgaccaagttacttctcatctctgattctcacttctccaggggatgaaggaaaagttggaacctgctaggctttaagcatctttccattttccacctctgacacttgacacatctaacttgtatgctcagagactccactggagggaaactgtgggaatagtcccatttacaccttcaatgtctttcctttttttttttttttttttttttttggtgagacagagtttcactcttgttgcccaggctggagtgcaatgatgcgatctcggcttactgcaacctccgcctcccaggttcaagcaaatctcctgcctcagcctcccgagcagctaaaattacagatgtgtgctactacacccggctaattttgtacttttagtagagacagggttttaccatgttggccaggctggtctcaaactcctgacctcagttgatccacctgccttggcctcccaaagtgctgggattacaggcgtgagcgaccgtacccggccacaccttcaatttcttcagtgggttggcccactgatgctttaggagataagctttgcaaaaagggctctgtggtcaaataagttagagagacactgcatcacaatttccttgtgctggcaaatcacaatgcccatgagcacattaaaggctctgacaagtccagcagtgaagatgtctgttgagcatttcccagatttgtttgaccgcagaactttttttttttttttttttttgagacggagtgtcactctgtcaccaggctggagtgcagtggcactatctcagctcactgcaacctctgcctcccgggttcaagcgattctcctgcctcagcctcctgagtagctgggactacggacacgcaccaccacgcccagctaattttttgtattttcagtcgagacaagatttcaccgtgttagccgcaatggtctcgatctcctgaccttgtgatccacacgcctcggcctcccaaagtgctgggattacaggcttgagccaccatgcccggcagaccacagagcttttaaaagttgacctttcctataccccatggtatcagagttcctggggaaaccctggcctttctgttttcagactgggggctctgactctgtaggacaaatttgccatcttttctcataaatatgatgactctgactcatactcactcgaacccaagatgtttgatgttttccacattgctgagtgggtttgtgcttaaccaaatctgtagtttttttccttcagtcatgccctgaccagaatcatctgctttgatgttatactctgagtcactgaccaaatgccggaaaaccctccaacattaggaaactgggcctggcacaatctgcatcctttctggtggagccttctagaagcattgtttctagggaggagtaggagaaggaatataggcattggcattaaaggccatggcttcaaatctcagtgcgaccacttacaagccttatgactttttcacctctatcctcagtttactaatcaatgaggtctaacatttgttgagcatctgtgatgtgctggacactgtgctgaactaagtaggcttattacctgcttttatcctcacatcagccctataagataagaattactcctcccctttttatggttaaagaaacgcaagcccagagagggtagataacttgcccacggtcacacagctagtgagaagtaatgctgaggttcgaaccctggtcctagccactgcaatatctgccctttcaaaaagatcagatctcccatggcatcttaaaactgaaaacgtcctgggaatctccagattccctgaaccccatccctcagggcccccttggagggtaacggggtgctgggtgtgctggactccacaccccgtcatctgcttcagccagggcaactagctctgattttggctgttttctatactggagctctgtgtgaaattttgtctgatacaagaatctgctactgaaacaaagacatttgaaaaaccactgccatggaaaagccccctcttttttaaacaggagaaaaccctgaggcccagagaagtgaagtgactggcccagggtcacagctgtcttctgagccccaggcagatctctgttctcccttcaggcattggagcagggcctgggctgggtgggcggcggaggggggggggctctgcagcccccaggggacccctcaaggtcggtcattcgggctggttcagccagctggtggccagtttctatgaagataactgtgtctgaggctggctccctgaacctcgtccgaccacatctatttctgggctgcagagtcctgacggagcacaatttgattcataaattacccggctcaaggtgtgtgtgatgggttctccttccacagatttgaaagtcattcactctggaacttgcagcacttggggcgggagggcaggggcagccgtggcactgtcaggattagtgttcatggaggaaagatggcagggaagatggagagggctcggacaatcagtgagagccgctctgtaccagctctgttctcccagcagccccaggaggcagagtctgtcagtgtccctctttggcaagtgaggaaactgaggctcaaaggcaaagtcacttgcccaaagccacatagctagaagtagtggagctaggatttgaactcagtaccctctgaggcccacactgcttccacatgatctcagtgatgcaagacaaaggactgaacagatggcagttggagggggaggctggaccctgggcagtaggatttggagggaagtttcaggggcaccaaccctctttgtcccacaaacttcagggtgcacctgtcactgccattgcaccccaccctgccccgctctgcccatctttcctgcttaacgtcatccagtctgtggcactgcacagctccacctgccccaggcacccagttcaccatctttgacgcatcctgacatgggttcagcactttacagtttgtaaagcatcttcagattccttatctcactgaacctctaaacagccctgtgagaggggaaggtattctcacctccaaagaggaaactgaatctcagaatgtccacaagccccaaatgatgaaaccagtctcttaaattcacatccactcctttatgagttctccagtcggcttcctcatacatgtgccttgtccttccccgaagatgaccaatcttccccattagacggtgggctccctgggggtatgacccaccccatacctggtacggacaggcccagtggtagataggtggtctctggtgtccccacttcccgagaagcttcatccctgggcccatctttcccatgtcccattgctggattggagccagaggagggggtgacaacacgtccaggatgacagacagcgcgtgccccctcctcctgccatgggctttcttctccttgggcgtctgatcaccgtcctctttgttttcttaagtgtctctcccactccttcctccctccccctccttccctgggacaaggcctttcagatcatcaaatatcaaacactgcttatgcacagactgagatggctttatcggggctgtaaatctccctgtgccctgacctctcttgagtgccaagcctcgggtgagttatgtgggccctgcccagtgacaggcagaacagacagccagccctctgggaggcacaggctgggggacctggggcaccttggctcccactcttagcccaaggagagaccccagttgaagggaagcatgggtgtttgggcctacctgccccaggccccggaggtaaccgggtgccaagcaggcagcagggggggcctccttttcctgctctccttttcctcaccttgctcacctcctggccagactccgggccccagggctgagggagcaccagtcccacacaggagaggcaaggcccatggcagccatgagggctatgtgagacccaaaagacccaggttctaatcccagcatggtcacttagtaaccatgtatccttggacatgtcacttcacctgacagtgcctcagtttcctcatctgataaatgggtagcagtgctggcttcacacggtattttgtggatccagtgaggtcgtgcatgtgaacaaacatgtgaagcgcttggtcaacaggcagaagcacgcatcttccccatctctcaggggcaagcagcatgtggactaagcctgtagtctctagaggcagacaggctggcctggaatcctggctctgtgactggccagtggtgtgacttcaggcaaatcatttaatctctctgtgcctctgttttctcacctgtaaaatgggaataacaataataatggaaggccaggcatggtggctcatgcctgtaatctaagcaacatgggaggctgaggcaggaggatcccttgagcccaggagtttgaggctgcaatgagctgattgtgccactgcactccaggctgggtgacagggtgagatcctgtctctaaaaataaaaaataaataaaaagaattttaaaagctaagagtggaataatgacgatgccctcacaggaggaggccttgaggagtagctgaccaactcacatgaagtgctgagcacctcgtctgccacgcagcgggcccacaagaaacgtcagcccttgttattgccccttttctctctgccatcacccagtccatgccctcgtcaccagcaggctttcctgcctccagcccaacccctgcaggagctcctcagagccagacaaaaatccaaactgcttcctcctctgggcatcagcctctcctgacagcttcctgtgaactctctgcttctcctgctggctccccacctgggaagccatggtcccacctccacccttttgctcaggccagtctccccagcaggagtgccctcttcctccatacttaccccagccctgccctcctcctccagcctcctgcagaatcttccagggcctggcaagctgccctcagcaggactgggccccttttggcacaggtcctatttcctcatctagactagatgccacttggaagcagagacctcacctttccagtgcctcgcagctcctctgtgagcaaattccttccttcatcctagctgatgtagcaagaccagggcgggaaaggcccctgccctcagggagattaaatctggtgaattgttgttagtaattgtggtaacccagggagaggaagaattacacattaaaatgaatcagtttgcaaagcagcctgcatctagcaccaacttggaacacaaagacacacaccatcaaacactggggggtattttggtgcagtaaaatatgaataacgtaaaatttaccattttaaagtgtgcaattccgcggcattaattacattcacagtgttgtacaactgtcaccactaggaagttgtagaactttggggattattttttaaaggaacttgtattgaccttttttttttaaaaaaaaaaagaaagacaacaaatgtaattcagatcaatcaaaagagaaagttgaaatggctggagcaatggttcttcattggggcgattgtgcctctcaggagacatttggcaatgtctggagattattttgattgtcatatctgggggaaagtgctaccagcatctagtgggtagaggccaggggtgctgctgaacaactcacaatgcacaggactgcctcccacaacaaagaattatccagccccaaatgccacagtgctgagtctgaaaacctctgtcctagcactatcactcagataatctgtgttcacattttgctaacatttcattccttttttctatgtgcacattttttaagccaaaaaaagtatcttatggaactgtgctgatcattgtccttttttaaaacacatcataaacacatctgttttttcaagttacaagcatctcttctgcaacgttttagtggcttgctgcatttcatatcataacttatttaatgaatcccctattgttggacatctaggttacctccagtttttcttactaaacagcactatggtgaacatcctggtgactgcatttatgggcacattcatgattattccctttgaagaaattctctccatggcagtgtaaaggtttttcaggaaataggttcttatttcagccatagtccctggtgatgtctttctggtccccatcaaaacatcctcagaggaccaggggccgcctctctgaggctttccattttacagggagccatgcacagtgcattgctgtgggtggaagagtgtggcttgacccttagcaaactggcatgatagatttcactatctttggctactcaagttaatgcttcataaactggagccagttattagcaaattaatcagggtccagtttgtagccttattaggagaggttataatttgttggtttaagtgagcttgataaaaactgttgtggtgtaaaatgcctgtaagacaagcggactgccgttcacacctacttgagggactggaagtttgtcttaccctgactggacagtaataactaattaactgagatggctcagctcaaacaaacatagcactgtggctgcatcaggagggtattacagccccaactggaattactaattggctgatccctcctcgtgggccctagtgcagctgtggtgtctttatgatgtgtgacatcaggagtcaccccagtatcactctgctcctcagccttttggaccagtctcagagtggccctcagacattcctgctgtggcccattcatccattcagaaaacattgattgatcacctgctaggcatctgctgggcacttggggaaaccagtcctgccctcctggggcttacattccagtagggagaaacagacaataagaaacacataaacagatggaagagaggttcagaaagtagaagtgctttgaaagaaataaaagaggataatggagagagagtgacaggggtgagggtgggaaggtgggggtaactggggaggaatctgaggagtgacatttgaatggaggcctgaatgcacacagaagagacctgcaggaagaggctccaggcagcttgggaagctttggggaggggcggtcttcccccaccccgactgacccaggatccttatgcggcagcagactctcggcaggctggtcccctctcctggttgaaagccgaggtaacccacaccgctggctgccatatgttgatcgtggggctgttgaatgtagcccagcccagatgccatccaggatgcaggccccttttgtcatcaggcagctaagtaacgatttttaattcataagatgtcttgctcaaagcccatatctcatactgactcccaattttcattatacagtgatacaactctataccagtcagaatgatatggctccgctggacagcgatgggcctgcaagccagcctgccccaggggcgggggcttaggctgcccacacacagctgcttaatgggctacacctggcagggaagacaggaagggccaggggcctctgaatgggacatgaactctttagcttcctggaagctgagtttaattccttgctctacctctcactgcctggatgatcgagtgcaggttatttttaacctcgctgtgcctcagtttcttcctctgtaaaatgaggatagtgtgtctgtctcaggggttttgtgagactgaataagacatgcatacaagacactttgcgcagtgcccagcacaaggtcagaactcaatctatgttggccattgtggggcatgcccctcacaactctgggtgagaggggccacagctgggactagcttgctctgagtctactattccgaaaacaggtatggccaggtgtggtggctcacgcctgtaatcccagcacttttggaggccgaggccagaggattgcttgggcccaggagttgaagaccagcctgggcaacatggtgaaaccctgtctctacaaaacatacaaaaattagctgagcgcagtggtgtgcacctgcagtcccagctactagggaggctgaggtgggaggatcacttgagctgaagaggttaagtctgcagtgagctgtgatcaagccaccacactccagcctgggtgatagaacaaaactctgtctcaaaacaaaaggaaagaaaataaaagaaaacaggcatggcaggaaagaagaaaccaaagtgtccacctgctacatgtcaggcaccacaataagtgccttacgtacatgatcactcctgatgctcacacagcctggtgaggtaggagttgttatccacactttacagatgggaaatttggcccaaaggaatgagtggtttgcaggaggtctcacaactggtaagtgatggagctgttgttggaacctaggtctttttcacatcctgcgagttcatgctcagtatgcggtcttcaccagggtgttgacgtaatagactccaggcacagaccatgactagaagagagaccattggaaggaatggaagcagatcccagttctgctcccttccctgggtaaggtccctgacgctggacctgggcagggccaggtgaccaagtcagaggccacagtggagatcaggatcgcacaggtcaatctcatccagcctcctgcctccattcagacactgccatttaaagagatggctgcttaggcccagctcctaagatcccgagctcctcataagccatggcttttttcttctcttctctcccctgcggccccaacacaggactaggccccaagtatgccgctgcctcttacatactggttgaccctttggaattgctgcagagggaggaagagaaacttcaggccatccaacaaatatataatgagcgctgttctggggactgccagagattgcagcatgagaccccagcccttatcctcaaggccacgctgggtctccaggcatgagaattaaagaagcgcactgcacagggcagctgcctcgtgagttctgagcccagcactcaagggctcagaggagccagaggtggcagagcctccaggcgagagatgcgggtgggcttcctatagcaggtgatactggaccttcagaaagggcagttcccaggccgagtggggagccttaggctttcctttaactctgagtgcagaagagcagaggcaggactcaggggctgttagcccagcggagcagacaaagcaattgaaagtcatcagcctgtgttcccgcacgcaccatcggccactcactaaactgcttttcgcccagacccagctctgctgtggttcaagatgctgccagtgagataacaaggggacaagatgtgggaatgatgagatttggcagcaggcaggaggggcgatgctgcaggtggggcagggggcgtgaaggggggtagccttccagcctggaggaagaaagaggtagggggataagcctaagctccccctgccccacatggctcgaagagagagaactgccccgccccaacatcagaccttctaccccctgctgcagcccctcccagtccacttctctctccctctccctctccctctccctccgaccacctagaaaacagcagaagtcctttgcttgactctgcggcgccctctagctgccactcagcctcttgccttgttttttacaccaaactctgggcagcagcacctcaggacctgtgctcactgtccccacatccctgccccaccgtccctcagtatcttaaagtctgactctggggacatctgaagacccagtcagtggcctttgccagaccttcctcttcctgagctctctgctctatctgaccctgcagaccgtctctttctcaagactgcctccttccctgactctgggcacccggcactaggctggtttcccatctacctctctggccattgcttctctgtctccttcactaccttctaaatattcctggttatactcgtccaattatacatgtgccataaacagcagcctcgcctggtgcgctttttcccagtgtctgacgaacgtcaccagccccattgtgctgacagctcttgtctcttgccttaccttcccccaccagtccccatggtaggccacctccccagctacctggaagacatcgcaacatggacattctgctgctatgtaaaactctaccatggaggaatttatctagaactttccagaatgtgtaaggactcccccgtgtgtgtgtgtgtgtgtgtgtgtgtgtgtgtgtgtgtgtgtgagagagacagagagacgagagagagagagacggagtctcactctatcacccaggctggagttcagtggcatgatcttggctcactgcaacctccgtctcccaggttcaaacaattctcctgctcagcctcccgagtagctggaattataggcacctgccagcatgcccggctaatttttatatttttaatagagataaggttcactgtgttggccatgctggtcttgaaatgctgacctcaagtaatctgtccacctcggcctcccaatgtgctgggattacaggcatgagccactgtgcccagccctaggactccctcttgaggaagaagccactttgttgacactccactctatgaaggatgatgatctcttatttgcctcatcctatttccttgccccatagcacagggccaggtgcagaatgtgcacaaatgtgtggaaggcgaatgcttgcagggagagaaaaagaaatgtaaatctaagtccaagctggccacttgctagccatgtgaccttaggcaagttattgagcatctctgagcctgctttctcacacagaagatgggatatcttcttataaggtggttgcaacgaataggtgatgtgattgtgcaaacagcttagctcagtgcctggtacatggtaagtgtttgataagtagtggctgctactttttaataaataggagaatgaaggctgcaatccccaccccccgacccctgcccagcagcctttcacacatgattcattcctcccagcctctctcttgcaaatctgaaaaggtcttgattcctggagctcctagaggaggtggctgcccccaggaaaaccagcagggccagtaatgacctgcttttttcttttgtgatcaatttgaatcaccagttcccagaatccttacggtggtaaaagtgcagccaccaccccaccccaaaacccctcccctaccagatactccccgaccctggaactcaggacagcacctgtccacccaggggaagcagctgcccttctgctcagcagaagtggggctgaacagatgaaaggcttccctggtgagcgcccccagccccccagccccccatgggaattggatgaagaatgtctgggagaccagaaggccgacacggaggtatcagtttccaggagagcagagaaacttgcatgtgtggctgccaagcccacagcgcctgtggaggggaggacgtggaagtgagggaagaagtgaagggagcgaggcagggatgtggagttcccctccgcacccaccatcctgaatgaggggggagcagaggtcagagctctgggttcagggccctgtgtgtgggcctgagggttttgttctcagcctcagttcagggcagcctgtaaacactagctctctgtggcgaggctctcctggcaaaagtgtggggttggctcagtgtcactgctgggaaaacagctgtaggcacaggctgctggggtggtggggagagaccatggtggtaccatcttggtaaagcacaggcagccaacatttgttgggagtttcctgtgtccccagcactatattaacttatttaatccttaaagtgacagcctggggtgggttctattattgccccccttttacagaccaagcaactgaggcccacatataagtcacttgatcaagttcacacagccagtaagtagcagacccatgatttgaacccgtgctgtctgcctccagagggtgtaatcttaaccatttcttttccgaattgcttttcttcaggggccttagctcagcgagtacttacactttcaattgtgtggttttatcatgaatgtctgtcttcacagacaattcatatgagactgaaggcatcaaccttgcctgcttttctttaccgattctccaacaccttgcgcatagtaggtgctcaatatgaacttgaaggaatgagtgaattaaaaaaaccaatgaatctttgaatgagacgtgcccttggcctttccagctttggaggcagggctcatctcctgcccctacccaagcctagcagcatcccagagagtaccagtgttgctatggtgacagtaagaacatcttaccgagcatctcactgagtcagtcctctctcaggtggccttgtcggctccctaggtatagctctttctggctgttggtctggggagttaatcactcgtgcttggcaggaggtgggaaggtgtactccatgcaaacagatgtgtgaaaaagaagtgtgtgtgtgtgtgtgtgtgtgtgtgtatgtatgtgtgtcttgagtttggttgaatgtggactgtgtggggggtacttgcctgcaggtttgttggagaaggttgcctaggtcggggcatggggtgtcttatgtgctggggacagatgccgggtttggagtgggcagtgtgtacgtgaacggggcataggagctgagtgaagaaatacaagtgagtgttccagggttgaaaaccctgtttttcaaaccaaaaatgaaagcacgtcattcaacaaggggcttcaggtttgtgaatgatttataagaaaaatctcacaaagataaaaattgaatcacatttagctaaacatttgataggctcctttatttaaaaaagtaaatttatatgaaaatctggaatgctgggatgctgtctgtgggggggctggggaggggacccctgcctgtgagtgtgttggggcaggagtgggaggccggaggctctgaggtcttgcctcagggcagcccttcagctgagccttaggggctcagaggacctcagcccctacagggccctgcactgcctctgcttcacccagcctcagcactgatcaccctgtacgttgagtgctgtggcccccattaaaatgtatcgccatttgtttttgagacagtcttgctctgtcgcccaggctggagtgcagtggtgtgatctcggctcactgcaacctccgcctcccagcttcaagcgattctcatgcctcagcctcctgagtagctggaattacaggcatgcgccaccacacccagctgttttttgtatttttagtagagatggggttttgccatgttggccaggctggtcttgaactcctgacttcaagtgatctgcccatctccgcctcccaaagtgctgggattacaggcatgagccaccgcgcccagcctgtatgctcattagagaagcacaataactgtttgttgaatgaatgaacagatgaaaacacacatctcgtttctctagcagcaaaattcccagctaaagaaactcccttctatcatacatttatatgcctccttgcaatcctgtccccccaactccccactatgcaaacgcagccatacaaaacccagcaggaagtgacctaggagtctccatggctgggaaaggaagccttaggcaaggggatagctacagtgacaccccctcctgggctggccccatgttagagattccgaaggcatagactgatagactgagttctaaacaggccccactgtctgcagcttctgcctggccttgcccagcccatacagtggactgggaggacaggtgagagtggccactagccactaacttgggtagaagtaagctgccttgctgaccagcacaggcaggtgactcagcatgggttggctgagaatagcttctgtcccaaagtctaaagttagaagaggaaattgccccacccttgactttttccctagttaatccaagagaggctatgagcctctgctacatgcagatccctttagagttggggaaggggaagacctgggagctacagccacttccacggtgattctggtgttcacctgcgtgtgttgaaggcttgggtattaattctctaacgtggaatcggtgtccatccatcctcttcctcagtcctgcccattctccaggaaccacctcaaacaataacgacaacactactgagtccttattttgtgccggggatggtcccaaagtaatatatctatactttcacacttatttaattctcataaccctgtggggcagatgccattattatctgtattttacaagtgaggaaccagagcacagagggtttaggtaagttgcccaaggtcacacagccagtcagtggtccagggaattaatgacccctcctctatggagctttccttctttgagctttcccatctgtaaacagcccctccctgctgtgaactcagagatgccgattctggtgggtaccagagatcacttaccaggctgcaaagtgctttggtgtcagaattcctggcacgctgacatctgcatgcccaacaatgcccagctcagggcctgctataggaaagcctaccccagagattgctgggtgggtgaatgaatgggagtgagtgagtatgtgaatgaaccaacaaactggtttgtgaagaagacagcagagtggaattgggattttcccaggtgaattcacatgtgggaagggcatataggcaaggtgggggcccatgcaggactggcccaggtgaggaacatgcctgccactgtgtgcccagcgttggccaggtaccttaagggacagtcatgaaaggtctccatcttcagagggccgggaagggagatccaatgaacacccaataatcaactggggaacagttagttacaaaacagtggctactgcctgtggggaccagaaagggccagctagagaagtcaggactgcctttctggaggaggagaagaggctggcactgagctgggcagaggatgaggacaagagagaatgacagacactaaaagatgaggaggcaggaaagagcatagtgatctggagaaacccaaggacgccagtgtgagtttctgtggagagaaagcagaaattgaaggtggcagagggagaggggtgggtttacagagacatcggtttgaggcaagtgtggctcatagataatttttgccagtactttaatacatatcttaaattttaataagtacttaacatagtacttttttaaaattatgtctttaatttacattttttgtaaaaggaaactttacatcacggtcataaataaaaaattagaatagaatatactagactagactagactagaatagaatgtcaccataaaaataagcacaagagaaacaaaaccaggttattgcatcctggctggcgtccactccctttggaaggctctgagcctgaagcctgctctctctttgttaaaaaagaaatcaagcgagtctagagaagtgttaaagcatagtagcaccaaaccaagactttctccctggctgggtcacagagaccagaaggagattggaaaggccatgctgttctccttctgggacccgttgctgtctgccggctgctccatggactccagggctctttctattactcttgaaccagcattcatttcaagtaactgatgagtctttaatgcccagagaggagccctggccccagctccatgcccccctgcccccagctccatgcccccctgccctgtgcctggtcacacctgaatgcttctctctcttgcagggaataccaacagcatctttgccctggactacatcagcggagtgctgaccttgaatggcctgctggaccgggagaaccccctgtacagccatggcttcatcctgactgtgaaggtgagacctgggtgggcaccttcaccccaggtagaggagatgcccctactcggatgccaacctccagcagtgtccgagggctcctgcccccggtggtggcgccggaagcacttcgcttccgtgctctcaccctgcactgcctcccggggctgtgcccagggccccatcaggaaggcacccacgttatgaagttgtaggtgtgctgggcctgccgcatccatcatcaacaaccacacgggttggaacttttatcccctctcagcgggaggcacacagtaggtgctcatcctgtggtccttccttactgttgtcccaggattccaagttctctgttgcagccacctggaattctggaatttgccccatttctggggttctgtcccacttccaagtgccatgacttcctgttaagaaacagcaatgcagcagggagcaatgcaacagcaatgtgctggggtctccaccccaggatgtgaggcagagctacagtcccgcacccgctgcagccgcctgccactcacggtcggtttcaattcaaatcagtgacttgcagagccattccctgagaaacccgtttaggggtatggatcctgtctgagccacggggggtcttcccagcccaggccatcagccgttgattgagagaaacgggtggcccaaagactgaggccaggggctctgggaaggaggcccttccagcgccatggggaggatggtgcagcccagcctggcccttaattgctgtccttgaccttgggaggccctgctgttcaggtgtgggttagccatgggagggcgtgctcccaccaccatccttccctcctgtctgctctcctgccatggaagtgaggtggtcagctctaccagagagagctgccccctggtcccagcaccccactgcgggacttgaactcagtttttctgtctttatataaaatgtgagggtgtgttctcacacttggctgtgaacccgaatcccctggaaagctattgaaaggtatctgttcctgtgtctctcacccagagagattcagattcagaaggctgactcagaactgggaatgggcacttttgggcccatggctctggcccagagactggacacccaggtatctgaatcagtccatctgtgctgaccctcagagtcgagcacagggttcagcccatagcagatgctcagttaagtcttgattaaccaccagcacaaacattcttggcctcagtttcacaatctgccaaagagaatgaagacttccctcttgtccctcgatgaacccccagatctgtcttgtcctccctaccccatctcatccatctgctgtcagtcctaggatcctactacctgagcttaaaatctaccctggctgtgaatccttatacaagttacttagtctctctgaacctcagtttccttatcactaaaatggggatactaatgataaaatcctcctcctggagttgtggtgaggattagatgggatcattcacattgaggcacagtggctggtgctgagaaagtctttggtaagcaagagctgttgctgtgattagctgccttcactccggggtgactgatctctgtccatagggcacggagctgaacgatgaccgcaccccatctgacgctacagtcaccacgaccttcaatatcctggttattgacatcaatgacaatgccccggagttcaacagctccgagtacagcgtggccatcactgagctggcacaggtcggctttgcccttccactcttcatccaggtggtggacaaggatgaggtgagtccctggacacatggcccatgcagacccaccacccatccagacccaccaccctgcctgggctgttcaggtcctcagctataaaatagaaacaaacattgcggcaccccactcctggtaggttctgaggataaataaggctgaaaaaaaaatcactagtgtctacttttggattatcccctacaccctgcaaaaaacatgtaagcacatgtttccatatgtgtggttattatttagaagttacatacatgatcatcatactaatctagtagggatattgtaaagcatgtacaaaaatagcaattttaaaaggtagaaataaggccaggtgcagtggctcacatctgtaatcccagccctttgggaggccggcagatcaagaggttagaagtttgagaccagcctgtccaacactggaaaccccgtctctactaaaaatacaaaaattagccgggcgtggtggcgggcacctgtaatcccagctacgtgagaggctgaggcaggagaattgcttgaagctgggaggtggaggttgcagtgagctgaaatagcaccattgcactccagcctgggcaacaagagtaagactccatctcaaaaaaaaaaaaagtagaaataaaccatatgtgtattttcacacaccctgatggatcatctgctgccctctttgggatgcctgtacccgtttttgctcctgttcaaataatgaccttagcagaaagtctaattcctgtttttggtgtaataatgaccccagcttttccacgtgaagagtgaaaggacctaagtgctttggaggggatcccgggccataagaagacccctgcatcaccagggggtctaccctggctgggcccagccttaaaaggaagtaagggagagctgcagaggaggaggcaggaggctcagggtgggggcagccccctgcactggtcctgacacaccctgcatcacaggggcgggcgtaggggggcagggcggcgaggcctctattcggtggggccaggtctccatcccttcaggaccctctcagcctgcctcctcccctgccctcacccctccttgcaccccatctccctgcctgtcagcagctgccatgctaataggacttctatttattgctgctgctcctcctggcccactctgctctggaattccattaggttttccagcctgaggtgcttctcttcgattactccttgcgtggggctgccgcggtggccttgctccaggctgggcttcctccaccgtcctcgggagagccctctctactctggctgcttagccagtgacccaccctgttgacccaggagcccctctgcccacgtctcttgcccccctctggcagctcctctcaaccagacatggtccccccaaggactcagggcacgtgggcaagtcagtcccaccatgtgcctgtgtgtgtgctcaagtgtgtgtgcacacgtgtgtgtgtgtgtacatgtgtgtctccatctcctgctaagtaaggcattccatacctatctgtctgagataactaaagtaagtattgatcacctgctgtttacaaggagctatatttagcctcttggggagccaagtataacccatggtcctaggagtcaacagtgtgttgatacaaatacagtacgtacattttaaaacatatttttaagccgggcacagtggctcacacctgtagtcccaacactttgggaggccgaggcaggtggatcacttgaagccaggagttcgagaccagcctgggcaacacggtgaaaccccatctctactaaaaatacaaaaattagccaggcatgatggtgtgcacctgtaatcccagctactcaggaaggtgaggcataagaattgcttgaacctgggaggcggagggtgcagtgagcagagattgcaccactgcactccaccctaggtgaccctgtctcaaaaaaaaaaaaaccccaaaaaacaaattttttaatgtagtagttttaaaaggtggaaaaaacaggtataaaaacaagttctaatatgttctcacaccctaatggatcaccttgtatccccctttagggcaggcacctccttttggagatgactgtatgaatgagatgctcagaagaaagtcccatctgtggtttcaggagaaccataatgcccaagagaagagaaatgtggataccagcgtggggtccaggtccagtgaccacaggcagtgaggggtcagctgtggggctgagaggatcaggagaggttctatggtgagaggggcctagggctgcacccagaggcacacaggaagattggctggccacagcaggccataatccaggcaagcaaggatgtgtgcagtggggaggtaggccgggacccaggtctcagagggcctcaaatgccaagccaaggaattgaggcttgatcttggaggcaacccagaaggaagacagcttgtgtgggggcagcacaagctctggagtcagacagggcctgtgtttcagcctggccttgccatgtactagctgtgtgacctcaggtaaagtaatgagcctcactttgttcatttgtttaaaaaaacaaatagaaaagaaagagaatgcatccatcagcttatattgcagtaacaagttaggccccacataaaagttgatttctcacgtggacgactaggctagcacaggtggacagggaaaccctaccccgtgtagtggctgaggagcatgatctgcaggtccctcggtccctgcagcagggaagaggcagctggaaggctaagtaccagctcttctgtgcttcatcccagaagtggctccgtgacttctacccaatgactattggccagaactagttatgtgcccccacctcaccaccagcaggccaggaagcgtggggaaggtgccgagtagttgtctctgccacagagaaggaggcatgtacagggcgtggcacagcgcccagtacgttagccgttgtcatcattcaggagccgcagctcctgaccaggcctgagtccagcgagtgccaccagatgtaaggccggaaccccccaggactgctcaccccaactggttgggggcaatgtaaccctgacacctccgattttatctcaggctgcctttgctagaagcactttctgaaatgtctgcaggaatgcccaggagtatctgggtccaacccgcctctagtgaccgccccccacccaggctcagccattggcacacccgctgcagtcagggcacccaaccccaccagggaccattccctgctctccatggctgttttcccaagggagctggtcagtgtctctgacagtgcaggcctggcctcctcttctccagggcacaataacttgcagagacagagccaatgaggagaggcagcccaggagcccaggccacccaaccctgaggtcaccttggccattttccagcctccagatggggcggcccccaaaccatccctcatgtggcaccgggctcattcctcaataagagggagggatgagttgctttcggcccagccctgctctcgtgtatctcatgttcttctctggaggaatccggagctggccgggtgaatgcatcagaggaccagtcttggatataggggaggccccatcatgatggaggatcaggcccagggacccccgtgtagcatttagccacattgtcaacaggagcaaaagaaggactgcaaaagcagttaaacattgcctgagtgtccagagccagaaaaatcagggaaccacaaagagaaatcaggcaactgttagagaaaagatttttagaaaagtgttgtttcttgccagtccatttctgaggaaaaaatacatctgttgggatttgtgtctgggttgaaggtgactctggatttgcttggtgtggcaggaaaatgtgttcgttgagtaaattctctgaagggaagggagccagcagagcagtcagaaccctctgtcccaggctctgtggagccacgtgactctcacatgcccacgattagtgtgaggatcccactaaatctaactcctgattgcactgaatggtgcacgggggtggggcatgcttagtttggctcaccagtgtaatccaggccctcatgctctgcctggaacgttgatggcactctggaaatgagcattggttgagttaatgcatggttaaatgcccaagtatcagcgagatggcccagggctttttccaaaccaggtctggctgagtttgtgtagcaaggatgacctcagaaatcctctgcggggcagtcgagggagctgatgcaaaacagaaagggaaggaagaagcagtgtaacctctccataggaactctgtggcagtctctcctaatgaggatgctaatcgaattcactgccgccaccagatcgaagattctgctcagtctctcactgagtctcagactctgctagaccattcacaacaacaaaggtgcttgaaagcagtcctttctgtctcccaaggactccattcacattgtcaagtctcactgagtaatttcttttcctttgcctggctatagaaaacccacagacaccagggaaggaaaggacagggtgggctgaaaccagcaacaacccatttgtaccttgtgacagttgagatgcaaatagctggttgtgatgcaaatcagaaaaaaaaaaatccaaaaggcagaagccccagaagtcagccttggtgttgggagctcatctctgagtttcaaattaaaggttgtggcagcctcattcccctgcacctggtggctgggcgttttcttgtgtcttccttggtgttctggggagccacggtgaatcggcaactcactcacccacctggagtcctataatgtatatatccttaaaccccctgtgccgcccttgcccccaacatattctttgtattttctccacttgggtcaacttttcctctcctggccttgcctgcagccctcccctgcctcacctcattaacatgcctggaagctgagtcagccactggcagtcctgttttcccttctgcatggggacagtttgttgcgcgggttggaattttctgttcagttgtcctagaaaacgttcctccacttaggcgccagtggattacctctgtgtggcatccccctccgaagagtcagactagcagaagggggcgggggacggaggcagggtggctcggagaccatccacacctctgggtgccttacaaatcccagcaaggggtattgttcttaaatagttgtttcattatgcacgacccctccccgctgacccagatagctgaaaactgacagttcctctcatccgctgtcaggagaaataccatttgcggatgtcctgccttccttctccagagctgggagcatttgatccactttcctctgcctcactcctgacccccagcttctcagaacacacttgctgctgtccttgagaatattttgtgcagaggagagggatcggggtagggattgggacaccactctcttccccaccccagagaggcctcagctgccagattctggctgcttctgggaattggaatatttcagaaaggccttcgggcctcattaatttgccgaacccctggccttcctgagggactatgctgaaacttacgcaggttgggggttagttattaattcaagcaacaagtgttatgtgcaccaactatgtgcctgccactgtgctaggtcctggggggactgagctgaagatgtagcctctgccctcccagagcttatatttccttccagtggggagacagaattgcagtagaaatggatgttcagaactctataaacagggtgagtgagtgacagggtgggatagggtgattcctgactgtggtcccagaaagccttcagaaaggtgctgttggagctgaggttaagtggcatggaaggtgcagccatgcagagctgtggaggcaaaacatttctggcagcagacgctcccctacaagggcagagatccccaaaagggaaatggcctggcattttcaaggagcagaaaagaggctcttgtggatgtccaggacagagctcaagaggatggaggtgtcaggaggccaggctgcagcctcatcgggggcaggcagggctttgtcaggcacaggaaggcgtttttctgttactgggagccccaggaagccagggagctgatgtggtctgagtcgcctttctcaaggagccctctgatggctgtgttgaaatgtgcagggtggaagcagtgaaaaggagtgaagtctcccacacgggagacactccccactcccgtgaccatgcattccagtgtctgacggtttagcagtttagccattttcctcttaaggtgttttcagaaagctggagaacccccagttccatgatcatagaaccctaaaagtccaatagaaactgctcttaggaactcttcccaggacactgagttggccccttcagcctttatgacagaggctctgtgatttcaaatcagcccaggattttgaactctgacctcagccttccactaccacacctaccccaactgccctgagaaggtggcagagagagcgcccaagccaggttctcagcccagttcttcttccgcattcaggtgcgattccaggcaagactcgtcctcccgctgtgcctcagtgtctgcctctggaaaacaatgagttgggccagtcagtctttaagactctacaaatcctaatgttctcttcatccaagaggacacgggtaggaaggggaaggtgccgcccgggccttccccctgcccactgaccctgcagccagctcatcctcctttccctgagccggctccacggactcggttccggcaaacccagctcccacttcaagcagagggacttgggcgcctctctgggcctcatctctgtccccaaccccagcctgccttgtatttgtgtattcaaaaccccctgcagcatcccttttcagggaaggacgagagaggcagctggagttgttagaaataaaattaaccagccagacagcctgggtctgccacttggttttcgtacttttgatctgtgtgaccttggggacttatttatcctctgatgccattttctcatctgcaaagtagagacaatagccactgtacctcacagagcgtctatcaggattaaatgggttcgtatctgtatttagaacagtgccaacccataaaaagcactcttgaagtggggcatggtggcacacacctgtagtcccagctacttgggaggctgaggcaggaggattgcttcagcccaggaggttgaggctgcaatgggctatgattgcacggctgcactccagcctgggtgacagagagagaacctgtctctaaaagaaaagaaaaagcatactttagacattagctattattattattattattattattattattatcccctgtcctttctatagaggaagaagtcaaggctcagaggagttaagcggcttgcctaaggtcacacagctagttggtctcagaacttggtcttgaactctcaaccttgcacttcttgcatgtgttgcagggctccccatttgcaaacatggcttcctgttctctctcatctcagttttccaaactctgataatttttacttcccagtgtctgctgagaagatgagcttgagtgacagcattagacaagagtgggcacatccgactacagctgtccaatatggggaaaacggctctgaatagggccttaaagaagtgagagccccccgtgaatggggatagaaagtcagcctctgctggcatgagacgcacccccactgggggccgcttgggacccgagggttgagaattcagtcacagggctcaaatccactgggcgacctcccaaaggtttggtcccaccgagcggaggggcctgcactgcagagtgaacggggacacatctggcaggaactgattcccgtttcaggcaggagatgacatggttcatttatttgaggggcatagaaaaaaaaaacggaaagaattacccacctccccatggagaaaacatcaccaaataaattaaaaaaaaaaaaaaaaaaaaaaaaaaaatgacaaggagaaaaggccatattcctgaatgctggggggcgggtgggggtaggcagtgatggggtggaggtgagaaggggagactgttcttgttctcctgctcatctcagtctttatttttatccgtcaccctcattttccattccacatgtgttccaggcctgtcaggcagcatcagcccacaaccttgtatttatttaaatttattttcacatttggtcctgttaggcagtttgtctgggctgcagtgcctccaggccctccccacgcagctctgcaaaggttgcgttcctggctgcaggcttctcctgcgggcctcttcggcttcctttcagtcttcctttcagtccaggagttctcagcccatctggggaaggggggccacggaccacccaaggcatccatggccctgggtggagaaaaatctgcatctttcttttcaccagcttctaagtgagccgcagcattcttttaattacaaatacagaaaaaaccacagtggtattagcattacctgtggctttgaccccaagagacatctcagatattttcatatcacgttacaggtgtcacagaaatctcaaaataccatttacgctcatcactgctctgaaattacagcatgtatgagactgactgctaagtctccttgtttaatgcatcctgaagcgcatacaggattataacaaccttttagaatactttggtaactgtatttcaaaataattagttggctctgtggttccttgtattttagtgtgtggaaaataaaaattcttctgagaagggggtgcctgggcttcaccagactctcagaagggtcgtggcacaaaaagatgaacaccccacccttagtccctgtactgcgctaaccctagctccccgctcgggcctttactgcaaggctgacgtctgctggttcttagagctggcatccttagccttagccgtacaccgtgtggggatggacagggtgggagcagggaggagacaagacccgtggctccatgtcacgtgttcagctgagggtcccttttccagctctggaccacactgttcaactgagccccagaaatgtacaccccagcatctgctcagtgggagagacccagtcaatgcacattcttgccaccccagagagtgggtgcagctgccctcaactctccccacctgctggtgtgacctagggcatggacctctgtttttctgtctcctaagcaacttgaattaagaaccaaactctagaagcagtgaagagaggtgagggaaagaagggggcaggctgccagcatcccgtggggcagatgtagggttcgtactctcggatgtacaattgtcctattttccagacccttctttctcctccatgaaggtggtaactgggatctggctagaaaaaggaaatggatggattgcctccaacattctgtacctctcaccagcttgtgatttcatcaatgaagtaaagcagagaggggttagagggcccttgtccagggagcaatcaaggcaaggcatgcagagaagtgggggtcttcattgcctcgccccatgccggaagccagggagcccatcctggatgttcttattttgaaaaggttctctggtgactctgacctcgcagcaagggttgagcatccacacaaaacagtgtccacacagctggtacctgggattcctggggccccggtgagcacctctccgcatctctgtttccccatcctctgccctggctgtaggcaggggtctgtttgcaaggcctcggttgtctcacagcttcagctcacatttctagggttcctcccccaagatttagtctctccaggaaaatatttgttgacttcaaagcaaagccactctggaagagaagctagagggagcggacagcccagactgtgcgttttcccattaatttctccccagttgccttcagtgaggcccttattgtgatgatgatgatgatgatgatgaagatttttctgtccatggccgcatcctatggcgtgcttcctcccagcgtgctaagctccagcctccctggggaccagagggtggcctctgccatgagtcagacacctcctaatttagtctctttgtaaatctaattagcatgctatttacgccaagccctgtacccctggcagggggtgtgaggcagggcctgtgtggcagccgcggtaccagtgcccacccctcacctcctccacacgccggttcccccagctcccagcctggagtcccgtctaacagctggagttcatctttcatgttggatttgggaaattgttcccctctcacctgcctccctggcaggctccttccccacacccacggccacccacactcctgagcagggctggcaccatgggaagtagtgagaatcattttacccatggagtcatgctccctcaaagcagtggcggggcttcctgaagaccccaatgggaatcagaagcagagctggcaaactttcttctccatgcctcttcctctccccagcgcctcttggctggcttgtaccctccctggtgccccttcgttgtgggtgccagtgaacccagttcaccctggaacctcccatactccccctgcctgccccattggccaccccacctcatacccctaacagtgacaggtgtgtcttgttttccccctgtcttgaacaaggctgcagtaagcacagctcggctgggagttgtgcctgtgtgtctcaccccatcgccatcatgggccgtgaaatgtcctaatcaacaagtaagaggaactgcagagtcctgctgggcagctgtggcaacagtgggccaccaggaacgcagaagcctccttcccagcccatgctgggctctgcttgcccaggcgcctactaactctgtcccccgaaaggggagaatagtgcagggatggggctgggcacagggcagagggagaggcaaggcatttcatggcaaagcaaagtgtcacagttgtgctctcactctgtccatgcaggcttagggcagaccctcccttcctctccaggcctcagtttctccgtctgttaaaaaggaattcatatcaaagtaattgagagtgagataatttttttttttgagacagagtcttgctctgtcgcccatgctggagtgcagtggcgcaatcttggctcactgcaacctccacctcccagttcaagtgattctcctgcctcagcctcctgagtagttgggattacaggcacctattaccacgcccagctaatttttgtatgtttagtagcgatgaggtttcaccatgtctaccaggctggtcttgaactcctgacctcaagtgatcctcctgcctcatcctcccaaagtgctgagattacaggtgtgaaccaccacatccggcctgagataaaattttcagcatcgaagttgtcacaggtttacatcccaggttgcaaggtgcagagcacgttttcccctccctggttctgactagtgctagcatcaacacacggatgatatctttgctcttttcacatgggcaaaacgaggctcagagaggaaatgttttagggaaggtcacagagcgtgggaagagaggcctggtggctagcgaagcacacaggtagcaggcgcccacgggcctctggcaggaacaaggaagagatgccctgagggatgtgcacgttgagtgggaggcgggattggctcattccttcattcattcaacaaatatttgttgaacacctactgagtgtcagatgtgattctagcatcgattcacaaagttcagcccttgggcagctaaggttccaaggatggaagaccaaagaaacaaacagatgcaaatgatgtcaggtggtgagaagagccacggagaaaaagaaagccagggaaggggattaagggaatcctgggaggggcagaaccatcagaggaggccttgacaggcctgggtgaagtgagagggcccaggctctgtggatatctggcagaagaacgttcaggcagagggaagggcaggtgcagtggctctgcagaaggaggctcaggggctgggaggggaggtcagagaggcccagggctgtggtcaggacttggctctcacaggaatgagatggcaagccgcctaagggaagcaggcaggcagtgatgtgacaggagtgaagtttcgggaggaggtgcagtggaagacacccaacttctgtacatccgctgccgaatggagaaactgaatgtgatgccttcatgcggtgggccattattcagccattgcaggagtgaatgaagcactgagctgctacagcaggcatagccctgggaaacacaaaaggccacttggtggatgatttcacgtgtgggaaacatccagaagaggcaaatccacagacacgggaagcagattagtggttgccaagggttgggggagagaaatggggagtgatgcttaatgggcacaaagcttcatttgtgggggacacaaaaatgttttggagctagatagagggagtagtggttgtacaacccagtgaatgtaggaaaaatgctgaattgttcgctctcaaatggttaaaatgatgacctttatgttatatgaattgtatctccattttttaaacatttattttattattattttttattttgagacaacgtatcactctgtcactcaggctggagtgcagtggtgtaattataactcactgcagcctcgaactcctgggctcaagtgatcctcccaccccagcctccccagtagctgggactacaggcacatgccactgtgcctagctaatttttaaactttttgtagagatggggcctcactacattgcctaagctggtctcaaacccctggcctcataagatcatcctgccttggcctcccaaagtgctgggattactggcgtgagtcatcgcactcaacctaaaaatttttttaaagggtgctgtgtctgccaggggtgggggtgggtgaattgaccctgaggggcaggggcctttcctaggagtgactgccgtcattcagatggggcctgtggagggtgaggagcggtcagccgctggatctgttttgaagggagagtcaatgggatttgccaatatggggaggggaggaagggagttaagagtgactgcacaaggtttttggcctgagcagttagaaaaatggagttcttacttcctgatacggtaaagcagtcgattcagtgagggcatgatggaatccgtaggttagcttccagcgtgttacgtttgacatgcttgttagacacccagatggagacgccaagaaggcacatgggctgtgctggtagatacctagcgagcagctccagggcctcggtgaggggctgcctcatagcatttagtaatctctgtggtgtcaatgctcctcgatggccgatctcaagctactggcgtggcctcagctggctctcccagattctagaaatccaaccattggctctcaggagcctctagaaccccatctaccaccatgtggatccaggctggaggcgggaatgaaagtgttgccaacacccagattgtatttaaagccaccggtggccggcatggcggcccacacctgtaatcccagcactttgggaggccaaggcaggaggattatgtgagcccaggagtttgagaccagcctgggcaacatactgagacccccatctctacaaaaaaattcaaaattagctaggcatggtggcgcacacttgtagtcctagctgctggggagctgaggcagcaggatcgcttcagcccggagatttaggctgcagtgaactgtgatcacaccactgcactccagcctgggcaacagagcaagaccccaactctacctaaaacaaatgaataaataaagccaccgctctagctgggttcacttgggaaagggatgtggatagagcagaaaggagactggggactgggcagccccaggacaccctgatgcttcactttaggggagatgaggatgactgaggagccacccccaagggaaggggaagaggagcaagagggagcactgatgacaggaggaagattgaggcgaaggagggagtggagtgtgcaggaacagaggcaggactcagaagacttggaggcagccctaatgtctttcagtagtggcaaattaacacgcatatcttagtccatttctgtttttggcatgatgccttgttgtgatagccctcattagggaatgtccaaacctgctagcatttacagagcaggtctaccaggatttgtttttcttttcttaatcctcttggcccttttctctctcctgcctccagagccctcctcttgcacaccagggggccacccttctaagagggatgccagaggtcccctccctagctctgcagatcactcagatatgctaaatagtcctacagggacagactgtgcttaaataaatagatcaccaaagggaattgagaatcagaggaatctcaaaggcattgtgctgaaagaagccactcgctattgccctgtgctgcataattccatgacattctcaaaaaagacaaacttataggaacagagaacaggtcagaggtggctgagggtgggagaggagtccctgtaaagagacgggacaaagaagtgctgggggcagtgggactgttctgtatcctggttggaggggataggtaacaagaatctttgcatgtgttaaaattcatagaactatataccaaaaaaagtcaactttacaacatgttaattaagaaaataaactataaattatggaatacccccacacccatcccccaaaaaggatgaagtgagaggcaccagcatgagcagcagcactggtgggcttctagactaagatagccccatccttctctccaccgtcattaaatcagcaagtgcgtaatttgcaccctcctatacagctagaaaggccagttagagggccttgaacaccgctgtgagattcaatctaattcagcaggcaattgggagccatagatggtccttgagcataagtgatgtactcagagctatgctttaggttgattaatctagacacatggagaatgggggtggtaccagtgggcaatgacagagagcaccggtgggtggggactggacgaggggtcaggactgcttagatgtggggtctataggaaaggcagaggttgagatgaggctgcagtttagagttccagcaatgggagtgacagaagctcaaaagggcaggctgggggaggggctagatggagaaaaagatgggagctgccaccatctgccaccaccctgctgtgcagcggccaagttccatctttacctcagtatagctcctcacctgaacaccctccaccacctttgcatgccctctctttccctctgttaatctgtctttgaatctgatcctctctccctgtctctctgtctctcacctgccttcccacgtgtcttagtccattttgtgttgcttataacagaataactgaaactgagtaacttaagaaacaaaatttatttcttacagctatggaggctgagaagtccaaggtcagggggctgcatctggtgagggccctcttgctggtgggggctctctgcagagtcacggggtggtgcagggcatctcgcatgatgagattgctacgtgtgctcatgcagtagctcaggtctctcttcctcttataaagcctctagtccccctcccaggataacccattaatccattaacccattaatccactaatccatgaatggattagtccattcatgggtgcagagccctcgcgatccaatcacctcttaaaggccccacctctcaatactgccactgaggattaaatttcaacgtgaatttttgagggggacattcaaaccctagcaccatccttccttctctgtgtctgtctctatcttctgattttttttctcacactcacacatgcacagcagataaacacatgcaactcattcattcatgcctttatcccttcgtccattcacccatagcaactatgcggccaatacacatacacgccccacgccccaaagatagggaatatgtcaagtaggaggagccctttgcatgcctgagcagccctgcctgggggcagctgagtgacacacaggactgtcaccagggatggtcacccctctacccggagcccagcaccctgtcccagcccaggacctattccttaagacatttgtgatgtctttgttcactgggaagaggacccaagaccgggcagctcccttggaagaggactagaaaggagagggagatgaaattacctgctccttcttggctcccagggttccaggacaccaagtttatggcctcctatgacggtgggatccctgatgtagaaaggcaacccagagagggcagacagtttgcacgaggtcacaaagcaggccagcgccagtcctcgctccccatctcctgtcccctccactcttctcagctccctctctgccacccaaccatgcaggaaaggtggaatcactcttggaggagaggcagactcactcttggaggagaggcagtggaatacaaagcggtgtgattagcagctgtagcggtgtcccctcctgatttccataaggcatttagatttctttgcctggccacacatttctctgtgggaagagggaaatcattttagcataggaaatagccagagccaggcagctgcagattgggagagccagctcccagctctgcaccctggccctccctgctccctgcctggaggcctctagagggcctggccagaaagcagagggctggagacccaggaggctggtgaggccagcgagtactccctctctgcggtgctgcccctcaggccctgtgattctccccagaaggggccccagaaggaggggcaggacagtcctgggcttgggacaggcctgggtgcacacatccttttgccctgcattttggactcttctccgtgcatctctgaaaacacttacaccccactttagccccctgccccaaccccagccaaaagttgggtgcagagtttgccattggagtgaggaaagggattgaggccaggtagagtgatgaggttcaaattagcagattctgatgagaatggcagaccttgaagttggaaatatggccactggggctgggaggcttgcctggggttgcaagacagggccacaaggaagggattgctgagttttccacgtgggccaggtgccttccaaacagagcccatgctggaggaagggagaagaggacatggcctggctcccctgggatcgtgggaggctggagggtagagcatggtgtccttgagttaagaactcaggccacataaatcctctgtggttccctctgtcctttgcacatgaattaccagtccaggtggctgtagcagcagcagctgctccatctacagaactggaaaggaccgtgtgtcccccgatctccacataaagcttgccctttggccatacccatgggcgtgattgaggggagcctcaccctcctggctagcccctctaagcccactttgtttcaggaagtaccctctgggctgactgctctagtccctagaggtccagggtctggaatgcagaagagaaagacacagcaaggctgagctatgaaccatgtgacatgggcttggctgggtcccaggagttggaagtctgtgcccaggaacaggagtgggtacagacaggttgtaaagtataactgggctttggaagtataagattcccatagtgcactgggtcagtgggctgcagattaggaaaatagaattcaaaagcacctgcccctcatttgccttaatgcaagtaccaacgcacattataattcttttctcaggagaacggaggctggcttcagggccgaccggagggagtgggggaaggtctgcacgtgcaggtgaggaggacctgcccacctcgtgccttcatctgtagacagataatacacacacccgcggtgaaaatgatggtgctctggtattcttcccccaaagtgccagctgccaatcggattgaattagatttcacaagggtttttgaaatacatggaattcaccagcaaattacccttaaagagggaaaatcaatcatttggagcagagataagctgaaggcgaggcagcctcggattgatcccgtctgtgcaggcgtgtgtggaattcagcagataacctgcggagaggagggaggggaggctggctgagaggtacaggaagggcagagaggcagggcaagagggggaaggagggagttggagagggagagattggaaagaggaaggtgagagggcaagaaggggggaggaaagagaaaggagaagagggatagaagaaggaaaggaagaggagagagagaagagaggcttagtctgcacaggctgctgtaacaaactaccattgacggttggcttgtaaacatagaaacttatttctctcagttctggaggctgggaagtgcaagatcaagggcccagtagatgtggtgtctggtgagggcctgcttcccactgtgtccccacatggctggaggggcaaggattgttctggggtcccttttataagggcactaatccctttcatgaggactctgcactcatgacctaatcacctcccaaaggccctgccctccttgcgggttagtatttcaacatgaattttggggaaggagacaccagcattctgtctccagcagatgagaagaaatgagggcgagataaagagagaaacaagcaaaggagtcacaagaggaggcgaggagagaggggaggagagagaatcaggagaatgggagagagagtttgggctggagtcatggaaagcagttggaagagcacagtgggccgggtgcggtagctcacacctgtaatcccagcactttgggaagccgaggcgggaggatggcttgagcccaggagttcaagaccatcctgggcaacttagggagaccccatctctgcaaaaaataaaaagcattcgctgggcatagtggtgcacacatgtggtcccagctacttgagaggattgcttgagcccaggaggttgaggctgcagtgagcagtgtttgcatcaactgcactccagcctgggtgacagagtgagactctgtctcagagaaaagaaagagcaccacattaatgggcattacgggccttagagaatcaccccatccaagcttcccatgtggtagatcagaagcccagaaggaaaacagggccttccccagttgcgtagtaatacagggcagctccagagaaaacagactcctgacctcaggcccatggtgctcaagggccaagccacagaggagcttggggaggggacataggtaggaggatgaaagcctgaaatgagggtgacgtccttcaccttgatgcaggcccaagaggtgctccactcccacagtggagaaacggaggcctggagccatgagtggcggggcaggcctgaagggcagaggaaaaagaggcagcagggcagagccacccaccatgtgacatgggcttgctgggtaccaggggttgaggtggagtcagaaacggaagcagtgtcctctgccaggctccttccactgccttctgtatcctggcatctcagtgggcagagagacttagcaccccccttagtgtaggggttggagggagaagcagctggctttgagttgaaggtggaaggagaggcctgcctcctgccgaggtcccctttgccatgtctgattaaggtgaattaagtgaaaggatggacaaagaaggataaagaatatgtattcgatgggcttttattttctactgctcaatgttatggatgagaccaacagaaagtacagccgaggaaggagggaaacctgcgccccacgcccagggtgggactggtgggtcccgtcacccaagcctttgcccttctctgcctgctcctctcatttctggccatggtctagaaatcagctccttcccagggatgcctcctctcctacccccactactcctagaacaataataatagctctcctctattgaacacttattccgtcccagatgcttgaccaagatttggcagctcacccacagtagccctatcaaataggctgcattcttcccattttacagatgaggaaattgaggctcaaggatataaaattgtgtatgcaaaaatcacacagctgtaaaaggcagtgcctgagcctaggctcaactccagaggttgtggcttccaaggttctataccctggaagctcaggtcatggggctcttccctggcagacccgagttggggacagggttggttttggtgagggcagcactgactctgggggccccactccgcactccagattcccagccccgatccagcttgggctgagggtgtcacaccagcccaccaaccagaactccctgggtgcctcacaagagccctggccctttatcttgccccagcatccccctaccccccgaccccaaacataaaggtggccttggtccttgctgtggctcctgaggccaccctgccttcacatgaccctggtccttcctcttccatgaaaaggaattaagacctcctccaagggcacattgtagtttacagggttggttgacggtcccctagcatttgaggtacaaagaaaagaacacacaaggtccctgccatagggaatttcctggcttaggcaagaaaacacaattcacatgcttacaaaacacgggggagcagagaaatgatactgttttcatttaattctgtgagatgtgcttaccctccccacttcacagatgaggaaattgaggcttcaggagaggaagtgagttgtctaaagtcacacagctaggaagtgacccagcctgttcctcaacgttgaactgtgctctcttaacattgcgtcacgcccctgggtcactaacccaggggccaccctgactgatggcagagagagacaaacatcccggagaggcaagctggtgtcaccaatagcagggcagtgcctcaggatggggagggccaaagagccagagagacaaaggaggcatctgcaggcctcgttgtgctggagggagcctggaggctggctcaggcctccctccctttgggggcccaggccacctgcagcggaatgcgccagtgctgagagccctcaggtaatgaatgaccaagggaagccatgcttagaagtcaggccacccaacccaaaggcaggacctagactgaaatccacccctctgaggcagggaaaggtctgcatgcaggtggttaagtagcggaaatatcacccttgaccctccctcccaagggagtatttaacgagctgatgtctgttgagggcccaacatgtaagctcaacaaacagctggacaaccacgctgggtcagcacacggagccgggtctgctgggacagactcaggtcggctggctctgggagccttagagagactaggagggagcagtggctcatctgacccttctcaaagctaccccccacttccaggaatgggaggcagggagggggcaaggtctagggaagttgcggggcagccctcctggcagccggctgataaggcgctgccctcgtgggggtgggaaagctgcagccctaggagcaaagtgcaggagctacacggggagggaccggcagggagccaggagggatttcatgtgtccttcccctcccaagaaataaataaagctaagctgtcacctcggcctccccgcgggcagctgccagctccgcagcctgtagtggctgggctctggctccgggacccgcggtgggcgctatcagccttctcatcgcctctctcagctggaggagaatttaatccacaggctcctctccacacacactagggctccttttgatgtttctgtttatctcccttccaacaaaatcgcccctctgcagctccaagagcccctccagcctcctccgcatctccaccccatgaaggcagtcccccagccccctgtgggacaagggcagggaggaggcctagcaggagcagggaggtgggtgtgccctccaccagtccaggctttgtgccctgacctgagctgaggtgcttgtgggcctccttctgccacgtgtggcacagggaggggttcactatgccagctcctggcatcgcacttggagcagcgttctgtagtgggaaggccaggagagctgcatggttaagagctctgactccgaggcggggtgggggcaaacttgagttccaagccttccttggctgctgtgtggcttgaacacttaccccctctggccccagtttctttctccaagaaaaggagtggactgacgctgtctttgggccatcgtgtggattctggttaaggtgtgtgacgcctgtgtcatagccgggcttcacaaatggaagctgttgtcataaaaggctcagcagcacaggactgcgatcagtaggggttttgcaccaacttagcaaactggaatatctctctctcacacacacccctatcctgagggctgacagtcacaaatccagaccaagcaggaattggccagctggtaaagtcctggaaggaacaggctgagcattttagaggacttggtcagtaggtgatcctgagggtcttaggacatgtgtcctgaccactgcagcgtctggcctgcgtgagcttttccagcccctggcagcaaatcaaggagaagggagcaagtctcattcatttgaaaccccaagaattctcctaaaggggtcaggaagctgtcccgaaggcttgtccctctgggtgctcctgcctcaccaggtagttaaccagaagctacactgagctcacaccatcttccaggcatctttgagctcaaaatcactgagctcacaccatcttttcagtccctcactgttgacctcagcctgcacacgattggtgccgccccagccgacacatggttcttcctaagccttctctgctcatccaccataccttactgcttataccttacaggccaatgctcttcagttctgtcttgcttcttcccagcatcactctatcctgatggttctcagacattagtgagcatcagaatgcctgaggggcttgttaaaacagtactgggcccagtccgggagcggtggctcacgcctgtaatcccagcactttgggaggccgaggcaggcggatcatgaggtcaggaaatcgagaccagcctgaccaccatggtgaaaccccgtctctactaaaaatacaaaaattacccgggcgtggtggcgcatgcctgtaatcccagctactcgggagactgaggcaggagaattgcttggactgggacttgggaggcagaggttgcagtgagctgagatcacgccactgcactccagactgggcgaccaagcaagactctgtctgaaaaaaaaagaaaaagaaaaagaaaggaaacggtgctgggcccaatccccagagtttctgactcagaagatctgggcgtggcccccaattttgcatttctaacaagctccaggtgatgctgatgctgtggtcccaggaccacacttggagaaccactgttttacccttgtagttctcatccttggatacactttggaatgaataactggagagctttatagaatgcggatgcctatgcttccaccccctccctcagtctggtctccatggtctagggtgcagcataggcagcaccctatgtaaagctccccaggtaattttgatatgtggccagtggagaactacccctctttgcctctccaactgctcacctttttctcgactcctataggtgcctccaagctactctccctgccgcagtgatgtcttcccaaccctggctatgcagtgtggttccctggggagcacgagagaaatgtagcttttcccagcccccagagatgatgacacactggctctgggcatctgcatttctttttagaacgccactggtgattctgttgtgtatctagggagaggagggcagcaccggtgtgattcgcacgtggctgcaaggccacctccctctcccctgctgcagagctcagagtggctccgtctcgctcatggaaataatgccatcctcaggatggcatctgcctgggactccaagcttctcgacatggaccctttgcaaataataagtcattgatgattcttctccacactccgtgcctttgcttaggacagtgctcctcaaaaggtggcttcagatcaggatcagcgtcgcctggaacttggttagaaatgcaaagttacaggcctcaacccaggcctacagaatcaggaattcctgggggagggagaagaatcggggagcaatctgcaggtgattctgagacacgctaaggatctaaggatcaagaactctgtgtttaaagctacttcctccacccgaaatcccttttctgccagtccaaaagagtccaaaaataataccttctgaccagacacagtggctcatgcctgtaatcccagcattttgggaggctaaggagggtggatcatttgaggtcaggagtttgagaccagcctggccaacaggcgaaaacccgtctctaccaaaaacaaaaaacaaaaacaaaatacaaaaattagccgggcatggtggtgtgcacctgtagtcccaactactcgggagcctgaggtgtgagaatcgcttgaacctgggaagtagaggttgcagtgagccaagattgtaccactgcactctggcctgggcaacagagcaagcttccatctaaataataataataataataataccttccttcattcctaacaccagctcagaactccccttcttggggcaacctcctctgcttgtcctccccttagactgggccctggagcgctcagatggtacatctcagtttgttctggtaactaacattgctgactgcaaggccaatgcatttcacactgtggactcgtgctgccaatggggaatgcccgcatcagacatgagctccacttccttggctggggcagcagcacagggttgtgggaaggtgcattggcccagaagctggcccggcctcttttattttttttttttttttttgagatgatgtctcactctgtcgcccagactggagtgcaatggcatgatctcgtctcactccaacctccgcctcccggcttcaagcaattctcctgtctcagcctcccgagtagctgggattacaggcgtgcatcaacatgcccagctaatttttttgtatttttgtaaagacggggtttcaccatgttggccaggctggtctcgaactcctgacctcaagtgatccacccacctccgcttcccgacgtgctgggattacaggcatgagccaccgcacccggcctgggcccggcctcttatcccccactctgccaccagctccctatgcaaccatgggctgctcagtcaacctctctgaactcaattccactggaggggctggaggggcccgtgggaggagtagcagtaacacacaaggaagagctgctgaagcccaggcactccctgagcacccactgtgtgtcatggtctgctggggaatcttcaccacctgaggcatggtctacagcctcaaggggctgctgacattccagaataatcacagagggaactgtaacccagtgatgcaagtgctctgcagccattaaggaaaacaaagcaaatacttggtacttgcaaagtgtttagaatagtgcctgaccaagagtaggtgctaggttgttagtgtcctcgttcgcatcatcatctatatgcacagttatggaccaatcaccaagatgtagttctaagtgaaaagactggacacagagcaatgtgcatagcatgctgttagtgtcacagcagggtggcatgtacccataatggtcatataggcatggatttcctggggaaagagacccaggaatggggtgtggtggctgccctgggaggtttgtcagtacctgggctcagggggagagggagaggcgtgtgttccccttacactttttaacttctggaaaatttgccatgtctctgctcatcatgtctctgacattttttatgttaggaaaataaaaacatgggggtgtttggggttgtttcctgcagggattttatccaggctccagggatgtaggatgtagggatggcccctcccatcccagcctacactgaggccttctgggtgagagtggacagagatcagggagacaggagcccttgccccccccctcacctcctcacccttcatgccgttgagcctcttctgggtcccatgcttgtccctcttcttcactgtccagcacacatgtgtgcacactcacacaatacgcctcctccagaccccagaagctatggcccatcagaggctggggacagctgctcctctagggtgtggtcctggggtccctcccatgacccagggtctcactgtcttttctctctggttccttcctcctctccatacctctccggctccttctgtctgtctccatatcctttgactgaccgactcccattgacagaatttggtaagtgagcctctgaagggcaggggttgggcttggggagggcttgtggtgggcacagtggggaggggctttgaaaagggcacagctcagccctcccccaccctctcaggcccccagctcctgtggttgagggaccaaaggttcaggggaaggagaggagttggtgtcacctgttcaaactgtcacaccccactggcttcagctattagtgccccttcgggcatttaattggtcccttccatgtgacgggacgcattccacaccagggagcgctgcaacctccacagcctgacaggcccagaggagccttgcccccacatcccctggggagccactttgggctggggctctggagccccgcggcttgcctggaccccagaattggcaagagagggcttagggagctcagcttccacctctccatccaaacctctgtgccagtaacagggcacaggcctgtctccaggctttaagaaaagtctaaatgcagcaagtgtatttgccagtttgctaaaatgggaaaaacccaagagactgatgggtaaacgttagcatgcattcattccacaagtgcctttgagcatttagggggcagccccaggggcccatgaatcttgtgaactctcaggcttcactgggggtatcacttcctgatcattccccctctgccctgagcgggatgggaaccagccttgcagggactatccccttagaccacggagagtctttggggccagggtgacctcgcagccaccctctcaccaggaacaggtttctaagaggagtcccacaacataccctaagcaaccaagatgtgagggtgggcttcccttgccagccactggttcaagagaaaagggcccatgtgccaagctggccactgggctaggggtgggctctgcaccataagccagagcctctgcctctggactgaaagccaaggtcagtgacctactgggcacctgcaagagaggtcaggaggaggctcttacacatcacaggccgcctgcccagttggaggggagtttgggggcgcaggtgatccccttgccccaagtgcaggcaggaagaggaagtagaatcactttctgagcaggccagacctcagggagtcagtaagctgaatctcccaccttcagccatgtctcctccccatgatctggagacttcagtcacatcacatgctttctgtgaggagagtcaggtagcatctgaggggctctgtgagccacagccctggttagaataatcagaaatgcctgaacttgagtgaggcacccacctccctgaaatgatgggcttgggcctctgggacacagcagaacctgtgatggggtggccaccctgtgctcagtctgggatcctgggccccccgggactggcaacagtgtgggatccctggccattcacattgccactcagtctctgggttattcccatttcacatgtcagcaaaccagtgttctccctgctggacacgttccagaggaggaggggaagaacagcatctgcatcccttgtgtcctctcctggccaagcctgtcatggccgcttaactgcttctcttctctccactcccctcacatcctctctcctcctccttcctctgtctccccgctgggtcttgcagctggccggtccctccgcagctggggtcactgggacagagaaagggagcaggaaatggagagtgaaccaaaccacctgaaggggacactgtgggcatccgacagcacaaggaaggaaaagagagccagaggaggtttccagagggcctagacatgggtgggtcatggagtcttggagctgctctgggaaagccctgctctgtcccagcgcctcatccattgccccaaccaaagcagctctgggctcactctccaggagcctctgctcctccatttgggtctaggctttggccactgtgcccttcctgactggcttcttctgcactcttgacccagggcctgaacagcatgtttgaggtgtacttggtggggaacaactcccaccacttcatcatctccccgacctccgtccaggggaaggcggacattcgtattcgggtggccatcccactggactacgagaccgtggaccgctacgactttgatgtaaggccccactcactggcattttggagtggggtggggggtggatttcaggggaggcgagggtagggtagaagattcccttagatcccaccttccactgctgcccatcttcccttgtggatctgactcagataagccctccaagagacggcaggggccgggctgagtctcccttttccaaggaggaaaaggatatgtccagtaattgagtggaattttaccagactcccatcaggagcctctgcaacccatctcctgccagatcagcccctgctagctcctcctgccctagcagaatcagcagccatccctagagcaataacagacgggctcgcagtagcacagagctgggatgggcagagactctaacaggtgctctgggctggggccggcaaaggcatggagaggacttacagggacaaggactctgggaggggacatgtgggagcttacctgggcccctgttctgcacccccagctctttgccaatgagagtgtgcctgaccatgtgggctatgccaaggtgaagatcactctcatcaatgaaaatgacaaccggcccatcttcagccagccactgtacaacatcagcctgtacgagaacgtcaccgtggggacctctgtgctgacagtcctggtgagtccccgcttcactgcagggccactgagctctccagggccgactgtggtgaggcacccagagggattttgtccaagggacctcagcaatcagggaaggaggcacccccaaatccctgagctgtgtttgttggtgtattaaataaagtttttggactcttcaggaaggggctcccttgacctaggttgcaatatggaaaaggagccaacctgaggggtgacaagactgagctgaggacactggttttctgcctttccccgagagagactcagtgagggtgggctgggagccctggaagccccctcaaatgggtgggaaggtgccagccatccttgagaagggcaaccctctccatgtgagcacaggcaccagagaggggcaggcgcctggagggtaccggggcacccccagctgcccatggctggacttgccctttgacaaggggccctcccagtgtcatttgtatctgtcagtactcttggttgcaagggacagaaacccttaagtagttcaagcaaaaaaggattggctcatgtaactcaaaagtataagtgatttcaggccgggctcggtggctcacgcctgtcatccaacaccttgagaaagccgaggtgggcggatcacttgaggtcgggagtttgagaccagcctggccaacatggcaaaaccccgtctctactaaaaatacaaaaattagccgggtgtggtggcacacgcctgtagtcccagctactagggaggctgaggcaggagaatcgcttgaacccaggaggcggaggttgcagtgagccgagattgtgtcactgccctccagcctgggcgacagagccagattctgtctcaaaaaaaaaaaagtgcaagtgatttcaggcacggctgcatccaagcactcagttgagcagggatctgtcttcaacactgggctctgcttttttgtattggcaaagaggggcaccagcacctctaggctgacttcttaccaatttatcacccctagtgggaaaagttcttttgcagtaattccagcagattctcatcggcccagttggttgtgtcatcctggaaccaattgtgattctggtatgccggggagggatcacactccccctagtggacccaggggttggggtcagccccgcctgaattacaccgtctgagaatggggaaggggcttctattctaagacaagggattgaatgctaagcagatccaagtggtagatgtgtgctacacaagctcagagtcttgcccagtcggtgctcaataaatgtcacggagtttaactcattgctttctcctccttgcacacctggggctcccagagtccttgcttccatttcttgctccgtcccaactccaagcagagtgataccaagaccccgctccgaagtgtgtttactctacagacagatggtatgaaactgcactgagcccccaggcccttcccctctgacagttattaatatttcaaacagatgtttagccagtcaggctgtcagacgtaaacaataattctgcggcagctgttttcttcacctcccgcgtctctagcccatgactcctccagctttcaccaaggtgctccctgcaataaatcaccaggcgcttgaggccccctggaccttccttcagcctctcagtgcccagccagagagcaagtgccagaggctctggccttctggacccaaagtgtgtgtctttacccaccatcccccttcgaaggactgggtaaaaggcagccaacagcctatgctttagaggcctcagagtggaggggaggctctgtcccctgtgggtctgggaccacgtggcaaagaattctagtgtcagatccaggcttagtgggtgtcaggggattccttccaggtgttcttgcttgggacagagtttcctcacttcgtagtcccaagttcccatggtccttggaaagggatggggaaaacctatggagccgggaggagatgtgaaatatgagaaggggcatcccttggtcggtggtgccaaggacagctgtgtcaggcccagtccagtttggggctggcgctggggagcaggctttggtgaatgtgagccgagcccctcatgctaggtttttatccagaactggggcagctgctgggcctgagctcagcctcctctgtgagtcgctaggaaccagcagatccggccagcctccctgggttcctggcttccttcatccaagcctcacccacccccttctcaagctcccagccccagggtttatgaagccatgaaaggtgagggcccatttcatcaggtaacagctctcacagcaggaccgtgtgcctaaaggagttcaggccctgcagggagatggtggggaccccgcgtgctggcctatccatgccactcttagcgccttcattttctcatctgcaaaatgggccccagagctagtaagtgactaaactggaattctgttcctgtaaaggagatataaaaacatcctgggtgacccaccctccccccttcctctcccagtctccccagggtgtttcctggccacaccctccacaccgccctgccctgctcttggcctccttcacccggcagctctctgctcagacccggggtcagcccaatctctccacctcctctgccacaaaaggggctgaaattatggctgcctgctcagggactgtaaaattccttctccgtgaccttttctgggatgttattaaaatgtttcatggggagttgtgtcaggaaaaaaattatgaagaaaaggaaatgttttaatatgcaatgaaggcaggagccgagcgtccccagctctcatcctggcgtggccctgcttcagtggctggtcacctgtcctgggggaaggtggtcatttaacatggcttggggaagctggaataggaagggctgtcaccaccagtccaggtgtcctagcaggggtggaagggccagactttctcacctcccaggtccctggaccttatggcccccagttacagcaaaatgagtttccactggtggcaggaaaagagtggggacaccctcatgcacacagtcagcgctggcagaacccacacatacaaaaagtccaccttctgtatgtatacaggggttttgcatatatggagtactgtattttccatccaaatttggttgaaaaaaatgttgcatgcaaatgaacccacacagttcaaacaggtgctgttcaagggccaactgtatctctaacctgttaagtaggcgctgttattctcactttacagatgaggaaacagatgaggctcagggagttaagtaacttgctcagggccccagggctagtaagtgactaaactggattcacacagcgactccatatcccaagccacaggctcttaaccacgaggccacccatccagaaggttctatgtgggaccactgagcctagtcctttcagcaaccttcagagctgagggtaaagagaggagccggaaagtgctctctgcggtatccacagggacaggtcccagggtcgctccaggtggtgtgttcttaggtggcgctcaagacttttagggcctgtggcaccaccaggtgaattttcacatctctgagccctaagctgctccagggacagagctgtgtgagtgttttcactgatggagaaaccatttcagagatattcgagcactttgctcagggaagcaggaataccaaggcagcccagagctgtctctgtgaggaaaggtcccctggaaggagggagggttcaggatgaatgtgctctgaagggtgatcacacagaggaaggatgtgcgggggtgcatatgtgtatatgtgcgcaggcatgtgaggtatgcttgtgggatgtgtatgggggtgtgtgtaggcaggcatgtttttttgtgcctgtgcatgtacatgtgtttgcagctatgtatactcagaggtatgtgtatgtaatatacatgtgtgtgtgcatgtgtgcctgtgcacgtacatgttacgactacatgcatttggggatgtgcgtacactatatgcacaagtctcatgtgcacacgtgtgtgtacatgtatgtgcctgtaccgatgcatggatgatgctggtggctccccatcctctaggctgtgtggtttattccctctcatatcccaggctgctctgtgattcacaccttccagtcctgcctcctgacctggcaattgaaatcagatgagaaggccagggagtgtcttatcctgggaccctgctaggcttggggcagccctgcagcctggccagtgtctggggcctggcagggtttgtgggcaccactggacagtacaagaagtacaagagtaacctaatcatttattcattcattcattgattcaacaaacgtttggtgaatacctgctgtgtgctaggcacatggccctgaggacacatggtgatgtgagtcttgtacttataaagtttatagtcttccaggaaaactggactaactacgaaatgaatcttcacactgagtattacttgctgtgatggagagatcagggagtacgcgaacctctaatagggtacctgaccttgcctggggtccaggaaagcttccctgaggaagtggcatttgagtaagcattaactggtgaaggcagacagggaataacattggagaaaagaggctgggagcagtggctcatgcctggaatcccaacactttgggaggccaaggcaactggatcacttgcgcctaggagttcaagatcagcctgggcaacatggcaaaaccctgtctctgcaaaaaaaaaaaaaaaaaaatgccaggtgtggtggcatacacctttagttccagctactgtagaggctgaggtgagaatgtcacttgagcccaggaagttgagacttcagtgagccgtgatccactgcactccagtgagccgtgagccactgcactccagcctgtgcaacagagtgagaccctatctcaaaaaaaaaaaaaaccactggaggagagaacagcatgtgcaaaggccccgtggctggagtacagtgaggacgtgtgtgatgtgtggggaagtggggtcctgctcctttgaagcacaagaggcttggctgtttctcttcttcccaaattgatactccccacaatatgccctttgggatgctgttctgatagtggggaaggcctatatcaaaccatccatacccccttgcctgttccatccttgtgacggtggcaggcgtttgggaaacagttggcagaggttgtacctaggatgtgtgaggagccagcttggcctcttgcagcatggggcacgtgtccctctatttattagctccatgtcctctgggcagtgggagaggcgaagtgctgaggaagggtggcagcccccctggcgcagggcttactgagctccaaggccttctatccctgctgcagggggtggggcatggcagaaatgggcagaagatggacttcagacaagacaggcttcttccccagtcggaggaagccaagaaaggagaggccctgaaaagtcctgactgggcaggtgtggggccccaggaccagcttgtggtttgctgagccgtgggtagagctccacctctcagctccagacagacagggctggctggaggtggcctaaaagcctgctcctctctcatctccctgccccctcttcccagcctgtccttgggaggctggcagcatcttgggcagggccacaagacatccagggagtccctgcaatcctgtcttactatgagctggtcactccttctctgggacttggcttttttcctatgaaatgggaaagtagtgcctgcgcagcctgcagtgctgggttgttgggagacccattgcagtgatgtggtgtaaacaggtaagatttacagatggcaggagtgggtattttcatcactggccttcagggtctcacctggctgcccaccagcccttcggcctgtggacaagcccagctctgccgcagtggaccctggacaagacaccgggcctcagtttcctcttctgtgagctgggggagataacctgctaggagcctaccttggaggattgttgtgagaatcaaatgaaatgattcatgaagacacagcacagaggctggctaggaacacacgctggaaatgtcagcaagtcatgcctggcctcctggctgagcctccagggagcacgggccctgggcaaggacaccaccctcagagctgtggccctgcctcaggcagccatgtgaccttggccagtcactgaacctctgggtcccagtgagatgactgggccaggggctggttcagggccttctgggttggtgaggctttaattccaatttgcactgtccaaggagaaaggggagccattcttgctgtttagtttcatgcccagcaacatgaatgtgccacccaccctgcaagggtccccacccacccactggcctctagagcccgtctcctgccctacccctcctctctcagctcccatctggaagtctcaggaagattccccaggacttcacttccccctcctagagctaactggcttttcctcctggtccagcccagcctccctctcctgccacatcagcagacagccctgctgcatcaatgtcagccccattgctgtttgtccccatctctccttcccctcccacccacagcattgaccccacaaggaaaaggtgggtatgatgtcattgccctgggctggccgtgttgaaggcaagcttcaatcctggaggacttcaaatgcagcaggcctgttccaccagctgtaaggccacagggcctctccctctgctctgtaactgtcaggacacccccagccttcaggctcagagatcacccctgtccctccatgctgctgaatccaagaactctaacatgggttctactcaaggtgctggaaacctaatagcccagccagatgatccaggaaagccagttcactgcctgtcttagtcttggtgctccctggggcaaaccccagttcctccctggtccctctgcccccagcagaaggacatgttgctctgcaacatctgtggaagcctctcagctgtatctatctactactgcaggagggaaccttgctataggagcaaggctttggaaccagaaacccagcttcaaattctggctctgctgcctgctgtctctatggccctgggcaggtgcttagctgtgtcctgaccctcagtctccagagtgtgctgtggagagaataataataatacttatcccacaatgaagagagacggggcatttaaagcactttgtgtattagaaggcactgggtaaatggcaggtgtcttatctgggagtcggtggaacttcagagagcattggtatttaagcttgggtctcttggttcctagattttctgcctttggctgtgacttccctagactctgggtcctctcagttggtgcgttggttgagtttttgtctgtgctcaaccccgggaagccaacacacagagtctatcctcaaggaacagaacacagagaaaggttaaacaagcttgcaggtgagaaccaagcctcttcggagggaggcagacgatagttgctgccaggtgtgcgacctgtgcggtggtctggggacatggactcggaagggccccaaacttggtggaatgctctgctgtcaccatcttgaaattctgataatttctgaacagaggccctgcgtgctcatgttactctgggccctgcagcttacgtggcttgccctggcacaggagtttatcattctctgcccaaataaactcagtggctctccacggttttcatcgatccctacattcagtcaacagtcagcaaaggctgaagtgctggggccttctgttcccacagagcttgcttcagttcttattgccgcataagaaaccacccaaacttagtggcataaagcaatagctgtttttaatacaaatggctcatggatttggtgggtcaggaatacagaaagggtgcggtagggaggccttctctttccttgggatctgaggtgactcgaccagctggagtctggaaacagagggcccggaggatccattctgatggtgttctcaccctgccacgactgtgcccttggctcatttggctgaagggtgagtgcagccggactgtggcccaagcacccacatgtagcctccccacgtgtccggacatctcccagcatgggagttctgagcaggcgcacccccagggaggcctctgggggaggagtgtcccaagagatccagacagaagctgcgtggcgtttttcaacccagcctccaagtcacactgcatcatttctgctgaattctgttggttttaagtcaccagggcaagtccagattcaaggagagaggacgtagatctccccagctgtcaatggagagaacgtccaagaatttacacacacgtaaatgtcatagaaacactcagaggtcacttttccataccacttctgagcagtcatgcatgagcacagtgccatgatgccacaatttccctcacctcctcctggagggcacaaaaggaagcaggagagcagaagggaaacctgcaaatcccctttccagcctgggacgagctctccgtgactgggaagtgaaaagacagtgatccctgctgtcccaggcactccctggccagtggaattcaagccttctagacctgggttggcctctgcagcctggccttgagctgctattccagcccttgcccccatacccctcacacccttctctcctgcccactcagatcctcaacacccctcaaccctcggcattttcttgccacggcgtctttacttgctactcacctgcctctccctccttcctattggagaccatcaaaatctgctgaacctcagggccagcctccttggcagcaccgccttaaaaagcccacttttcctggtaactggcatgtgtcacctctcgagttcctctgcctcttctctggggccccagcatgctgtgtgccttgctgtctgtggctgttcccacccctgtatgagggctcgctggcaagtgttccttccccacgccactgaaaaccttccccaagcaggttctctctgtctcaggggccccacccatggtgtatgcaacacaaagtaggctggactcctactttggtgtctggggtggtctggggtatctaggacagttgctggaggaaggaatgtgggcaggagaaggttagcagaggcctcatggggacacatgaggcacagagatggtaaattacatacacaagaccacccagcccatcggcaaccgagatgtttgtccaagcctgaagcctcataaccccacatttcactctctgtgccaggctcccccaacatcccctcgggtgacaagcatatgcagaagactgctggccagagaaccccaaggcctggcttccaggccactgagttgctgtgtgaccctgtcccattctcatactctctccagaccttagtttcctgctcagtccaaggagaagatgggctggaggccttctgaatgcccttcatagatcaggcatccctggggatgcagaccgcagccccaggaccaaggccaagggtagggaggtgtaatggccaccagcttccaggatcgcctgggcctcctagtcctaatcagggcatacgagtccaaggtcaatgctgaaatctgccctgcctctcagtctggccctgtagacaggtgggcgggagctgaccctgcttccctggctacttctgggcagggccaggtgccctgggccttcctggccctctgggagcccctgtgtctccctggatcgtctgctctcctccttcccctcccagagcagaactctgcactctctggcacaaagggtgccctccagatgcaaatccagcgactatttaaggcctggaatgacagtggtgagccagacaacttccctgtctgttccaggggcaggaggcagatgatgaacaaggaatttcagagcccatgggatggggatgagtgatgcggggaaatacgactgggcaggggcggggagtgccagggctggggttgctactgcatcgttatatcaagtggtgcaggaggacaggcctctcctggaaagtgacatgaaacaacctggaaggaagccagctgggatccaggttgaaaatccaggaaagagtagcccaggtgagggatgcaggtgaaagaccctgagcaacagcctggctgtggtggatgcacagagagcaggaggggcatggaggccgggaggtgatgaggcctgggagcccatcgtgggtagcaagtctaggagagccctgaggatggatctcctcgatgctcctcagtggagaataggcggggggtaggggatggaggggaccagggtggaagctggagacctgccctgaggctactgcaagaagcagggaaggatgagtctccaaccacgcaggtggggacagtggaagtccagatccctcctgctgcttcaccctcctctccccacccttgctggagttgcttcactcttctccttcccaggccagcaaggtgcatgcgtctccatctctgcctgactgaccaggtgggccctgcgccatcccgaatgtcaagtggaaagggctgcaagtaggccctaggcggggttggggtcctgcctcggcttcctgcctgcaggttggccttgagccggtgactgaagggctctgggtttccattttctcaactataaaatgggaagagtaattcctatctcagcaatgctatgaaataatgtatggccaggtcataggccagggcctgcctacagcaagtgctccaaaagcgtaccaatgcctgctgtgtcagacctccagggttctccatggttttctagaatagtcgtctctccctgcttctgatagcatccattcgacttgattctaccattgtataaagctgatgacaaaacttgccaacgtgaattattagtaagcctgggagatgataacagggcccaagaggtaggcccggtccacaggctttagcaaaaccaagaggacaagccggtcagagcagggtagacagcccttgcgcctctgcccaagaatcatcagaagctggacttccagagcctgctcagctcttccagcgcattccccagcacccccctgccaggtatcctccctccccaccccctcctgacacccccaccattggcatcttaattgatctcattgttctcaaacccttgagacctgagactccagctgtgcttaaacagaacaaaatctcttccaatttccccaccgtttaaaagaaaattgaattctttatctgcagcctggggaggggaagagggaggctaaatagagagggacacatacacacacacacacagacacacagaaaatagtaggtcattccagccctgcccccaggctggcctggaaggcctctgtggacacactcgctcccatttgggggtgtctacggatgtacttctgggcccctttaatgggctcttctgttcatctccctcagaggggctggggtgggagctggaggaggctgagctggctgtcagtgattgacgggtccggagttcctctgtcaggcctcagcgcccctcgcctgtgtttatctctttaatctaaatatctgtctttgaaacctaaatggcgtggagtgagaggtaggaccggggtagagagagagaaagaggaagagagagggagggaggagagagcgagagatggagagagagagagagagagaacatagcaggctgtcgcctttcttccactgcggctggggtgcccccgcctctgcctcggaagtgaattgtcctggaccttgtgtgaggtctgatggttttcagctgattggtcattcaacaaattgatttttggcaaattgatttaaggcctcactgcctgtcccgcctttgaagcactccacagcctctgtcaccagcacttccagaatctaccatccttgaccgagcagctctgtctgcggctaatctttgcccctttgccaaaacaagaggatactgcgttcatcccaggcctggtgaagcagtggtgtgagcttagtgaatgccaggcattttacagggcgttccctgtctcttctgtacccattgtgtagaagaagctggggcccggagaggtgagcggcgtgtcccaggccagccagttagtgaccagccatgccgggattcagaccccagacggtctgaccccaaagcccctggcttcccctccattctgccagtcaccctcagggctcacctcccaagctgggctccagccttttggagtcagctgtctccaaagtccagggaaagtgggcttgcaaggtggaagcagctcactccctgggtgaccttgagcaggtccatggctgaaggggcctcagcgtcctcatctggaaaatgaaagggttctgctggacactctctaaggccccctgtgccaacaacacctgagtgttcctgtagacagtcacctccagcacagagagcccgtgacaccctgtgctctgctcctgtcagaagtcacccttcagtaggttcgctgctgattgttcctgctcagacaatcactcagagaacaccagagcgaagacaatggaccccctgggccaggggacaatgggcagctgtacaagtggccagcgccagaatgagtttgtaaatgctgcagaccaaatgcctgttcagagtccaccagtgccatgagctaggaaggttatgagccctggaactcaggtgacaggggagagaggggagagagtgacagaagcagccactgggaactaggcctgagagtttgtccagggaacatttgggagaaagcctagagcagcaggtgggtaggggacccacagaggtttagggagaggttgagctggctctgtgggtttggggtggcttaatctcactctgtaatctctgtacaggggatagtagctgtggttcctaccagcttgtttctggagtggctcaaagttccatatgcctgtcataaaaacgacatttaacttcatgacccaggacacatactcacacggacacttatctccagcaaagcagtacttcctgaacacatgtaataatacactctagtgttttctgatttaattctgctagatttcattttctaagtgctaaccatgaacgactagattgatttcatgaccaactaatggatagatgttcaaccaaactaagtttgaacctctctagaaggagccttctctgcttcaccatctgatgaggaggaggaaggtagtatcaacttgtatttctctagtgttcactacagggagcaaagggataaagaccgcgtcctccagacttagatcacccaggtttaccctgactcagctgtttcttttcttttcttttctttctttccgttttttttttttttttttttagacggagcctcgctcccttgccaggctggagtaccatagtgcgatcttggctcactgcaacttttgactccctggttcaaacgattctcctgcctcaacctcctgagtagccgggattacaggcgcgtgccaccacacccagctaatttttgtatttttagtagagatggggtttcaccatgttggccaggatggtctcgatctcctgacctcgtgatccaccccgctcggcctcccaaagtgagtgagccaccgcgcccggcctgactcagccatttctgagctatgattttgaataggttacttgtatcaacaatgagccagtacagccaccagcaacagagaccccaaaaacagttgtttaaatacgatcaaggtgtatttttctcccatgtaaaagcagtatacagatgaccagccttgggcggctccttccagctctcttctccaccacccctagggtgtgtccctcatcttcatggtcccaggtggttgccagaactccagccatcacatccgtctctcaagctacaggatggaggaaatgaaaaagggaacctcccctcccttttaaggatacctcctggaagtgctttgcaaacttctgctttcatctcacttcactggtcaaaatttcgtctcacatggctgtgcttagctgcaaaggaggctgggaaatttagcatttttagccaggtagcattgtgtccaccttaaaaaaaaaaaatcagtttctgttaatttgtgaaagttagggaaggcatggctgtttagtctctgccagatcacctctgtgtgcctccatttcctcttttggaagtgtgggtggtgatagttcattgtagaattatgtgggcttcagtgaaatcatacatgtaaagtgcttagcccaatgcctgacacagaccaggtgctaatcaaatgataggtactaatattgaggacctggtgccaagctgcgctcctgtcacgtgtgttatcgaagcctcatgacaacctggtgaggctgaaattatcctccccattttgtagatgagagcactgagtttcagagaaggtagctctgtgtcagaccacactcccatgaaaggggcataacggaggcacgaacctccttgtctgcaagatgccaaaattctttcccttaaccatggggcagtgcagccccctcatggagactgaactgctccccgagagcctggcgaatctgtagggctgagatgtgacgagacagaaactgaacttgattagccaacatacaagctgacccaggcccagcgctccctctgccggcccagcctcctgcaggagaaacccacccacccacctaaaaagggaacaaagccaggacaaaagagccctttaggcttccactgtatcgccacctacaaactggtagtcagaagattcaggtgtttgactcactgaatgaccctggaccagccccttttctctgaacacctccgtttctccatctgcaaaatggggaggatgttactgtgccctctctaccttctggggacgtttttaaaacagtgaggccagagtgttttggattccttgggaagcaaataaatgagataggcggctcttctctcagtgggtttctccagcctgccttaggacattctgataactggggtggggtgggcagaggagtcaggaaacctaaatgtcaggggactgggagtgagggctgcttcttggcatgggtgctcctagcgtacccctcccaccctgcgcgccctcccaccctgcgcgccctcccaccctgcgcgccccctcccaccctgcgccccctcccaccctgcgcaccccctcccaccctgcacgccccctcccaccctgcgccccctcccaccctgcacgtcccctcccaccctgcacgtcccctcccacccagcgcgccccctcccacccagcgcgcccccttccaccctgcgcgcctcctcacaccctgcgcgcacacacacagaacccagctgcaccatccctgcaccatcacggtgcagccctgggctgcgtgggcccaggtgagtgaggggctgggcccgcagcctctgctggtctcacagatcatgggtgatttatatttcccgcgtgggactttgaccttaatttcttccggcagcctggggctgtaaaattcatcagggacctgcgggcggagtgacggagatgtcaggcgagcaatcgtgtgggtatttaatctatcagatgtgtggcttgccatttagggagacaacatgagaatgtggaatcaatatggttcattagtgagccgcatgtgccaacccaatcagcacccgccagtgacaggcgtggggggtgtcctgccaggcaccaagtcaccttggagtgaggacatgtccctggagcataggcagtgaccagcctccacccaggtacctctctccaccttcccactagactgggggctgcctgacacctgcgtatcccacagggcaagggagaggagggagggtgtcagacttatgacttgtggtggggacactgggaagatgctgtcatggtaggaggcgtcgttaccagcccaggtttcgctgcacccccagggggttgactggactgtctttgcccccttctctcatctccttggctcataatgtcccacttaactgagcctcagacacggtgtctgtccccacatctctcaggcccttccccttttccttttctaccacatcatcccaactcgataactggccccagagagggcccaagtcctttctgactgtgagcttcttgctcccttgccccttccctgggtatcgcctgtatccgtttcctagggtgccaccagctgggcggcttaaaactacagaaatgtattctcctgcagctctggagtcagaaatctgaaatggaggggctggcagggctgtccttcctcctcaggctgagcggagaatcctgcctggcctttcccagcttctggaggctccaggcgttcagggcctgtggctgcagaactccagtctctgcatgcgtcttctctgtgcctttcctctggatgtctttatgaggacacttgtcattggatttatggcctgcccagataacccaggatggtctcctcaaaatcttccacataattattttctcaaagtccccttttccaaataaggtcacatttgtgggtcccagaggttgggacatggatctatattttgggaggtcaccattcaacccattacacacccttgaaggtgtcttaagtagtgacagggacatgttgataaggacgtgaagggctagccatggggacctgacagctcttccaatgccggctttcgtattttctctccgtgccccgacccgtctctgaaccacccaccccagactgcagcctccttgggcttctccctcagttgcctgccgggaatgccgtctcccctgcatctcaaggccccacctcttcttccagctgcagctctgctctgcctcctccaggaagccctgactgactcatggtccctggactcctctcggcccttgcctcccttgccactccctgtctacaccatccttggacttttaacctctggccttgctgggtcttttttcttgccccgtgtgggaactgtgacttcaggcatgttgcttaacctctctgagcctcgctttccttgtccataaaatgaaagtagtattagtacctgtctcatagagtgggagtgaagattaaatgtgtcaatacatgtgcatttcttagaataatgcctggaacccagtaaggattaaatcagtgagcattactactatttttgcagttatcgtcagccagtctctttgcctgtaaaatggaatgtgacccctgtgtctctggttattttaaagattaggaaattagccaagcatggtggtgggcacctgtaatcccagctactctggaggctaaggcatgagagttgcttgaacccaggaggcggaggttgcagtgaaccaagatcgtgccactgcacaccagcctcggcgacagagtgagactctgtctcaaaaaaaaaaaaaaaggtattacggactggttgcatgaagtgccttgcacagtgccaggtccacagatggcactcagcaagggaatgacctgtgcctctgaggggagcccaacacccctcctccaggcatctccccagcaagaggccccagagaccaccaggtggtgccaagcacttggcacaggcagacaccggccaccctgacagcctttgacataccgtaattgcttcccccactacgacttctttaagcccagagctgctggccagagcaatttgctccccatcaatttttatttccaggttttaaaataaaataaagggaaataaggaagaaggtttcggagcccaagaacaccaccatgtctgtgataacaaacaagccgagggcctcacacctcgagagcacccatcagcctccacccagggctgggcctggcttccctagagcatccctcctgcagggcttagcaccacttccgctccacctccacggacccgctgctggcacaggacaggcaggtgggagggctggcctgggaggaggctcagcagcagcatgtttgcagagggctggacaaagagagcttgtagaactggaagtggaaataataatactagctccacttagaaagcggtgcctgtgtgctgggcacagagctaaagcacctgtgtgcattaccttccttaatcctcacaataattccctgaggtgggtgctctcattacctccattttacagataggaaaactgaggctcagagcagatattactgtgattactccttctgttcttcctttgatctcctcccccttccccctcctcccttctctcccctcttccttctcctcctcccttgatcacttcctttctctccttctccctctcccctccccatcttcctttatctctcccccagcccccatcatcatctttctgatgtcctttcctccctagaagtccatctactcaggattaagatccttagcttgtctgctaaaaaaagatcctcataagtcatcagatatctcatttattctttcatctatttagctgatatttgttaagggcttcctgtgtgtcaggcactggatgggtgctggggatccctgggaaacaagacagactcagttcctgccctcataaagcttatattctagtggtggggggaagcccagtcaacattcacccaggtgctcttaccaaaaccatgactttctcccaccacacctatccgctggcaagaaccgtcagctccagattccaaacatacctggagtccagccacatccagctggacttccctgaccaccctggtccaagcccccactgcctcccactacccctgtgtgactgccttaactgcctcatctcggagcctctgttcctgccctggagttgtagtcagagtttgcttttacaaatgcaagtgctttgcaaatgtagatcagagtgtgcccactgaggtcgcagggaagagaaggagcagcaacccagagatctggggaagagtgacttagcagagggacctgtgggtgcaaagggtgtgaggctgcagccgcttggcctgttaggagcctagtgactgtctgagaggcaggagcagagggcagtgtgtgggcgaggtgaggaggctgcttgaggatggacgctggcacaaggacagccaggagcaggcactgcggagaaggcatatgcagcatgctggccaaccccagtgtcttacccaacgtcccacgtgcacgtagggcagaacccaggtcccacccccgagctcagtgggatttccatgactttgcacctggccacaaatccctttggaggctttttgtgcctggtcttgcactgcaccccccagggagaagcacatttctcactctcaaggagcagagagtccaacaggatagcaaagatgcgttaacacaagttccacctgcaactggttgttggaaagactgattgagagatattctgaggcttcctctgcagtcaatgccgtgatccattaggaatgtctaccattggcactggtgatggagtgctggctgtccagcccaagtccacaatggaacaaaagggagggaaggtccccttccctttctctgcaggcctcaccactagtcaggtccccatcctgtcctcactgctctcctgcttggtccctccacccaaccagtgctttgagcctccagcccagccccccttcccagtagcaccctcttgttctacggcctcccacatgctcagaaggcccagagcaggcacgagagccttttcctgtgatcacagccccccaatatctcccctccaccccaccgctcactccctggtaccattgccaacccaggacgtgtactctcttatccgtcacacaaaatgcaatgggagccattttccttcaagcacccatcatttccttttctcccaggtgcatggccacccccaggaatgcccataaaggcactcagagagcagcttcccaccacacttcccctttgcccatctaacacccaccatgctcccatccatccagccctggcttccttctcagattaaatcacttccttctgagatgagaggggaaaatcaaggctccaagcattttcctagaagtgtggggcagactggatggtatttgctggccattggcttctacctcacacgccagagagaagctggaacccttgtccacagcactatgggagggaaggaaaaagggcctcgggggccccagcaggcatgtggaggtcaccctggcctctgggctaccgggttcctgcagcagagtcctcctacctcctgccagccactccaaccccccagagcttacaagagtgcagttaatctcacacagtttaaggacttatacagaggggctcagtgaatgatgaatgaggaaagcattaccagcgaagcaccggggctccacagagctgtttaaaaatgcattctcccatgtaaatttctgctccatcaatccttatgacatgtcaaacattgctattgtttcctgaacaaattgtaccgcgtgcccttctctgcagatttgtgcatgagagcagaactcctcaccggcaccggccgcctgcctctgttgctgggacccagggctgctgcggaggcagctgggcctgccttgcttcagagcagaagccccgtgcggggcattcctgtgagtgtgcgtgcgtgacgggagtgtgggcgctggtgaggagtgattgagtgcgtgcctgccagcctgtggtctgcagggacagacacccaggtgtctagggagggggtgtggaggagaccacaggggctgagactgggctggagacaagtaggggtgctgcttgaggcagagaaagagagagagagagtgtgtgtgtgtgtgtgtgtgtgtgtgtgtgtgtgtgtgtgtgcgtgtgtgtgtgaggggtggaggtgtgggagacctctgagtagagtctacctgagccagacagggagagaaaaggaaagtttctaggagagtgtgcagggggtacaggatgcagaaagttgttcgcagctgcctgagatgcagagagaggaagagaaaggggttgtgtgtggtgcgtgcatgtgtttaaagaagtaggaagtatggagacacaggaagagagatgacacgaagacacacaaggcaggcaacctgtaaggtgggggaccctgttccagggcaaatcaatggaaaagggtgagagatgatgactgttaattgcaaagaaagcctgggtaagaaggggttctcaggaaggggacaaagagacaggagggcctgagcactgttggaatagcgggtccccagagagtgggcataagatgttgcgctgagcaccagagggccgggagctgggctggacatagagttttgaatgcacaagatgaagggggactacatgagagggtgccatgggaaaagccccaggtgggtcaggaagggcacctgcagccagccagactgccccatccttccaaggtggcctcaggttgggccacacagctccctccaatccaggccctaagccacctgcacagaccaagaccaagcctgggatggggtggagtccttctttaagggtctgtgggaagcacctgcttgggtatctgagggtctaggctcaggggctgcatcctgggaaaccacagccagagacccctgccaccacagccagagacccctgccaccacagccagagacccctgccacctttgctggcaggcatagctagagttgctgggagcccgctctttccaagcagaacgtagggagcagaagccaccatggcaagaagggcaaactgcctgtgggggcccatcggtcttcaacagggcgaggaggatgaccctagtaggagcaccctggatcccatggccgagctctcaagctcagactcagacttctcaggctcagacttcactcccccagccccaccaaagggaggagcaagggaggggaggtcttaagagcacacgccttggagttaaccatgttgattcatgttctagcgctgtgactgtttcaccctggccaagtcgattgatctctcttgagtctctgtcccctccttcatctataaagtggggatactatggtgctggtcctatagggctgttgggaagactgaatgaaataaagtgcaggaaatgcttggtaaatttggtggcacatagttaagtgctcaaaacgaaatgtcagaggggcaccctcttgccccttcccctcgctacagccaggagaaagactggcattgctgactcaggcctcaccagtccaagcatgtagcaattcccccaccacaggctcctccaatcaccttgtattaaccttggaatttttcacccccgtatgtatttatttttttcctttttgtcagcagaagaaaattacacttctgccggcattgtccatcacagaaataagcacttgcagatgcaattataaaggcccaaatgacagaattagttttgctggtaatgccagcattggggagaatcagaagaaacgccttataaatcaggcactagggagcagccagtctcggctgcaccctctcccccacatgctgactgtagggcagaggctgactgcaaggacagtgctgagcgctgagcggccattgatcttcacaggtcttcccctgatggttctgctgagggaggctgatggggaggcagaggcttcctgaggccttctccaggccttggtgccagcaggtgcccacctctctccaggagctacctggacttctaggtgcgcagccgatgactgtcccatagactggcatacacctgcccaaagacagcttctccaggatgaatctttctaagccagcagcctcagtgaccttcaagcccactttcagccttgttttcctcgtagttcttaccattgcctggaattacattacttagttatttctccccttggtgatctgtctccccattctgacttttttttttttttgtaagatggagtcgcattctgtcactaggctgaagtgcagtggcgccatctctgctcactgcaacctccacctcctgggttcaagcgattctccagcctcagcctcctgagtagcttggattacaggcatgtgccactatgtccggctaatttttgtatttttaatagagactgggtttcaccgtgttggccagaatggccttgatctcttgatctcaggtgatctgcctgccttggcctcccaaagtgctgggattacaagcatgagccaccgtgcctggcctccccattctgattttaagtggcagtccaggttgtcatgcttaggatgtgacttcactgttgggcacagcagccagcacattggaaaagctcaaaaaatattactaggccgggcaaggtggctcacgcctgtaatcccagctactcgggaggctgagacaggagaattgcttgaacccgggaggcggaggttgcagtgagccaagatcgcgccattgcactccagcctgggtgacagagcgagactccgtctcaaaaaaaaatttactaaatatgtgactgaacaagtgtctggtcactgttttcatgaaggtggcttcagaggtgtgccgggcatcttcagctgctcctgcacatcctctgtgcctgtctccttctgggcagggcaggggcaatagggagcctcggcaggggccagggtgttggaggtgctctataaaccccgcctcgccccatgcaatccagcaacccctctgtcgctgcttgctgcccaccatggtgtctgatggtggggtatcagccccacagaaggaaggttatgctggccctccgtggctggcagtggaaatcacacattctactaaattgggcagagaagttgagccctgtatgggggtactacatacgatgcaaaaatgagttagacaaacttctttccttcacagggaggaaagtggggcacacacagacagttttcaggaatggcagattctgccacatgttccaagagagggatgacgaggggctcccgggtcaagaccagtgaatggttagggactctaggagaggggcatttgggatgggcctggggggtggatcagagtttggaaggcagttacagaaggaaaggatagaggaaccagcaatgagagaacagtctggggtgtaccagggaagaggtagatacgagaacactaagcccaaccagactgtggacactagggtttgggtctgaaattaattcagcagatcatagggagccattgaaggattttgggcagagaaggacaataattttagctactggccttgacttcttgcccctgggcctcttatgagagccttcacaagtagtaaaatgcactagtgtgtacctctgagtgccagcctagagccagtggggagccattagatggcaacagagacacagaaacaccagagggaggagcctggagcacagttgaggtgctcacctggagccctgatttggcatcttttttttttttttttttttgacagggtctcactgtcacacaggctggagtgcagtggtgcaatctcggttcactgcaacctccgcttcccaggttcaagcaattctcctgcctcagcctcctgagtagctgggactacaggcaattgccaccatgcctggctaatttttctatttttaatagagatggggtttcaccatgttgaccagactggtcttgaactcctgacctcaagtgacccatccgcctcggcctcccaaaccaaagtgctgggattacaggtgtgagccaccatgcctggcctttggtttggcattttttaggtacaatatgaaaatggccagctgggccatccccttccccaatccctgtcaccatctggctggcctgtgagaccctggaagttaccctgcagggagacagagatgctcattcctagaacattgcagggaagggggtgtttgcagcaggaagaggaaattttgttctctatacataggcccttggcactcctcgaaccctccttcctaaaatgggccccaagggtcactgtctgtctgccactttatttgtctgttggactttcagttggtcaaccacaaacaagtcttgcttgggaggaggttgtttaaacggtgccatgacaagcagattggggctgggatagactcagtcgctgcccttgcctggatagggcaggatggcaggtgggcggtggagcagccacagtgggtcctctctggagtcgggtcagccagcatctggggggctgctctgggaatacgaagaccagctccactcaccagctgtgagatcttgagcaagtcacttaacaccactgcgcctctgtttcctcacttgcaaaagtgggtgggaggtaatgacagtacttacctgtggagttctggtcaaaattaaattcatacattaatatgtgtcatgagaacgtgggtgcagttgtagttataggtgacagagatagacgtacctttcttgagctgcctttatgtccaggccctatactaggccctgggcacatgtggaccccatgaccccacgctgccctctgggagccacatcctggttgggggagacgcacgttaaccttagcttcagtgcctcagtgtgatcagggctgggaatactgagtgtgcgcagggaggagccctaactttgccttgggggtcagggagggcagaagggtgtgagctaggcaggagagggaggggcgctgttcaagcggagggggcagagccaggtcctgggagctacacgtggtccagtctgggtcagagatgaggctagacattcagggccgacaatgtgtgtaggaggggaggggttttccttcaagcacagatctaccgcctcctcccaggcccagggcccctgacaggccctgctgcagcccggcactggccccgcacccatcaaggcccaaggtcagtgctgctgccctcaccctggcagaggcaaggagcagcttttcatctagttcggcttcctacacttgaaaaatgaagctctccctctcctcctcacccaggcatacatatttcacatggtcattaggcggtggcactgaaggactcacaaatcttccctgatcagcatccgcagcctgggcaggcagtgagaggccctggggacaagggtcactgtgggaaccatggctgtgcccagtccaacgtgggcaggggaggccaagccttgcaggggttgggggtgtgaagccagcttctgctctaagacagtccagtcctgtctcctggcactcatcacctaatttccctgggcctcagctgctccaggccccagggtgaaggggatgggatgcaggcacctcacatatccttcccgtcctgacagtccagagcaattttgtggggcacccagatctgaagggctcatccccagggctcagatgtgaccttctccaggggcagcacaccccccatgacccaggcccctcccttcctgcacaccccactttctgcttctcagctgctctcctccacctcctagcctgctgtctctcctctacttcccttttccttttctttctgtcatttgcttcacttctgtcctctttcttctgagtcctgccttctttgtcttcaccgctgtctctctgccccttccctattttctctgcaccacccccttcttattcatttttcaggcatttatgaagcatctactgcatgccaggcaccgtctgtgctgtgcagtgagccccacaggtgcctgccctgccctcgtccttccccaaacccttttcctttgacaaaggcaaatgatgggggccaaggaggtatggtttggtcacacagtgacctggaactgaggcctccacaccacagtgacccctcgccaaggggttcaatgacatggcagtcagatcttcccaagaccaagctgcagttgtaacagtccaacaagaccatgcattgatgaccatgattgtcagtggaacctgggggtgggaaggactctgggattcctcctgctccccttctcctccgtccctgtaaaatgaggatgaatctggggttactttgggcagtgtggtctcctctcgcctggaataaccaggctcccttccttctgagaacaagcgcccctcttggctcagaggcaatcactgatggagggcaagggcatggctaggtggcacaggattcaaacccagcacagttctttctctagctgtgaagccttgagtgaacgatgtactgtctcgatgcctcagtttccccatctgtaaattggaggtggtgctaataatagtacctacctcacagggctgttgtgagggtgaaggggttgtaggtagaaggcgtgcaggagccagcagtcgctgctgccgttgtgaggaatggcacaggcagtgggagaggccccgtccaggagccagtcctgggttggagggtggtgacatggctcagtgccttcctttcacttgttcagcatgcaccccctgagaacctgggatgagctctgagcctggctggggtggtggcggggacagaggtctgcaccgtctataggagcataagctgtggggatattgaaaggaaatccaacacaagaggcagccctatacaagctggcagcccagagcccccagaaatggcatctttctgtatagccaagttttctggataactaagatcttaatcctttgggtataaactttttttcatttcattcatttgggatagaaatatatttttcacttatctgccttcctgaactgaatgtactaaacacaaattagcttttccttgaaaattcaggcttatcataaagaacatagaatttactagatttaatagactccaggaactttaaaaggaacctcaaaaatattgagcacaaagggatcaaaatacatttttagccatgagggctttatccacttacaatcttatagagataccttaaatataaaacagatgcaagtggaccccaaagtcagtctgaggcctttccctacgggcatctggtggcaggcagcagtttgcccagctctggggcagtggtctgggaagagaacagaggtcacatctagacctctgcatggattatttactgtctcgaagtactgcatggattatgtacaacctcttcaccctcacaacagccctgtgaggtaggtactattattagcaccacctccaatttacagatggggaaactgaggcatcaagacagtacataatccttgcatggattatgtgtttcataagtaactgttgagtgaatgaacgatgtcatttagcctgcactgtggattagaaccatgccagggacaatatggaagccaatattccaagccacaaaagccaaacccccattaaaactttaggtcaggggagatggaggagggcctccctgggatggccacacctggtgtgtggaggaacacctggtggcggtggagaggccagtttctgtcccactctgcttctgacccgctcctaacccagactggcagcaggctttcaccaggcctcactggggtctgggcctcagaaaattcaccctgggccaaaggagacgtgcgagaggaacatgggtttcctgtggacctgaagcctcagctgggcctggcagtaatgacttcttgttctcgctgttgcaggcaactgacaatgatgcaggcacctttggggaagtcagctacttcttcagtgatgaccctgacaggtgagactctgcccacagcccctcaggcccctccgcagtggtccttggccctccccagactcatgagatctgggaacttttcagtgcccagggagggaggtgctgggtcctgtggctagagcactggactggaagttggaacccatgggcactgtggctggtttgactctgattgtggcacagccttggtcaagtctcctcaactctctggggcacagcttatctgaccctcaaaagatagcctttagctttgggaatggatccattgtgtctctgagaggctttgaagtactagcgacagcacaccgccaccaccgccagccgcagttactacatgtcaggctcatgatggccaagggcttcacaggcattgtcttgtgtcatcctctcagtgaaatgacagaagaactcagtgctaggcacttttatcatccccactttacagatgaggaaagtgcaactctgagaggctaagtcacttgtccaaagtcacacagctataagtgccgtggtcaggcttctgcatgtgaccttcaccactaggctacacagcctgccccaagagggctctcaacatgcagcaacttgtaggtgggttactcacctccctgcctaacacatgccagccttgccccatcacccttcatggtaaattggtccgggcttgattttgggccatctctttcccttgtcttcagttaatccaagccaaaggcagccctctaacttttttttttttttttttttttgaaacagagtctcactctgttgcccaggctgtagtgcaatggtgcaatctcagctcaaactgcaacctccacctcctaggttcaagcaattttcctgcctcagcctcctgagtagctgggattacaggcacccaccagcacgcctggctaatttttgtatttttagtagagatggggtttcaccatgttggccaggctggtctcaaactcctgacctcaggtgatccacccacctcagcctcccaagtgctgggattacaggcatgagccactgcacccggccccctctcacttttaacatgctcgaaggccacgtgtctgatgcactgggaagcccggtggagtgagtgaggcggtgggtgtcagcttgaatgactggccccagctatccgtgggaaggatcaagaaaagatggggaaggagctggatgccatggctcatgcctgtaatctcagcactttgggaggctgaggagggtggatcacctgaggtcaggagttcaagaccagcctggccaacatggtgaaaccccatctctactaaaaatacaaaaattagccgggcgtggtggcaggcgcctgtagtcccagctacttgggaggctgaggcaggagactggtatgaacctgggaggcagaggttgcaatgagctgagattgtgccactgcactccagcctgggtgacacagtgaaaccctttctcaaaaaagaagagacagggagattgttaggggcatctgtccattctctgtcactcagtgatgggggtctgaaatgggaggaagtcaccagcatggctgaatgcacagggagccctttccccagggaacccgtgttcacgtggccttatcctggtcatcttggatggtctcacctcttcccatcttctgggcctgagactttcctcactccaagccagaaccttccaggcttggtggctggcagctgtggtcagagcacacagatgtcaactgacagctcagatgaggctcctgaggggacatttagatgaggtagttggaggcattgtcttgccggacctttctgctacctgggagatgtctaccagcctcccactcaaggctcatttcctcaaagtcaaggggcagctcccaaaagcggaccaaccaccctgcccttcaccagctgctttctgcccattcctagcattctggtgcaaaacgatctgggatggcacacgtttttaccctcacagttctccagcatctaaatatctgcagtaggtaggaactcctgttcatagcaggagggttgttctgcctgggtttcctccttgcttaaatcaggcaactcctcctgcccacctcgtgtgatcctggtccccgccacccacccaccccctttagaaatagcagctcttctcagggcaagtgaaagggaaggcagatttcagacttcatttgtttctgtttgtcactctgggcaaggacaggctgggaaatgccggccccatcaacaagcctgttttaaaccacggtgttccttctctccatcctctcggcctggcacaggttctcgctggacaaggacacgggactcatcatgctgattgccaggctggactatgagctcatccagcgcttcaccctgacgatcattgcccgggacgggggcggcgaggagaccacaggccgggtcaggatcaatgtgttggatgtcaacgacaacgtgcccaccttccagaaggatgcctacgtgggtgctctgcgggagaacgagccttctgtcacacagctggtgcggctccgggtaaggtgccagggagccctgcactcctgccatttatcttagccttctccctgtacttgcttgcttgcttcttttttgtttttgtttttatgagacaggtctcactctttcacccaggctggagtgcagtggtacaatcagagttcattgcggccccaaactcctgggctcaagcaatcctcctgtctctgcctccttagcagctgggactacaggcttgagccaccgtgcctagcctgtgctttcttcttgaccaaccccctagggaacccactgcaagaggggctgaccttctatccgcaaagaatactgcacagatttcagagtcaaattcttggtctgtgttgggccttctctgagcaacgcctcatatccttggtaccaagtggggctttatacacagtgtctgtctcagcttaaatattaggtcagaatttagcaaaagatcccaccccccgacccatccactgccatctcccttagcaagggcattgagtggggagcagttccctgtgtcaggacctcctccaagccctttaacgactgactagaatcaggaagtgctgcagctggaaggagccacagagaccatggagtgcaaccccattttacagaaggggaacccagaggggaggaggcttgcccacgaagacatagtcgggtagcagagccaggtctagtcccggaatgctattctccaagtgcttcctgcagcaagtcccccactaggcttcagtgacctttaaccagagacttttaaatgtccccccttccccatgctgcctaccccaagggatgggacccagagcctccatttggaacttgtttctgaagcaggtagggatgaaggcaaggctggaagggtgagcacaggggataccaagaagaacagaccatgtgcccgcccagcctggccacggccccccgtacaaccctgtcctgccctgccctccctgctcagctccaggtgtacccggagtggtggggaccactggaggctctagagtgagggacaacctggaaagaagcttattaattcagctcccagagaagacagtcaaggggtagagggatccctggccccactccaggtgccttctttcctccttgctttcatgcaacatgcatggattagacacccactgtggccaaatactgtgttggcctgtaggtatgcagcagcaatcaagaaacaaggttcctgctcacatgaagctgacggtctaagtgagggaggcagaaattagataagaaattaccactgggtgtaaggggaccaatggggtatgcaaccctagggccctaaccggctccgggagtcagggagggcatctgcaggtgggggtgttccagctggggttgggggtgggaggtaattgtgtctcagcctctgggaaggcccggcctctgcattattcctgcgcctcccacctgccctctagattccccaggctgcctccacacccagcacatggaggggagcagggcgtctgctgggagccagagtgcggcctccagttgaagcacaaggggtgcctcctggcgtcctgggccaggacaagacccagggctggatcacccaaaaaaggagctgtgaacagggccagtcttccccaccctcccagctgcccaccctcttctggcccccagcctcctgcaggctcacggcccttgtctgccctcttcctttcaggcaacagatgaagactcccctcccaacaaccagatcacctacagcattgtcagtgcatctgcctttggcagctacttcgacatcagcctgtacgagggctatggaggtaggtgtggggcagaactcggggcccagccaggaggagggctggggggctctctgcactcacacctcccttgtggggatgaggcgggcactccttgtctccctgacactctgggctactcaggaagctgcccggagcacctggggtggagcaggatgtggcctgagtcgcccttccgtagggtcaacatctgtgtccctcatcagcaggatctctctctggttcttaggccatggccagccctgcaatcgagccagaagtgtgatgttaacagaatctctggggttctctgtttcttaccaaggctgcaggcaggtccgtgggatggaagctctttagccaagactccctactttttgggcggccgtgtgggaccaggcactctgcaccatgccctgctgcctgctgtgggtccccatccctagagccctggtaggaaatagcagcaacctcaagctccaagatcccaagagagactattttgtttttcagataaagcagctaaggcccagagacagggagcaacttgcctgagctcaccctgcaaagctgctgagcttggcaccaagtccccgtgtggtctggcccttggttgccttgcgagcctcagctctcagcagcccttgccccaccagagtccagcctctttgaacactttgacactgtctccccttactggtgttcacccccatgtctttgcagagtttgttccttctgccaggaaagcccttcctccttgccccttggtcctgcctccctttggctgtccagtgtgtagcccctggctagctttaagggctcatttaacacctcctcctttgggaagcttctctgattcctggagcctgggttaggtgcccccagggcagaaggaatcgatgtgcgttgagtgactctgggtccagtggtcattcctcccactaccccacagttagttcagttcagagaaatgccactgtagaaattgcagttctgaccagcgcggtggctcacgtctgtaatcccagcactttgggaggccgagaccggcggatcaattgaggtcaggagtttgagaccagcctggccaacatggtgaaaccctgtctctactaaaaatacaaaaattggccaggcgtggtggtgtgcacctgtaatcccagatatcggaaggctgaggcaggnnnnnnnnnnnnnnnnnnnnnnnnnnnnnnnnnnnnnnnnnnnnnnnnnnnnnnnnnnnnnnnnnnnnnnnnnnnnnnnnnnnnnnnnnnnnnnnnnnnnnnnnnnnnnnnnnnnnnnnnnnnnnnnnnnnnnnnnnnnnnnnnnnnnnnnnnnnnnngtcacccaggctggcaagagtggtccaaggtggctcgatctcggtcattgcaacctccgccttggggttcatacaattctccagcctcagcctcccgagtagctgggattacagtcgtgccaccacgcccagctaatttttgtatttctagtagagatggggttttgctaatgttggccaggctggtcttgaactcctgacctcaagccatcctcctgcctcagcctcccaaagtgctgggattacaggtgtgagccactgtgcctggcccatccctctttcaaaaacttaaaagttccatgcttctgcctgccccatacctcaccctcctctcaactagaagaatcccccttagattttatattactaaagcaataatcttgtttcccttttccaaatagaaagttgtaatttaatattgttgtaatgccttctaagacctcccatgccccccactcccaagccaatataccttccctccccagttgagaatcaatggcttagcacaaacaagtactaatggagagatttcagtcgtgtgcagtggtagggatatttcagggcacaggcatctatcttagctccctgcaaatcctgcctctcagcctgggtctgcctttggccttagggttcttcgcccacctctaaacagagttctgttgaaggtaaggtctgcagcacctaaccccgagtacctccccatggggtctaaacagtgcccagagtaggtgactggatgggtatgaagagcccatagcataaagtggggaggaaatggagggaagagaagagagagacgccaggggcagtggctcacgcctgtaatcctagcacttggggaggccgaggcgggaggattgcttgaagcagaagttcgagaccagcctaggcaacacagccaggctctgcttctacaaagaaatttttttaaatgaaaataaataaaggagaagggagggaagaagattagagaaatagggctagagaccgaggagggtcctgccttctgcaccccactgcctggtcctccctggcatccccagtgctgggcaacttctggggaactctgtgcttacctggagagaggagtagtgacagggaggcctggagggcccaaggcatgaccctgtccttcgagcagcttccagactgacggggaaaatccataaagtgccagatgagtgagtgagacagacagacagacagacagacaagcagacaggagcacctaccaagaaagagcctgggttctggattcagccaaacctaggctcatctccccactctgttgagagctgtgtgaccttgggcaagttactgaacatctctgagcttggtttcttcatctgtaaaagtggggcttacattaccaccagctatcacctggtgggcgcagcacagggtctggcacatttcaggcagtcaggaaacctcagtcgagatgttgaggctccaggtgttcagaaaacaagccagagctggcccgggccatgccagccataacttctctgcccaaaggggacccctgtctggacgggcatctcaagtctgcttacagagggatctggcctgttcctgtcattgcagtgatcagcgtcagtcgccccctggattatgaacagatatccaatgggctgatttatctgacggtcatggccatggatgctggcaacccccctctcaacagcaccgtccctgtcaccatcgaggtgtttgtaagtacccagggccactggccttgccctgctagtgtaagggatggtgagtgcttcctgtgaacccagtactgtaggactgtggcccccacctccttggctgtccctgcaccttggggagtttacccagccatctgtcccaaagcctgcccttagcaagtctctccactgctgcaacaacttcactgcctccccgcttggccagggaaggcccagggccctggtactcaggaagagacacattgtctgctctgacttcactgggggccccaggacaccctcggtggggaacaggagctgggagtcaagtgaggaggaaatgtcgtgggcttccttcatttatggctgcattctgtgaagaacagaagaatgaccagaaggtcatcttctcccttctctctctctctctctctatcctgctcttcctttttttcttcccttttccactcctctgaagatctaaagcggtctgaaaccaagccacagtttctctgacatgaatatcaagcacaccttagtattttctgtgtctgaaattatcagttgctgaatccatctccacgctggttcatttgcccaatgccacacggggatgcagagagtggtatgacagcgggaccaacgggcccctccgcatggagacctccccacacacacctgtgcatgcaccgcctgccccctccccatctgtgggagacagcgaacgcgtgttgatggaagagttagtgcattatcggctccgggaggattagatcaggttgtcaggttcagagatgcgctgtgatttcacataagctcaggaaaatctcaccctggagcagacatgctggagagccttcctgtcacagccagcttcaccagcagcctctgccactgcccacgcccggccttaacaagctctgtcttctcaacccgaggctgaagctccagggccagcttccaagcggaaaggccattgtctgggccagggacccaatttgcttgctgaataggatgcagctggaagtgatgggaaagtcaaagtgatgcctgatgggagagccttccagttgggcatgtgggagcagaatttagggggggccaggaggatgaggctatacagaaccaggatagcaaagggaagggcagagagttggggcctggcttctggagtccttgtgcctggcacctcagacttcagggagtgttgggggaaggaggacagggaccaggagatcttcagaaaccttaaaactgacctgggctgggcgcggtaatcccagcaccctgggaggctgaggcaggtggatcacgaggtcaggagcttgagactagcctgaccaacgtggtgaaactccatcgctactaaaaatacaaaaattagccaggcatcgtggcaggtgcctgtaatcccagctacttgggaggctgaggcaggagaatcgtttgaactcaggaggtggaggttgcagtgagccgagatcgcaccattgcacttcagcctgggcaacaaaagcaaaactccatctcaaaaaacaaacaaacaaacaaacaacaacaaaaaaaaaacggcctgactcgaacctgtaacctcccacctagaaacaccgagggtagggaacgataatgcattccctggcagtcatgaccatggactggcactttaccccatggcccgaccctgaccacatcacctaaacctggccttagtttcccagacttgaccacagcccccaagcctcctctaatcgtagctgcactcacaaccctgaccaacccacccatcgctttcaaccagccaggatgctgctctgcacaaggaggcagtgaattctgtgctgggcccccagtaggacaggaaggtgaatgtgcagcctgctccaccccccctggagacaccaagtggaaagaggggtgtggctgtggaaagaggggtgtggctgtggaggcacatgggtttgaaacctggctctgctgccctcttgctgtgtgacctgggtctctgaaacaacttcctcatctgcaaaatggtggtaatcgtgatacctgcctcatgatatttttgtgaggctgaaatgggattgtgcaggtggcacctggcacctggaatgtcttatcgctgtaatgacagccatgcatagcagcagccgcacccatgccccagcctgtcgctagtgcaaatgggagttcccatgagtgggctgaggcagagagggagccattcaggctttggggagtggatgctggagagggtaagagtaagggaggtctagggaaataagttaagtgttctggctagcccggggctagacaggcctaagtagcgaaatggaaactaaaatgtgctgagctccaggaacgtgccaagtcctttcacatgacccagcccctttcagtcccactttacagatggggaggctgaggctcagggaggacccaggctcaccagtgcctttcttccttactggcagagctgggacttgaaccctgacctgaatgactcccatgttgacatgctttccaccacagccacaggcctggaaccttggtcatccctatccacatatgactgagaccagtgcttctcaaacttccctgggccctggaattctctggggatttcattaaaaggcagattcgtatttagtgggtctgaggcagggctgggattctgtgtgtcctcccacacagcttgcaggtgatgtggatgcttctggtcaggggacaacactttgaggagcaaggccttcagagacccaccctcatgagattttgaaacctgagctctgctccaaaccccagacctgtcccaacctgtagctcagctaaggcagggactggagcatctcgttgtgcctcagcccccctaaaaggggccggagcatgcagagagatgaaggtgaagggactgaactcactttttgtccctgcaaataaaagtgtgaccagcagcctccctccctgggaccacagaggaggtgggtgggggtaagaacccacctcactttgcacttgggaagccagggtgtgccctggcatgaaaccacagtggcctagtagaagaggccccattttcaaattccctcaaagccatcccagggacaagcaggggccctgcacttcccttccgagtacaccctggccctggggcagccggagagtctggcaacaaagacaggtgccaccttggctatgagtgaacattgtctctcaagcagggcctctggatggcacagtcacttgtgtctgaggaccacacttgaaaaggtcaccaccttcagggtgattttgcacgtggctggtttttaagtagctgtcactcggctaagcggcctcctccctccaccaaaaggattttctcccaattggaatttaaaaacccagcagcaatgaagttgttgatggcagcatttcctgcacaggttgggggtggggagaggcagatggaaaccacagggctccaggaggaggaggggccggaggggccaggtgattctttttcatccactgcttgttggtttttaataaagaagtcaaactcggtttgtagatttcccattaggggacaataagcttttgtagagcgagccgctgatttagaactaatagcgaatgcagcgccaagatccggggaaatatcaccgctaataagtttctgcctcatgctctgtcactgacattctccacaccgtttcgtgcagccaagcagaagcttaaatgtataagtatatggggcactcgcacccgcaccagggacaggggagatgcccaggcacgcagctggggcattggacatcaggggaatcctgagactgctgggtatctggggagaggggcaggtcagcgtgacccagggtgccatccagagccaaggggcagattggagaaagagaggatcactcctttctgggcacccacaatcttagcaggctgagattctctgatgtcccaaggggggtgcagccagatagcatgcccccatctttcatggctgctctgtcagcagcgactccagcaaagggggcttcatacaggatcctttccccctaagagctctcagttccatgagaagccaggccttctcatggaactcctatttgcactagcaaacgaacaggaactgccaaagactgtaacataaagactgcccaacggtgccgggactcagcctgactcctgagctctgcactggactcttgggaaaggggagaaggtcatgagccaagtgggctggggaggcttcctccaagagggaagcagggaggaattcttgttgggagattgcaagagtggttggtgaggataagagtattaaagggcaggaaagtctcttctaattgaagaggaagggccgcggtgtgaaggagttggggggtgcgtagcaggaggcagaagttgcccaccctaccctgccaggctcagcccctcagccaagcaccgtgctctggctattggcaaaggctgggctggaagagatattgctttagaactgacaggggtggggctctaggccaggggtggcccaggggctggaagagccgttgttctcatgtgcaaggaggaatctagctgtacctgccagcagccagcccagggccagagtttgggctctgggaaccacctgaccctgagctgccatagcatacttcagtatctttgaggagagtcctagaagcttttgtcatcatcctggtggacctacgcaggggtccaagtgggcatccccagcatgggagctgggggtgtgagtgctggagtgagcctggggctcagctggaggaccagcggggagcctggggagctggcagctgtcggcagtcccagctgctgccggcacactccctcttcctgggcctccccatcccttcctgaggcctgcatgtttccccaaggctggtcctacctcctagagctgtagcctgccagagggttacctgactccctgctgacacctcacctggctctggttatacggagaggccaaagctctttagggccagccagacctagcctgactccttggtgcccaccttagacatctggccagcccacctgcctccctgcagcctcctgcaacctgtctgtgttccttccaggatgagaatgacaaccctcccaccttcagcaagcccgcctacttcgtctccgtggtggagaacatcatggcaggtacaggctcaggtcggggggtggggggcacatggaggtaggcagccagcagtcacggcacccaggatgtgcagaccccggctctgcacacaaattgtgggaggtccatggccttctctttccccggccaagctccttgacaaatcggggagcctttggaaacatctagttacctgccagctaacagctagttccagagcacctgctatgtgcaggtgctgtgctgggcacttggttcctgctctcctctaactatagtctagtggggaaagaataatgatccatgattaattaagcaatcttgattaaacagtctcaagtatacagagggctctgagactatagcactgtgaggcaggtcccaggggccatgatttcagaggggtggccttacagcggggcatgtgttcctatgtgaggatgcgattgagaggctaatctctgggccaggctcaggttgcagggctcagtttgcagacccagcaccaccagctccacactcaggttccaggggatctgttctgcccttgaggcaggctggcagcttcgcccttaccctcagagcaaatgatcctagcaaagaaaacgcccatatcaggaactgctgcagtggctgaaggagacaggaaggctggaatcagggacagtagagtcatggatggtggagtcatggatagtggagtcagggacattggagttagagatgctggagccagggatggtagagccagggatggtggaataaggatggtggagccaggggtcgtggagccagggatggtggagccaggggtggtggagtcaggggtggtggaaccagggatggtggagtcagggatggtggagccaggggttgtggagtcaggggtggtggagtcaggggtggtggagccaggggtggtggacccaggggtggtggagtcagggatggtggagtcaggggtggtggagtcaggggtggtggagccagggttggtggagtcagggatggtggagtcagtatggtggagtcagaactggtctttcctggcaccacgaggccttgtaaagagaacctctgggtaccactctggcacctgacaatgagctgggtgggtgctgggctgcacccagcctaccctgcctgtcctagtcaggcatcccctggagaatgtcactgctaaagagctgcctccagcactacacccccatccctggggactgtgtcaaggagaagccttcactatggcacttaattctcttcaggggtatgttatggctcatgtgcctgtcctcctgctcaaggcaggcctgagggtcatatttgaggccccagggccacagggccacaatggcctgcctggccccttgcccctcgggactgctgattcatccgctggatggtcaccaccagccctgcagcccagtggagctccctgtggggctcagcctgtggcctcaatgctttatccctcaggatcccagcagcaaactcacaagttagagggtatctttagacccggtcccaggggaagaagtgatgctcaggcaggtgaaggcgcctgccgaggccctgaggggtccagtctgggtgtgaagattccaggaacctgtgcaccggacctcctcgccactgggccagagctggcagttgggtggcaggaggggctggagccagaagccttggtgggcacagcttcaggacaagctgttctcagggtctggacagggtggctggaaaagctgataccttgagtcaggatttcacggaactggaaataaaagtgaaggccttaactgaacattaaagagaaaataaaaacccttataaattcccctgaacgagataaaactagactgaaattgaatacagtaaatgtagaataatttaatatggaatttcatgtcttttgactccaagtgacagttggccaatctgagtgtatttaatatagtggccagccaagcaggggccagggagacaggaagacatcagagggcccagtccatccctaagcctctcatgagccttgtccccacccagcccagcgatctcagctccaagagcaacgattgagccgctcttgtcccagggatgtcgcaacaggcaggcctcccacctccctgagagctggtcactgggagggtcccacgtcctcctcttgggccagcgcaaatgctgctcccagggctggggccttgaagccaggggcccagggtgagcagcaccccctgcccccacctttttccccctgaaggagccacggtgctgttcctgaatgccacagacctggaccgctcccgggagtacggccaggagtccatcatctactccttggaaggctccacccagtttcggatcaatgcccgctcaggtgagcccccccaccccaagtaccctggtcctccacaccctgaggctgactgtccatacccggccccaggaccagcctctgggcccaggtccccttcctttcagttttgagcagaccagctttgagcaccagtgtaatccatgaaatattaatttgagtgtgattactgatcttacccaaaaaatcacaacgtgaattgacccagtgaaggacgtctttcaagggtgaagagttgtattatgttttaaatgtgctccatcttacaaagagctggttaacacacccctcttcaggaacacctttattaaagcctcagggtccccctccctcagctgctgacctcattcttaaagcctggctcctcttcttacacggatgtgtgcctcagtttccccacctgtaaaatgaggaagatcatattagggctgttgtgtggattaaatgatacataatagggagcaactttgattagtccctggcacacgaaaagtgctaaaaaaaattaccatcattattctcttttgtttattcacctgtgagccccctgcccccagctcccagctcagcccatgtaactctcttctttcttcttcgtctctccatgtacattcctcagttttctctcttccttgaagctgggagaaaaagtgggcagaaagaagcagcaagagatccaggctttcagccagacctggggaagaattgggacttctgtacattcattcatatgttcatttattcatatgttcattcagaaattggggtgggggctgctctgagccaggtgctggggtacaggaaggaataagacatggctctgacctcatgaggttgctagtcagctcagtgggcatgcaaggcaccccacttccaatacgcatttctgtatgagttaaaggaactgtcgatgctaaacagctacaccctatctcagtggcttgagacaatacaaattcaaattcatatagtcaacccatgtagatgttgagtgacagccttccacatgatgattctgggacccaggccccttccatgttgtggctccaaggtcactgcagaagggaaaagagagcatgggttgtcagagcactaggaggaggttatgggccaggccctgcctggcagtcacatccaagtaataattctcccctgggaagggagcaggaatctttggtggacactggccatccctgctgcaggtggtcagtggccagcagggcatcagctcttcctgctatccatccctccacgttggaagtcagccttcaatcccttttcctggaggcttggggagcagatggccggtgctgatgggtacgaagactgaggaaggggacccagggccactgtgagcctccttttctatctctgagaaagtgagggccctcctcccagctctcaggagcttcccccacagtgagccctcattcccaggggtctcagagtcatgtcatgaatggatatgaaccacatgcccagcactgttcccagggctctgagcagcagcagcatctcattctgccctcctcacctgtgaggcaggtactagccttatccccattttccagatgaggaagctgagccactggggaggttaagtaacctgactgaggactcgcagagcacgaacttctgactccagaatccaaacattaaaggcgccattatatgagtagctccctggccttttagccacccccgcccttgcctccccagtcggggctccagctccacctggggcctttaatgacacagacattttcttgctgccttaacacgactttgtctccaaaggtgtaagtgttttcctctgagttcctcggtcaaattagccagggctgctccacagaggtggccttaattggatctaatttcctagacaggagaggccatctatcatgccgacaagttcacgtttaaaactttttagagattaatttcttcctcgccctgccaattacttgacaccaccctggcagggagtgtggcttgttgggcagacctttgtgagtcttccattcctggcctcagcacctaagctgccctgtcacccacccccagctccctgctcagcccctgcacagaccagagggcaagccagtgtgccacagagggaactgtcagggtagaagcagtcctaaaagcaatctggtccagctgccttgttttatggtggaaagaaccaagcacagagaagttaagcgacttggcccaggtcacacagctcaggcaatggggataaaaagatggatagcacacaggccctgcccgtggagaatgctcacagtccattggaagaaaacagtcattttctgagtgttgggagcctcacctagaattactgtagcctcacaacggctctgcatggaagtcacactaatctccattttatagatgagaaaactgaagcttcaaagaattaaaattctccaaggccaagcgtctgggaagggccataatcagaattcaaatccacatctcacatcttcaccacgtgggtgctctcccatggctgatgcaagatagtaaatggcctggctgctgtgattgctgaagtctgctgggactggctcaccctgctcccaagagctagcgaggcactcaattgtgaactccatattcaataccaccaagttggtagcttaaaatgggccctggtggggctatttacaccaaggaaattggcaaatgcctttttttttttttattttggggagccagttgtcaaacatttaccagcacgccactatcagggtgatgtttgcatttcagttacaccaaaatacaaagaaagaccaaatacaggcgaacaagaaatgttgtttaattgttcagatttagcacactaaaacaactcgaggcaatgtaattatgctcttcacaatgtaattaggaaattattttataactattaattatcaatgcacgataaggttggataggttgaactgtccagtaatgagtcacaagttagacgcatgtgaacacccggtgtttttatttcctgtcattgtatttctgtgactgtataaataaacagtgcctggcactgttctaagatttccatgatcttaattaaattaaccccacaatagccctatgaggtagttcctattatggttccctttggaccctatgaggaaactgaggcacagaggattgaagtaactagctccaggtgagaaagccagtaagataatgtcaaaagtctaaacaagaggtgatctgtgactgagcttaaggcctaatggccctcctgccctgttctccagcccctaaccccgagaatcagcctagattttcccacatctgcaaatatttcctcctcatggggttatgttgcccagccctggggaaccagctcccaaggcacaggagctctcccgtctcccactgtgagcaccagctcaggaacacatccaggccgccagatcatggtagcttgctaacatttctcgtgcaagttctcaccctctctccttccctcgctctctctcttcttccctccctctctccctggcccacccaaaccctctcacgcacccacttctctctctggcaggggaaatcaccaccacgtctctgcttgaccgagagaccaagtctgaatacatcctcatcgttcgcgcagtggacgggggtgtgggccacaaccagaaaactggcatcgccaccgtgagtgcgctcccctcccgtgccccagctccccctcgccggccaggctgctgctccctgcttgtacctctggacccccgtgtcctgagccagtgtgaggctttgtgagaatgagcaagggggcgaaaatgaactcatcagcagcagaggtcagcccccggggccaccacagctgtggggaagaaaggcatcaccaccaggaatgtaggggcacttgggaggagcaaaatgaaatacttcctctcctgcccctaaaaatccaggagggcaggtggcagaaggcatgagccccataggcccctccttgccttggtgcctgtcaacaaagcagaagcaggcattcctgcgaggaagagcagctcagagcaggaagcagggccctggagggtccctgggggcttgttctcccccatctaatgtgccccagcgagtagaaagctagaggaacgaaacgtgggggcctcgagtgagctctcggctgcagaagtgaaaggggaagtgagaagccctctgtgggagaggaagcgggaggaccagctgacagtcactccagccacctcccctctttgttccccattcggtttctttggctcaccctcaaaactgtggccctcacccagtctgcagcagccaccccatccttacccagccagagaggctggagacggtatcgcgtggccagggatttgatggaaaaatccccagtgccctactctgtcaagggaggctcctactaataggaatcagagccctataaataatgtacctggtggcaggtgagcagggaaattgcttggcttgtagctgagacggggaggctcaagggattctattagatcccccaccctgtcagtcaccttcagccaagactggaggcagggatgggggaagccccaggtcacagcaaggatttcaggggttatcacatccattccactgcctcctgatgggacaacactggaactctctctcctgaagcggcctggctccttcctgccctcgaaagcccaggctctgcccaaggctcccaaggttggtggagctggcagaattaatgcgaagattgcccgtgggcatctgagcacttttcccctggcaggccctgccctggcccatctcagctgggtgtgtctcccagcgccccttatggcttcacaggtaaacatcaccctcctggacatcaatgacaaccaccccacgtggaaggacgcaccctactacatcaacctggtggagatgacccctccagactctgatgtgaccacggtaggtggtggcagagcagcagaactgccaggcggcccttcccaggggtctgtgcccctcccactgcgattccagggggccttcccctatggggctggtggactctgtgtccctctgagctggctcttgcaatagagttctagcggttctcctgcatggtgaaaggcagtcagaggtcaagggaaagccctcatccggcctccagtgtcagtaggcctcaggctttgtcaaagggagcttcaggcagcccagggacagtggcaggggagctctggccggttccgcttgtgagccacacgtgcccttagagcccaggactctggccaccccctctggagagctcccacccctacactgcacaagccccagctccaccccagcacctgtctttcactgctgtgcccctgcagtcatccatctgggtcacctcccccacgggctggcccccacggctgcccagcaggggttttgttcacctcaggaattttctggcacaggtttgccaggtttgcacaggcccctgtgtgtgttgtgtgctcatgtgcaggaatgtgcacaattcagggtgcagaggggagacacggtcaaagccagggcatctccagcggagaccagaatcctggggaaactgaggaagcccaggtcccacccccacaccatctgctctgctgggaggtccacatttttcagccttctcctcccccactctgtacaccacgtggccttacttgaggaggcttgtccccacatgaacatccccactgccacccacccagccctgtgggggacatgaatcctggcaattgactgaacacctgggatgtgctctgagcctcccctgagggcttctcaggaactctctcctcctcactgtaatctcacaaggcagagggattccgttgccactgcactgtggaggagacagacttagagcttaaaggcttgcccaaggtcccaaagctagtaaagggtgcggtcaggactcgaaccctggtctgtctgacttggagacaagggattagaaaccacctggcccagtccttattcctctgggagggggcacccacacaccagctgacagccagtcagtgaacaatgtggaaaggaagataggcatgacggccaatccttccctccctctttgtccttccttccaggttgacctcctctcccatccagagccactgccaagtatggctctggcactggaataggcacagtggaatagggcagaggtgagggatctggaatctgcgatttttttcaaagccccgtagaggaattccttccagcccagggccaggtttagaaaccaggaccctcgccctttgacacagctctctaggctctttggtgggtgctctctgctgccgccttgtgggcactgcactggcccagggtaacctcctccccaccccagccagggattccaagagctggggctggatctcacctctgaacaccttctggtcaaccctcacctttcccttaggtttttgggaaattcctcccaaaggggattgaggggcaggtgaggaaggttgctctgggaaaagggggctgcacaggacaccagcctggattgccgttatcaaatagtacacccggcagacaaggcgtgggtgtgccaggtgaggactgcacacagtcttgggcatctgcaagctttggtccccccgcccttcaccaggtctcctgccctccacatgtccttctgagccatgagcaggcatggacaatggaccaaggacctgctgcccagtgcctcctcactttccaggaaatccacgagctatcagggaatgcctactgcatgccaggccccacgcttgtcaggctgagggtacaggaagcaacaccaggccaggtgcagtggctcacgcctgtaatctcagcactttgggaggccaaggcaggcagatcgcttgagcccaggagtttgagaccagtatgggcaacatagtaagatccccaccccctttataaaattttttttaagtagccaggtgtggtggtgcacacctgtggtcccagatactcaggaggctaaggcaagatgatttttgagcctggatgatagaagctgcagtgagccaagatcacaccactgcactccagcctgagtgacagagtgagaccctgtctcaaaaaaaaaaaggaagctcccgccctgcctgcctttggggagtgtcatgtcactcttctattcaaaccccagtggttcccatctcaccctgtgcaaaagccagagcccttgccagacctacaaaacccgcagggtctgccccattgtcacccctgaggagtcagccgcatcatccctatctgtagtacagagcgggtgtggctgttccaccgctggcgtcaggtgggcacaggctggagatttttggtgccccagggtagtatttgagacctgaaaaataaatgtgatgacctgaaagttcaaagataaaagggcaaaatcaaaattaaaacttgttatatgaaacatctatcagatgaaagatggcagctttagtaactatgaaatttagtgtttgtgaaaatttcattacattcgaggacaaattggaggttagatttttctagaattcttgaaaattttccagaattttctggaattcccagttacgtatgatgattgccaggaaatcagaaatcaagaagcttatatgttagtcaagtttgtcatagccaaatattttgaaaaggaagttataaaaattatttccaattttatagccataaaatgtatatatgcatacatatgtatatacatgggtatgtctcattaccttggagaggaccccctggagacttctagggcctcacagtgccccaggttgaggtagggtctgtggccaaagtgtgaggtgaggtggctacagagggaatagctaaccgagtttcaggtgacagaaggaggaggtgatatttgaacaggggctggcccaccacctgactcatctcccaccccacccttcccacacccaccgcacacacccacgcccacaaccaccacccatccccaacacacaggcctttcgtttccctgcacccactcaactctcccccagctcagagcctttgcacgagccctttcctccctgacccctgctcttttcataggtagctcattctgtttcatctgtcccagcttaaaacgtcagctgtcttagagaggccctgcctgactactgtctaaagtagctctgacccctctccaaattctgtttcctgcagagctggacccacaatctgtgcttatttgttttgtaggctatttgcttattaagaggcacgtggtttagtgattaagcaggcagcctctggtaccaaaatgcccaagttctcactctagctacaccacttaccagctgtgtgaccttgggcaagttgcttaacctctctgtgctccagttcttctcatctaaaaaatagggctagtaagagtccccacccgatagaactgtgatcagcgcttactgagccaagacataggaagcactggcacatggggagtggtcggtaaatggtagctgtcaccatcatcactatcattaccatcatctgcttcctttgctggaatcgcacttgtcttgttcactgtcaaaccatactgcctagcacagttccaggcacattgtaggtgttcaaaatatttcaaaatatgtgttgttgaggactgatacagctggtgaatatcttacctttcctttcccctaccccctagctcagccaggaggtggctgggtcttccttgtcggaggtagactagggcgtatggcccaagactctctcaagagccctctctagacatggcatgggccacagcacctggagtcggaggcacaaggcaaccccagtgattttcagagcttgcatgcagacaagtgtcttcccacatgtggcttcatttgggtgcatttggaattggtgcagtgtgtgcatctgcatgcactgggtatggcctggcatgcaggcactgaggatgtccacctgcactggtgtgcgctggcggagtggccgtctctctgtctgcaagggagattttggtcccactcttcttcctggctcctgcagctgccttcaaggacctggctgatgggcattgatttagagcctttcaaagccctccagcaaaataaaggagaggggagaaggagagaattattccccatcaggctaggagaaaaatgacgggcgtgaaatgggaaataaatgaggggaaagtggtgagattctacaaaatcgcccagcagggagcctgcaggagaggtcacagccctccaccctctcctgtactcccaacctgccctgtgaccagagagtgggtcaagagacccaaaaccattgcccatgccctgaccaggatcacttggaagcagctaccctggcactctctggcatggtaggggcaggaagagggaatggaagaggagaaaccacccaccatgtgaaatgtatctcagcctgttcagcaacaggcctggcctggaacaagtgatttagctgctctcttcctcagtttccccatccagaaaaataaaatagggagaaaatcatctctcccccaggctgggtgcggtcgctcacacctgtaatcctagcactttgggaggccgaggcgggaggatcacttgaggtcaagagtttgagaccaacctggccaacatggtaaaaccttgtctctattaaaaatacaaaaattagccaggcgtgatggcttttgcctgtaatcccagctactcgggaggctgaggtgggaggatcacttgaaccccagaagtggagattacagtgagccgagattgcaccactgcactccagcctgggtgatggagcaagacttcgtctcaaagaaaaaaaaattctcccttttcaaactgttgagagaagcattgtagaaacacaaggaatgctggtcttctatgtccatctgtgaaacgacttggcctgttttaaattatgcctggagtacctaagagccctatctcctgtttgcaaaatgggggtgttgggcttccctttatggaggctagggaaactgaggcaatgtgcccacagcaagataaggacacctcagacctggaaggcagggacctcccctcctctaccctttggtgctgcgaggctgggaagggagaggagggccgagcagtccctggtgggagtgggggctgcccccacctctctgaaggagaagcctgcctagggtgccacagcattcagccctccatcagcctctctctccccggcctccccaggacccatggacaggggcagatgggagttctcagccagggcagctcatctgtctgttctggtctggtggccccagagacacctctggctggggattaagcagaggagggacagattctgctgccaaagcacaaaaggctccacatcaagtaagatgaaggagctgacaagcctggctgtcatcaccgagtgtcctgcagttaagaataacactgtcctgatgtggccccagggactgtagtcacctctctccccccaccaccactgatcttgtccacccctggtgccacagtggcctctgcaatgcagggtcgggggtgagcgaggggtaaggggccacctcaggagcctccaggctgggagctgggtcagctccaaggctggtgctgtgtgaccctaagactggcctgtgcctctctgggctctgctttctccttgtggaaggtagggcggttggaggacgagggagcttccccacagagcgggggatcggtgcacgcagggggcctcggcgaagatgaggagccctcaaaggctgcagggggccctttgccttttgtttatgacctggctgtgtgggatctgggacactaagggacagcaggctgtggggttcaccgcccctgggttaggatggcactgagcactgaccccttcatgacgtgggggttataagtggggaaccaggctgtaggccggggagttgaaggggccagagtgtctgaggtccagtcctgagaccctgccccttatcagggaccatgtacctcccttccagggagctccaccctctccttccttaacactcccccagccctgcgactgccccagctaactgggtcccaccttctgaaactgggccccagccatggcttccttcacatgccctgtcatctctggtgtcacaatctaatgcttcaaaggaaggaagggagggagggtttgatgaggaggaacccagtctccaaaatccagggtttcaaatcctttcaaaaatcttagctggaatacagactccccagccattcccagcccctcccctagagaactcctgcctcccagccctctcggacccccctaccgggcccagcggggatgcccacttcctgggccagagccaggatgtcccctccccaggaccaacgtctgagctcagatactcccggccagcccagagacaccctccccaggcgcggctcagtgaaggggtctgctccctcccgggcaggtggtggctgttgacccagacctgggggagaatggcaccctggtgtacagcatccagccacccaacaagttctacagcctcaacagcaccacgggcaagatccgcaccacccacgccatgctggaccgggagaaccccgacccccatgaggccgagctgatgcgcaaaatcgtcgtctctgttactgactgtatggacccctctcgcccctcacggcccccacaccttaggctgcgggtgtccctggtgactgggcctctggggtacctggggcccacccaggaggtctatgtctgatcaccaagagtagagtaatacccacgccccagttgtgactcctagagcaccctgagggaacggagggagctggggaggggagctgtgaggcctaggctgcttcctggaggggcctttgggatggagggctctgaatctgccaccctctcaccacttgccttcttcctgtccgttttctcttgcacccatcttaccctgtccttggccccttctcgccctggtcttcccaggtggcaggccccctctgaaagccaccagcagtgccacagtgtttgtgaacctcttggatctcaatgacaatgaccccacctttcagaacctgccttttgtggccgaggtgcttgaaggcatcccggcgggggtctccatctaccaagtgagtctctatcatctcattcctaccagcccagaggtgggcagtgggtgcctgaggagcctagcccaggctgaaaactttgcagggctggggcaggggaggagctgggtcttgaaggacagaggctctggagatgtggagggaagtgtggcaggaaaaggatagggagatgggcaaaggcagaggtagagagagggagagaggcaaagatggaattctggaagtcatgtccaagtttctcagggcctgattatggaggtctggcccaggaccttggaccttccattccctaagcctgcagatggttctagaatacaaagaaggccagatgagtgtagccctgggcatctgcctctcccatgccttctcataagccccggatcagctccctttactacagtagaggggcctctgtctactttgcagggctctaaagagacttgcccaagaccccttggccaagcacatggtctgatcttgggcctggcttctttgcctcctgttccatcatcctctgattagagggatcctgaaggtgctggtttaggggagatgacatccagggtttcaagtcctttcaacacctctgccctccgggggccattcagaaacactggagaccctcctggttaagagcatgggccgtggagtccaaccaacggggatgtgaatcccatctccagcaccagggtgctgtgtacttggagcaaactgcttaacctctctgagtctcagcttctcatctgtgaaatggagataataatagtacctgcctggctgtgctgtggggactcaatcagacacacgtatgaagcaccctggaacttggacacaggaaacacagtagctgtggtgatcactgtgtgtcggtcacgagggcttatacctgagacacaatggctgtatcaggttagcctgttctcattagaagaagatggggttgtttgtcaggatgccagagggggtgagcttggtggtgccccacaggcccgctgtgcctcagtttcttcatctgtaggaggaggtgaatggtgttctttggcaggtccccaaactcccagcagggagcgcctcaatccagggaacggcagtcggtccccgaggaagcccccagaccggaggggaggcggggtgagagcaagtcaacccccaaaccctgttctctgggggctcacaaccagcgaagaaagatgcccaccaatgcaacttctgagttcatagaggaaggagcggggagcgtttaacttggaaactgtcctcacatacacgatgagggccctcccttgaactgtggctccctggtcccacctaggacctcaggagatacagatttctgctggttgtggagaagagcgttctccagggggtagagctgtgcgcaagtaaagtaaaagtactgagccccccgtcctggaaagcattcaagctgagtccagacacctctcgtccagtttgctggatgtgaaatagatcagacgaccttgatattgtctcccaatcctgagagtcttggcttaatccaaaactcttattttatttattattacacatttccccaaatgccttgaatccacttcagtaaaacattcagggtaccagggtcttgagtcgggcaatctgatcaggactggaggtgcagatgagaacagtgtaggaatttgggaggaggcttgcctgtgcatggccacaaacagttttttaaaaaaataataataatgaaatcctcaagtgacttttaaaaaagaacccttgatgtaattttatttttgttgttactatctcacaaatcaaagcaaagcggggcaggggaagtctgtgaatccagccttctacgtggttgaactccagataatggtggggtccttaagctggaacagctgctccaaatctgggagggcttcctaatggggagagcaggggatgaaggggagaaagcgctgtagagacctgagctcttattctaaaaagtccctctgccaccccatcaccggcctcacttggtgcatctggacgcctttcagctgacatgcgacccccttagagggtgcctgggagggtgccctggggacagtggcctggcctaaggcttggaggggagcagatgtgtctagctgcagccaagtgtggcttggcagggaggaggagcacttcttgggggagaagcatccatcccagtgtcccctccccaccctcatgctgcccctccttgccctcaggtggtggccatcgacctcgatgagggcctgaacggcctggtgtcctaccgcatgccggtgggcatgccccgcatggacttcctcatcaacagcagcagcggcgtggtggtcaccaccaccgagctggaccgcgagcgcatcgcggagtaccagctgcgggtggtggccagtgatgcaggcacgcccaccaagagctccaccagcacgctcaccatccatggtgagggggcgcaggggcttctgctgtgtgctcagtgtgtgggcacaggcctgggtcaggggcaggggtagaggggagcccatgtcccccactgctgtctattggacttgtaggcacaggctcccttgttaatgaggtgccctcctcagctggagccattcaacacagcagagccttctccacacctgaccactgccttcagtgccccagagctcaggggcagtggcctggacctgctgccaaagccccatcaaccccacccctcctagcctctgatcgtggcaacagcagagagggcttgagcagggcccgggaccctcagggtcatgaacaggcagggagggtgcagagccctttgtcttctttggaaggccagagtttttgtttgggagacataaaggagacctccccctcccatgggtgtggaacccctggactggcagtagcagggcatcaccctgggaagagagcagctgggactcccagactccctaagatcctcatccccctgggactctcatgctcattcccagtgtctctgccctctattggtgaagggacggggtactgtttccactctggatgagtctttaattttcaggacaggatgcagacatgagctgttgccaaggggccaggaataaccccagggaaataagggcagagtttagcaggcaagacatggcctgttccctgagcctgttcaatcccatcctagctctgctggcctccatgggatggtagggggcgggggagggtgtagttagctcagcacaggctcagacactgaccctcttcagttgagacctaagatggtgaggatttcagagagcacaacattctctctcccattggtccgaagcttgcctgtgggtttctgttgccagtttcaggacccccttattggccgatgatggacagggaatatgtcccagctttaagagaggacccctggagggcctttctccaagactcagcagaagccataacatcaaatgggcccaggatctctcctggtgataccattcagaggaacccaagtggggtggggatcacttcgctatgaaggttgtccaagccccatctgcctgaggaataggggcctagcatgcagagcggagtaaacacatctgtaagggaaattaaaccttatttcggggggtgggattttcaaagtgagctccctttgctgaaagtccgttgcatgctgagggtagaccttgaggctccagccctccactgtgccactgtgtgactttggacaagtcactcagctgctctgagctcccgcttcctcagctccacagtgtgtctaataatgcccacctcctagggtgctcagagggctgcatgtggtcctgtatgggaagcactcagcatgggcttggcacgctggacaagctcgtaaatggtcactgtcgtcatcgttgtcatgattgtccgtgttgccatggtcgttgttaggtgcgtactggagagaggttctaaggttttctctcctccctttgacagctgagcagcaataagcccccagggcacagggacagcgggagggtctggagcactggtgggcctggtcctggccccggtgggcatggggggccctgggcttatggccaggaggtgttgacacagatgccacttggagcccgtgactcccttgggaattcattccctacttggtctggtgctggagacgctgctctggagctgggtcttctgcggcagaagccaggcctagccccggcgcccgttctgccccgcagtgctggatgtgaacgacgagacgcccaccttcttcccggccgtgtacaatgtgtctgtgtccgaggacgtgccacgcgagttccgggtggtctggctgaactgcacggacaacgacgtgggcctcaatgcagagctcagctacttcatcacaggtgctgccccggcctccgcccacctgtgcaggcctcctggggccctgcctccacccctcccagatggacagccagactaggtgggggcaggtgagggtggaaaagaggtcagggctctactgttgggctttagcctctggtggtgcctcccgaggatttgctcctggctcttcccaagggctttgcagctggatcactctggactggctccctggggacctcctgaacctgttggttgcagggacggggagcatctaccaaggttcattctagagggaggtaaggccccatgattcctagggaggagccctgagccccactccccgccccaagtctgggtgacagagcagtgacttggaggaatgtggcctcatccttccttggggacctgttgagaattcccacctgtttagaggcagatggttttgatctccctaaatgaaatggttttagctcaaaaatgttgcctggctgttgtctgcagagctgtggccacagatgatgaggccatgtcctggctcacaggggaaagtgagctgcaatggattagtgatgtctgccacagtggtaggattggtagatggtggcgcacatgccatgggtttgccattcctggatgagaacacagcttcttagcctccccgacacacgagagatgctgggacacatgggggtgcagtcttccccattcctcaaccctctttggcccttttactggctcagtcttctctctgtccatgacctgcctaccaacacacatgttgcctctgcatatgtgtgcctgtacacacgagcagggcacacaccagccttcccaatgcctccccatgaagcaaggatgcccagctcacagcccatctgtggctttgctgcggccaacgtgacctcccagccctcagccttccctttcttccctcacctccctgaaggggcccagcaccctcaggcccactccttacagtctggccctcaagtcggccctagggagggcttagttactaagacccctcacatggcaccagctccgtggctccactgcccacactatttacgtcctagttctgccctgggctccccgggagtcagagtgtgtcccttgcagatggtacttcagacactggggagcactggaggtttgggggtcaggaggctttccctaggggcaaaccagcaagaacagggggagcacctggcagcctgcaggatgactcttcagcaccccagagtggtgggctcccgctgacctgcccagagccctcccggattttcagtgcacattctgcaaggagctgagcccagtcctgcccaagctcaccacaaagctggtgccgtggcgccctctgctgcccagaacaccacactgctcgccagctggcaggggaggggtctccacgctgttctgggagttccttcctgactcccgtccaccgcgagaggagaccctcacacttcccacctgtcccagaactcaaggagactcagtaatccctgtctcctgtacacctgccttgactcctccctctgtggagcctccatgtccccactcaggaagcttcgctcctcagcccatctcacctccgagatgaggggcctgggggatgctcagccaaccccagagttctcagcaacatatacaagcccctatgcaggttagctgctcagacgcttctgcaggacgggcagggagcagaggggtgaaggataagcccagggacccacgcatggagaaacccagagtggcacaggcacatcactgagtgaggggttctcctctgtgaggtggaggctaaatgaaatggtctgcatgaagtacctgtaaacaggaggtgcttcgtgaaggttaggaacggattccaggcatctggcacccccgctgagcccacccaagctgcacccgcatcagagcacctcaggcagggccgaatcagcagcacagcctcccactcctggactcaccatcgcgggtcccagctcaggagcagagtccccgcttcccctggccgggagctctgtttcccagccggaagcttcctctccttcacccacaggtggcaacgtggatgggaagttcagcgtgggttaccgcgatgccgttgtgagaaccgtggtgggcctggaccgggagaccacagccgcctacatgctcatcctggaggccatcggtatgcaccagtcccgcacccaccaacacagtgatctgggcagagttcacacagggtgcctcccaggagctggccttttgctaaaggctgaactctgcccagatgccagtggagaaagggccaccaggcactcaccaaacattactcagcacttgccgggcatgaggctcactgcatggtgccacatgcaagacactaggatggtaaggtgggagctacatgggagacccacatgtagacaaattactgcaaatccaggcaagccagcaggaagggaaaaggatgacataagagtattgggcagtggtgcaaacacagagtgggagaggtcacgggaggcttccttcacgaatcggcatctgggagtgcctttgagtgagttaggaccctttcagttgaaaattttaaaataaaataaactgacttcagcaatatgggctcacaaaaccagtccactgggagatgtaactcccagtatgactggattcagggctcaggtgacacctcaggcttcagtctctgcactggctggcgctgcctcctgtgtgttgatgtattagtctgttttcacgctgctgataaagacatatccgagactgggtaatttatacaggaaaaagggtttaatgggacttacagttccacgtggctggggaggccacgtggaactcacaatcatggcagaaggcaaggaggagcaagtcctgtcttacatggatggtagcacgcaaagagagaatgaggaagacgcaaaagtagaaacccctgataaaaccatcagatctcatgagacttatttactaccacgagaacagtgtaggagaaaatgcccccatgattcaatgatctcccgctggctccctcccacaacatgtggaaattatgggaatacaattcaagatgagatctgggtggggacgcaaagccaaaccatatcagttggctttattcttcaactcacatggtggcaggtcgttgccccagcctcacctgtacacattctcaggttcaagtgcagcggcatggaagacagcacttgtctctttcccctccctggcagaagccctcagatcagctctagatagatccattctgccccagtgcccattcctgagcccctcactgtagccagggaagtgagatgtgctggttacttaagcctaagtcacatgcccatcctgggccctcctgctcctgggcttttccttcttcaggcctcagggcagcctcaccccccaccccaacctccaggaagacagtgcctagtggccagcagggcctgctggtgaggtggatggctacaggctgaatccagcctaggatgtgcagggagctgggggcagtcccacctacccagcatcccaggcctcaaagcctggaagggagggtccacagggggacattcaggacatggccttcccaggggagcacagggcagtgctgatggacagaaacaaggggtgcccactgcagccttggaggccacataaggtttcagtacatgaagaagcagggagggcacttcaggcagaggcaccagcccatgcaagggcctggaggtgggaaagtgccttgtgtgcacaagcatgcgtgcatgcaccgcagctggcccatggagtggcccacactggggaaggggaggctgtgatcaggtagggccatgtgtggaggcctaaacattggccaagaagtttggtctttggtctctgggcagcagggagcccttgagggccccagaggggaagagtggtatgatgagacctgtgccgccgggtgctcctggtcctcccaggaagtttgcagtgagctgagtaagaagggaatgaattctctgggcctcactctttccaaccatcaatcccttcccagcccgcccatgcccagatgcctctgccctctgccctgctctcctcccctcctggaatggctgcccaccctctggagacttgttatcacccctgagtccagccctcactttgggcattgcctggcaggaggagagggcttctgccagccttctagggagcctcccacacacacaccaatcccagccagagcaataagccaacccccaagggtggtgggaggctggtctggagaggagctttggagggtgagaagacctacctccagtgagcgacagcactgccacgtatggtcagctggcctggggaagaaggatggcgtcaccctaggtctccaggctactccagctgcctgcaccaccccctggggtgaccactcttgcctggacatgcagcgctggttacaagctccttcctccagggaggacaacccaagagctgcctggggctgagtcagtgccccatcctcaccacctcccagccctgggagggtcctgtgggaactggagggacagagtctccggggaccttaagcttagatcccaagcaaagcccgtgttcctgaatgcagaggggacgtttgtttgacctatccaatattttataaagaatgaccattagttgtgaaagtttaaagatcaggagattttatttaaaagctcagatgttcaatttctcatgagaaatcagaagatctggtgtctctgggcccacattctgcctgtccgctgtggactggagtggaggacagctgcccttccagcggggcccatccaggtgtttgacccaggtgctatacccgccagtccctgacagcagttggctttttgctcttagtacctgtatctgcatcctaaatttgccacgacaaactaccacaaacttaaaacagcagaagtgtattctctcctggttctcaaggccagaagttagaaattaaggtgtcggcagggtcacgcttcctccaaaggctctagagagaatcagtccttgaccgtcccagtttctggagtcgctaggcattcggtggcttgtggcagcataactccagcctctgcctccatctgcatgtggcctcctcctctctgtctcaaatgtccctctgcctttctcttgtaaggacacttgccattgggtttatgggccacccagctcacccaggatgatcacttctcaagatccttaacgtaattacattttcaaaggcccttttcccaaataaattaatcttcacaggttcccaggggtttaacatgggtctgttttttttgggagccatcattcaatccacttgagtgcctcagttacctcctctgtaaaatggggatgacagtaaagtgtctgcttcatggggttgctgtgaggactgaatgggttagaagaatggctggcacatggtgttatctaagtatttgatactgttagtgttattcctaagctaaaaaggaagtcaccccttgcaaaggctagggcagatggggcggaacagggcacctctctggccggtgcccgggagtgtgcaaagtcacaggaagtgtgcccctctctcaggcagctgctaacacctgtcttccttcaactcccacagacaacggccctgtagggaagcgacacacgggcacagccaccgtgttcgtcactgtcctggatgtgaatgacaaccggcccatctttctgcagagcagctatgaggccagcgtccctgaggacatccctgaaggccacagcatcttgcaggcaggtggcccgtggcctctggggcaggtggtgggctgggggaggcggagccacacacggccctgagggcacatgctcagtggcaccagaggcggaagcaggtgggggcccagggtgggtccgctgctctggaaggtgctgtggggaaagggggacccaggccctctcccatcccagggagtgtgggcccccaggttgcagagctgaggatagggctctggctccccacaaacaggaggaagacttggcctccccctgcatatctcccgccccacccagaagggcctttcagagtagcggggagaaagagacgtcacaatttcccggaaaggagttgagaagagagccagggcccagcaaggcccagaacagagctgctttcacagagcccttggccgaggctcccctcttgggaagtaaacaggcacaagaagaaagggctcctttgcccagggagcaggcgcaacagctccaaggctcagagggagagaagggaggaccctgaaaacaatttgggtgtgcacccacacctctgcccagaggcctcagttgctgggtggggagggaggcccggagtgaatgagtctctttaccaactatggggtttccgactcggaggctgagccaaacagggaatctgggcctgcccactggggcaggctcccgggcttgggagggacagaagcgtgggaggctggcaatgctcccctccctgcatcgggaccaggaggcgggcaggaaagggctggggagcagggagctgactcccagaaacacagagagcccagaaagccctgaggatttgcgagagtgtggtggctagctccagaaggaggaagtagagggttctctcgatcagggcctcagcttgtgaggacttggagcatacccccctggcctggtgcctgaaacccaattgagagccctccccctcctggacttttccttcttcaggcctcagggcagcctcaacccccaccccaacctccaggaagacagtgcctagtggccagcagggcctgctggtgaggtggatggctacaggctgaatccagcctaggatttgcagggaggccccaggggaagcaaaccaggaagaggttactgagcaggaagggaggaaggaacaaaacccttagggaggaggcctgccccactttctaaacccaaagacttggtttctatttacacaatactactcttactgaaatcctagagccagcgagttaatatagggcagccctgagttctcccatttctcagggagaaatgcagcgtctcaggatgacttctccaaggtcctcttggtaagtttcttgtgaagccggactcactttttgagatcagattgacttggaaggaagggacagtgggcttctccaatagagcctgcttggagagaaatctttctagagtcatctgagggaagatgaggctctgtgttatgccagcttccaccaagactcctgcctcagagggtggggacacacccaggctgggccacgcttcactctgtacacagaagcctcatacttctgtgcacagaactggggagtcaaagtgaggggctggacaatgtctggctctctgcaagctcccaagctggtaggaaagagaagacatagacaaaaaggacccatgctgccaagagaatgttccttttcctccccaagagaggtaggagacagtaggggcggctccaggcaggagggcttcacagagtgggtgtgtgtgaagcataagccacagttagtgggtgacaggtctttcagttttcctggagttttggatcaagatgaggctagaaagattaattggagccagctcccagagggcactgcacactgcgctgaggagctttggctatatccatttggcattagggagccagtgaaggttttggagctggggagtggcaagccagagctcactccttggggagacgtggctggctgcactgtgggtcacagcaggatgggggtggggcagctttgtggtgggatcctggccagctgactgggacaggagctgggcagcccaggtcctccctctgcccacccttcaaatttgggacctgaccaaagtgtttaaccctcgcgttgtgaggagaggtcaagggtttgggattctgagaagcccatcctggggtgggactgctttgacgggtcatcagcaaagcactcaccaaaaccacagatagcatccctagtgtgggcaggacttgggaccccacagctgtcctggagaggtccagaccatcccaccctcggggaggctgccgctttccctgggtgaggtgtggagctgctgtgagctgtcctcctccgagtccaggtggcatcacctccagctgctggaaatgccctgcctcttgccactctgtcacagcacccgccctggcctctgaagggagcctcctcgatcatcttcaatcccttcctgattgatcccaacgtgggtgccctgaagaggggccaccaagacggctgccaagaccatgcttggagagccctgtttgctcctcctcccagctggcacccaggcatctgttccaccaggagggaggcagctgctcccacagggcaccaggcagatgctggcagcacccgggaaacccaaggaagagagccccgaggttttgccccagcactgggccagcacagatgccaggacagtgtcttggccccggtgtaggctgagcatttcacttgactaaagggaacctttgccatttggcaacttctccatgctgggctttggcacctggagggcaaggcttctgtggcgagcgagggtgctgcttctaggaggtggttacgagccccaggttgtaccctgtggagcctcaggccaaaggcccagatgaccacgagtgcacatctcttgaccagaagtctttcatcaagcagcagcgagggggtctgcagagaggaaggtgctcttctgaggatcatctttgggaaagggcgctggcctgggcatgcaaggagcttcggggggtgagtgtgtgtcccagactgcttgggccactgtcttcctgcagcctgcagcaccggtctctgaagcaggaggatctacaggtagacctagggggatgtgggggcatgtttgtggacaccccattacatcttggtagattccatgtagtcacagtggctgcggttgtcctcggggcccggcaggggctgtcgagggacggtgggccggccatggcggaagctgtgcagggagaggcgcaaggagcccaggcgcttccagagccggagctggggctcactggggctcccagggtggtggggcatgcactcgtgagccctgcggcggctcgggtccagcgcggccggcttgcagagcgtcatgaacagcagacaggtggccagcaggaggaagatgcaggccagggcgatgagcatggggagggggtcagttgcctctgcaagggtcccgggagtgacgggagctgagagaaaggcgagggggctgatggctggggagctggcgaggctggggccctctgtgctcatggctcctgcaacagcaacaagacagaagctcaaaggcagatcagctggacccagggcagcgggtatagggaagacttacctagggaatgtggatgggggcaaggcactgttaaactggacagcatcatggccacatcacaggttaagacagcaaggtccagagacatcacaagtctaagtgtacacacagctgagcagtgatggagctgggcccaagctcaggccctcttcctgttccaccctgtgcccatctgccatgcagacaagagggcggtggcctgtccgcattttcaaatcaatcctcatgaatcatcacagggtcttaggcctggaaacttaagaccaactctgtcaataacttgctctgtggccaggaacgagttatggatggtaagaggccgcagctgccagggtccctagcagtaatctaataccaaagctgcaaactgggggcccacgggtgtgtttagttgggtccttgccatgtttttatcaatgtaattatgaatattttcaaaataataacagatttcacaaaaatatatgggtgcctgaattctcttgaaatgtcagaatttcaccactggcattggcccatgttcctgcctcatccctgtgtctggggctgagcagccgctgccccctgtagacagggcactgacctccagctccccaccctcccccacaggcccaccacacaccttatttcacctgcctggccccgtggggattcctgtgactgcttccccatgcagtccaacttgctcccacgacaggtgggaaactgaggtccgaagaggggatttggcattagggagccagtgaaggttttagaggtggggagtgacaagccagagctcactccttgggaaggcttggctggctgcattgtgggtcacagtagggtggggtggggcagcttggtggtgggaaggccaaggccacattgtgagccaatggccaagtgaaggtcagaagcaggtctcctgactcctggccccatggccttgccacccctctggcccccagccctttcggagctcagtgagctgctctgggaacaggtgggaaataaacccacaaggagttgacaagggggctggaaaccccccagggacatcatacacctgacagggcatttcctttcccactgaagatcatcccattagacgcagtgcagcagacggtccttgtcgatggaaaaccaggctgagcttttggctcaatatgtctggggttgtaataaaaatgctcacagatcctggccagcagataacacatgaccagagggtacagatgagcagggccacctggagagcactggctgggccctctcaaggaagtggaggggcctcagcccagaatggtgctgtcagtgccggagtgcaggcccagtgtggtcagctctgtcagtttcccaagagaagccagaaatctggatttttttaaaggcaaacattctagacgtttaaatgttggcagctaattcaaatttgttgaaggcaagaaagaagagaggtggggtgggggagaacacagcaaaagccaaataaacttgatttcaaaataatgtgaaatgaattttcaaatatttgaaacactacacaggccaaaccaaacacataagcagaggacgtccagcttgcaggtcagcatgtgtgatatttaaattctactgacgtggacaagcaatcccagggggtctgataaaaagtcatgatttccctttaaccttggggtctttccttttcatgagggtgggggatagcagattttcctccttcccagcttgcagcttagataacagttgagtttctagcacggaagctcaggaggaggaaagatgtcaggtcacgctcagagaaaccctgccacaggtagtggggaggggagtgggccacctagttccccacccgagggactcctgtccctaccccaggcactcaccagcagccgcaggacctcactcctggctccctgcgcccagccaactgagggcatgcagagcaccccacctcccacccattccccaccaccacccctcccagcacttccaggcagaaaacgacccctcccagtgcctggctggaaagtgtgatgcccgtctagctgcccagggcctccgcctttgcggcatcaggcctagagagcactctggctgggcagctgtgcatgggttggcctttccttgagtctgagcagggaggagggatggggtgtgcccaccgctcattcccgtggggagaaaatcagccatccctctctcctaccctggacaatgcttggccaggagtaagaaaagggcagtctgaaatgggagatgcctcaatcctactagttctaatgttatttcaaggccttcaaaggaatctggagaccctactgggctagcaaataggatccaggcttcaggccttgggacctgctttaatttaaaaaataagtgaggccaggcgtgttggctctcacctgtaatcccagcactttgggaggccaaggcaggaggatcacttgagcccaggagtttgagaacagcctgggcaacatagtgagtcttcatttctgaaagaaaaaaaaaaaaggttttttaattagccaggtgtggtagtatgtgcctgtggccccagctactcaggaggctgaggcagaaggatcatttgagcccaaaagtttgaggctacagcgagctagaatcatgccactgcgctacagcctgagcgacagagcaacactctgtctcaaaaaaataaaaaataaaaaaaaaataagtggagttgtaattagcatctgagtagttcctgtggcaacgagagattcctaagtgcttgaaaacaacacaacacccttcctggagcacgaggcaagtccagctgccaggccccttgacacccggctactgaccaaccagcaaaggccagctagtactgggagaggatgccttgcccggaccaaggccaggaatcatctggagggcagttgaagccactcccttcccactggggccagggtgcaccagcgggccctgctctggacatatctctgcaagctcagtctaggaccctcctcttcccttggagttccacagagcaggacctgctgtgggcagagaagactgctgtgtggcctcgggctagtccctaccccttactgggccttgtttcccctctctacagaaccagaggactgcctaggtctgagcataccctcacattctcccaggagtccccagcaagggtctccaccacacttccctctccaagccttctcctgcagtcccccaagcactgacctcagagccagaccccagccgtccggagctccgtggagaggtcttctcagctgtggaagggaggcccaaggagccctgggcagtgcctgtgaccccagccctgccaggctctgctgtgccctgcagccctcggtcagcctggccagcagagtggcctccccgtcactccccagctggacctggctttgtctagaagagtttgggccctgccttgggggaggggatagctaagggagtagggatggcaactgggttgggaagagggagaggggagctgtccagagactctgggatgccccctggccttcccaccgcctctctccagcctgtctccttggagccctctcaggggtggaagactctggggagacgcagggggagggttttactgcctctgcggccccatggcgctcaccttcccctgtcggaagtttgaatggtatggtcggcggcagccagaggttcgctattcagtgcctgccagccaccaggttaccctggagaggggctacaagccatggcaggaggggagcagggagagtgctggtccctggcagcccctgaggcccctcctgcagcgtccctgggccccattccttccaggcttttccctcagcttgtagaaaagcaccttccctttgaaggtgtctggctacagaagcgaggggtgaggggcatcttcaaaggtcagggggatcccagggcagaaagcataggactgacggacctccaaggccatgctccccacagtgcgggtgggccacgggagacctccactggaggctctttccaaaacacacacacacacacacacacacacacacttccctcccccagccttctttctccccagaagccagagcttccctgacaaccagctgcctgcttaggagcccaagtctttggcagcttccccaccagggacctccaagctcccagaaatgcaactcaagacaggagtcatggccctgtccaagacctgagcctcagacccattcccttttttggagccccagtttctggtttttagctgttccctcctgcccttgcccataaaaagaggcactgtctgccaaccccaagatggacaagagatttcctatggactgttaaagctggagaggtcctcaggggtcatctaactcctcttctgagagaaaagagcccccgtcttctctcagatgaccaaactgaggcccagagaggtgtgacctgcccaggggcacccagcaagtgagtggtgggggacttggtgtttcccctgtgctgggtgggcaggggcaggcagtaggcatccagggtaggcaaagcatccggcccaaaggtgttttcaatgcccagagtccccattgggattcctgcaccttccatcacagcattcactgccttcattttccttaacttcctctcctgaaaccaactgaacacttcatctgtggcccccattcctcctgagatgacagaagacaaagcttccagggtggtgcaggctgctggagcagggaggcatcaaggaaatctcaccatggataggcatgcaagggcatgctctgggcaacgtggctctcttcaccatcctgagcccttccagatctggacaattgaagcaccctgttacatccctccacctgccagctcctaaggtttctcagggaatggagagagaaagaactgcacggcaaggggcaatccagccatccccagctctggcataaatccagagggctctctggagaaggtggcatcactcatgttgaccttcaccacacatccccatgctaggcaccagccaagacgctttgcaagatgacttctgatcttcccctcaaccctgcaaggctggtcatcattgtgcccagtctagagatgagaaaactgaggctcaagggggctaaagtacttatccatagtgccatagagagtaagtgacaaagcctaaattcatgcttgggtgtgcctgacccagggcccttgttctttttgctccagtgtactcgtcctcctccccaccatcaacatgctcatcagaatccttagacacacttaccgcagtgcccggatgtgcatcgaggccagcgcctgctacaggctcctcgctctgccttcataccaccatgtctatactccctgtcctgtggaggttccagggcatcagtgctgctgattgaggctgtcattccactcttccaaccacagccctctgctgtccctgcatgagcccttcactccagactggggtcctagttccttccttagcctccccagctgcctctacttcagctaacactgtttcccagcacaaatgttcttcccaaccttctctgctaagccaggtttcctccatccttccaaacccagctccctcctttggaaaccttcagccaatcccaccttcactgctttcttgatctttgctagcaggaacccatccccatcttctctgcagttttgtccagtgagcaacgataggaaagcctacattagggcttcgggtggcaagaaagaaaatccattctatattatcttaggcagggccagacatggtggctcatgcctgtaatcccaccactttgggaagccaaggcgggaggattgcttgagctcaggagttcgagaccagcctgggcaatatagcaagaccctgtctctacaaaaaaaataataataatctaggcagaaggagaagtgtactgtagcaatactgggataccctacaggatcaaaggaaaaatcaaacagggagcgaggcacagatgggctcctggaataactgggcccaaggatgcaaaccagggctgaatgttgtatgtgtcctgcattcgtgcttactgagtgtcagcctagttcctctccctggagctctgctcctaagtcgttcacatatttgaccctactgtgtgccaggattgttgttccagagaccagggatatcgcagtgcacaaagccctttcttcctgtggggatatgggcaataagcaaagatagcatgtatcagagggtgaccaggggtagggaaggccaggacattggagtgggggctataatttcatatgcagtgctcagggagggtcttaggagaagatatttgaacaaagacctgaaggagatgagggcatgaacatgcaaatatctggagggagagcttgccaggaaacagccagggcagaagccatgaggccagcacacgcttggtgttcaagaaacagccaggagaccagtgtgccagggcagttaagaggagagagtggtgggaagtggggcccagggatgtgcaagagaggggctgttgatattcccacattttactgctagaaagactgactcaatctctctgggcccaaggtcaacaatcccagagaagaatgtgattggctcagctttgatcaggcacccagtcctggaccaatcccctctgaccgtcttggcagggtcaggaagaaaatggcagctcccatgcacaccacagggctgaagtgagaggtggtgagacaagaaggggcagacccaaaagaagtgggagagcccagggccttacaaagcaattcaccacagatccaacaggacagcatgtcataggagggtctagcctcttcctgcactgccctggggggtgtttgttctccacttgttttgggtgggcagtgggtaaagtaggtattcagttattggcttgacaggactcatgttggggtcagctatggttctgccagtagcctcgaggctgcactccttgtaaaaagggctgagcactaggcagtgtctcagagtgacaacaacgtccccccccacacacaagcccaccagaggaaacacataaacacataagcctgagtcgcagccacgccagccaggccgatctgaagctagactggggtgatggtgcgtgtgaatgagcatggagccattgtgtgggaggagggctcctgggcttccacgaagtgaccgttacagtgtacagtgccggctgggacccagtgtggccagaataacttcaggccaaggaaatgcgggcaagaagtagccatgcagttcagccaccctgggagaggctcctgggctctgaaaggctgccgggtagggaatgtggagggatggaacagcctgagaaagcctggacccagcgagctgcagtgccatctttcaccttctcccccagcctccctgcgaacctggaggaggatcggggcagagctggtcctggacagggctgcaggggccatcagcggtcggacatcctcttggggattagaaagacatacacgtccccttgtctcccacacccccagcctctgagggagaccacaggttttggcaggatggggtaggatgcgtgaagggaaggaaaggaactctaaaaacctcttctctccctgctgggtggcattcaagaagtaactcgtgtctcattcttcctcagctgaaagccacggacgcagatgagggcgagtttgggcgtgtgtggtaccgcatcctccatggtaagtggggctgccctaggatggggggcggtcctcctgcccaggggagggcagagcttctctaggctgccaaaggtctgggagatgaggccaagagaacccccagggccatatacatggggcgaggccagagggaggaaacagggacattctccttattcacaccaggtgggtgagggggaagcttttttgattatttgtttttgagacggagtctccctctgtcgcccaggctggagtgcagtggcgtgatctcggcctactgcaacctctgcctcctgggttcaagcgattctcctgcctcagcctcccgtccccagtagctcagtccccagtagctgggactacaggcgcatgcctgtaattttttgtgcttttagtagagacagggtttcaccgtgttagccaggatggccttgatctcctgaccttgtgatccacccatctcagccttccaaagtgctaggattacaggcgtgagccaccgtgcccctgggttggcttttgattgccgtgttcctgaagtcctgctgtcctgcagagcttcccaaagccatggccctgacagagagggcccagagcccagggcagcccccagcagcacgctccccagggactgggtctcattggtccaatcagaatccagtgcccatccctgaaccaatcgctatggccagagaataaaatgtgctgatcctcccacttctcgaatcaggggtaaagtcactgcccacaaatgttatggactgacagtagaggagagtagatccccaaagaaaaatcagggtgctgtgcccaaaagatgggggaatgagtgctggaccagccctgagatgtccactaaatcctggattcaaccacccatggagaatttggtttcagtccctctttttggagtgccccaggttcttctgaaatattaaaaaggcctcacactacccacatctgtgggtgtaggagcagggcgagggggaccagcaggagccccacctgctggggaccatcaacaccaagatgaaggctttcaggaaagagctgcaggccttcccggagcaggtgaaacgcattggggatggcctgtctgccttgccccacctcacagagtcctccagcttcctctccactgtgaattctgtgtcccagaagacccgcagcctcctcacaaggaggggactggtgaacttctgcccccaaccatggcaggccagcacagcaggagacttctgggcagggccggtgttccagggggtctgtccctccacacaggtaaccatggcaacaacttccggatccatgtcagcaatgggctcctgatgcgagggccccggcccctggaccgggagcggaactcatcccacgtgctgatagtggaggcctacaaccacgacctgggccccatgcggagctccgtcagggtgaggctaggggcgggctggggtgctgacctcaggacggggccaagcccacagctagaacagagaaggccattagttggcgcctggtgtgggcagggccaccactgatttaggtgctgaatgacatctgggcctaagggttcggtgacaggtgcccagcctgggacttggacttgtcattttgctgtgagtttgttcctccagctgtggaaaggagtcagtgatactgatgtctgtcctaagggatgaaagaggtgtccttactgtactaacccctgtatccacagagctctctagggtaagtcaaggaaatctcacttgggtgatcttggaggtacagatgctaacctcattttacagatgagaaaactgaggcacagagaagttgctagtgatagaatcaggactggagcccccatcttctgaatccaagttcagtgccctttccaatgaaagtgaccctaatatattccagtcacctctcccagctgcctcatcaaatgtattctttcctgcccagccttatctgtgcagccaaaatcaaatcagccttagtcctcccgaatggctgaaaacctacacacagatgttcccactggttgtgttatgtgtactaccgccagcagggggatgactgagatgaatgagatgacctctcaaggccgcttcacccccacccctacacactcagcagcccccagccccttcccctaaaccagtgagtcagaccccagacatcaggagtaggagggagatgggaagagtcaggcagagcaagcagggactttcacccagaactgagtgcccggctcctcttatcagccccatctccaccccctgcttcccccaggctggaaacaatgagcggtggtcaccgggtactcacgatcacaaacacgatgggtctgattgctcaggggctgtgctggggtgggtgactcagccctgacccagctcctgctgacacctccaacgctttgccccaagaagagctgggaagacacctgggtccttgcaactgccctgagtgagacctgccctgtggaaatggctgagagggtcagatcccctggttcttacagggccctggtgatggagactcagacacagtaacctggacatgcacatagccatgctggcttgcatgactgtgaatcttattcgtgggctggtcagtacgccctcatcagagcctgccttgtgtggggcctacttcagggcacagagtgactgatgtcagcgaagctggggttgggtctccagacttcaggcttcctaaccacagccctccatgtggccctcgctccccgctccctcacccaggcgtggtgggctcctgcctcctcccatcagtgcctcagcattgtggctgcaaacctcctttagccacaaaccttctgtatacacaaaatgatatgcagcatcccagggtacagtgtaaaacagatcgaagccagactgtgacaatcagtgcaggggtggggctcccagagccacacctgctcagctacttacgtcctgcccgtctcccctgaaccctgaggaataataaaccctcacacgtgcccgatatttttctaaatgcctcgtgtactttaacctccgtaaccctcataatagccttatgaagtaggcactgttaatacccccatcttacagatgacaagactgaggcaaagaggaattagccgacttgttcagggtcacacagcggtaagggtggagccaggcttcatgccttggcagccagcttgagcctgtccccttaaccactacactccactgcctcacataagcctcttcaaagcccagtcagaaaccactgcctcatccccacagggtaattttaaggtgagaatttgagggctggcccctggggcaggtgcttggtggcactgtagtacacagcctccacacccatgagacccgggagagctgggggccttcctgaaggcaatgtggggactctggctttccgctggactcattttcccagcagcaggggagagacggcttgcaggaaccatccacatcctccagttcctgcctcagagaccggggacagccccagtgaggggccggggagtacagagtgagacagtccccttagagactgggtgtctcagggtgttcacgacacatacacacacacacacgcacatatgcccacgcacacctcctctccctgtcctcctaaccactagcaccccattttgcagatgaggaaactgaggcaaagcactgcactggcacagcactggacaggcacagcactggacagaaagcaggtctggttctccaggaagcccagttgctcccacttgctcagcaagaacctgacagacctctgcttcctgtacatctgtgcctctcaggtttgcaaaccatcttgcctcctcctgtctctgctgctaaaaacaggctgaaaccgaccagaggctggtggcatgtagccagactcatggaggacaggccacaccccagctccctgccacctctctcatcttgtcattgtactgtcagcctggccctgttttttccccacaacccttggagtcaaggtcatttggacaagcagattgaggaagggtaaggcgcacagttttgcaagaggagtggttagtttctgtttaccgaaaaagagttcctgaaattcatccatgcaaactcccccccgcacccaccctacccaggatcttccccagccaagttctgggtgaagccaaatttaggttccagcctgtgaacagctgtgctctggagtggacatgttagtttgcatagtgggttctgggtgtctggacatgaaaattctaatgacacagcagagctttgggaaccctagaagcagcgatgcagagaaacttttacacccatatgcctctctgcccccagccctgccaccctccccaccccagagtcctccactggtcaggctgctgttttcggcttctaccagccagaagctctgtcacttctctccagctgattcccagctaatccccaaagagaaagcagggctgatcccagaggcagtgaccagatgccagacacacacgcctctgctgcacatgcagaggcccctcccttagtgctggtcaccacatgcaaagtctgtatggggcatcacagccccttccccatttgcttccctctctactttgctggcaagttcctaccggccccagctctgtttggctgggaagagggtgcctctcctgttctggggccagctcaccccagcatagagcaaagagctaaaagctaaaaactcctgggctccagcaatcctcccgcctcagcctccctagtagctgggattacagatgcatgtcaccacccccggctaattttttttagagacagagtctcattatgttgcccaggctggtctcaaactcctgggctcaagcgatcctcttgcctccgcctccctagtagctgggactacaggtgcgtgctatcacccctggctaatttttttttgtaatttttgtagagacagagtctcactatgttgcccaggctggtctcgaatgcctgggctcaagagatcctcccacttcaacctcccaaatttctgcgattacaggcaaaagccaccatgcctggcctccataaacaccttttaaactgtattacgttcatgatgtacagtgcacacattcataaagagaacttagtgctggtaagcggtgaggaaaatggtgcgtaattgcacaattcagaaacagccactgccttggatgggggcctcagaagcaaaccctgagacaaggattggtgtgaaagtaatgtgtaagaagcgcccacaggaaaaggtggaacagggtgcaaccagcaaggaaaaacagacagcaaagtgtcatggagggagctaggcctccgtcccccagggagccctaaagcgtcccctcactgccccaaacagggccagggaagctggagtctttgctctccacgcccatcaatcattggctcagggctgccctaggggacggaagttcccaggcatttctgctcactgggctggtttccaacagcccgggtgtgggtgcagtggggtggggttggtcttccccaaagagccttaggggctgggagctggccgtgagaaggtgcacaagtaaagagtactgagcactgacattctctactacaactgccattgtattttcacctctattttccaagatatattttaatatttgattgggatcactttgaattttttcaagaacttttgcaggccctggctcattttgtcttcataacaaccttaggagtggcatggagtgtgaactattttattattattaattttttttttttgagatggagtctcgctctgttgcccaggctggagtgcagtggcgcgatcttggttcactgcaacctctgcctcccgggttcacaccattctcctccctcagcctcctgagtagctgggactacaggcgcccgccaccacgcccggctaattttttgtatttttagtagagatggggtttcaccgtgttagccaggatggtctcgatcttctgacctcgtgatctgcccacctcggcctcccaaagtgctgctgggattacaggcgtgagccaccgcgcccggccgaattattatcttaatattaccactttatagctgggaaactgggggccccaaagagtcactaattagtcagatgttccacagcattagtcaaaaagccaagagcaagatgaagttcattccgaaacaagtaatgtttgagcacctgccacgcgccaggtgctgtgcaaggtggtggtcacagtgacccaccagacaggcctggggtcctagagggagctcacagcaggcccaggaaagcagtgaccacacaaggcggccacagtgggccaagccctgggcttcccagcctccaccccaccctgaccttgcacccctggcccggctcccacaggtgattgtgtacgtggaggacatcaacgatgaggcccccgtgttcacacagcagcagtacagccgtctggggcttcgagagaccgcaggcattggaacgtcagtcatcgtggtccaagccacagaccgagactctggtgaggctggcaggaggaagccggggatcccattgctcagagcaaacctccccagctcacccagcccctccttcgaaacggtcatccctgatgcttcaggctccccatttagccatgtctaggccagggaggggctgctgggatggtcttgatcacttcccaccagtggccccagcctgagagggttggaatcagggagagttgtcccaaccactgggtggacagaggggaggccacaagcttgagaagtccagctccgtcatcccaggacccagcagctcccactagcctttagagaggggctgggcagagctgggaggggtaaagaggaccggtcagaaagctggctgcggcctggcctgctcctccagcccctccacgccttccaggaccagctcagggcctagcacacgcagaccccctgaccctgtacaaggggcagtacccttcctgtgccgcagggcagtagcctgaaggcagcctgaaccttgctgagggcccaagccccagaggcggccacagcccgcagtgcaaaatgaaggggaagcatgccgggtctctgtggccctccgtgcggcctgggctgtctggcctgtaccccagtcagggatacagctgaaaaggagcattttctggagacccactgtcccccagagaggctccctgagctgctcatccttcatgtcagctactctggtggctcccaactcctctctcagcatcctcagattatctgtggcatgcatgggatggggtggagggaggaatggctgcaaattctcaggcggaatctcaggcatgttaggagagtttagggcacatacgcggctgtggccccttgaggtctgtgaacttcagcttaggaatcccagctctagctcctgattgaatggtttgtttcaaggcacaggaatttggggcgtagggagtggggaggatgggggaaggtgtccctgacactgaagcccttctgtcgaagggaccaaaccaaggcttggccatctgtgaggatgcgttctagatcaaagcctccactacaagagatccttcatttcccccaatgcttgtatgtccagatatcaaagggaggtacatgagcttgaattttgaggctccaggagcagacccaactctttctgtcctatctctggtgccaaggccaagccccagaggaaggctcaacagtgcatgctggaccttgccatccacattgaccttaacacatcctctgctgcatctctgaggatgatcctgccggcagaggtggggcagcccatgctgggtgggccacccagggggtatgggtgtggcagcttgagaagccacagcgcagccccactcagttctatctgggactgcacagcctctgtgtcctcctacaggggatggtggcctggtgaactaccgcatcctgtcgggcgcagaggggaagtttgagattgacgagagcacagggcttatcatcaccgtgaattacctggactacgagaccaagaccagctacatgatgaatgtgtcggccactgaccaggccccgcccttcaaccagggcttctgcagcgtctacatcactctgctcaacgagctggacgaggccgtgcagttctccaatgcctcatacgaggctgccatcctggagaatctggcactgggtactgagattgtgcgggtccaggcctactccatcgacaacctcaaccaaatcacgtaccgcttcaacgcctacaccagcacccaggccaaagccctcttcaagatagacgccatcacggtgaggggctgggggcagggagcaccatttcttccaatctaaccaacattggttgagctccttctgtgtgcacagcactctcctctttgtcataaaatgtccttgagatggccaagtgtggtgttaggtacctgtagtcccagctgcttgagaggctggggcaggaagattgcttcagctcaggagtttggaggctgcagtgagctgcgtttgcaccactgcactccagcccgggcaacagagtgagaccttgtctcttacaaagaaacaaaaaaaagtccccgagatcaatatccctgtaacacatccattttcatatgtaggagtaagataaagtttatacctatgcaggctggtatccttctgtttttccttctgttttcacacccatcacagatccttcacctctggtcatcgaagtgtgtgtggggttttcccccattatcggcaaccaattatctgactctcttgacaccagctgggaatcccatagtttgatttaattctgaacatttctacctggagttagcgtcagatcccacaggctcacagctcagtccctcccacacaccacgcaattctccagtagacaccatagtgtcagatcccacaggttgagggctcagtctcacaaaactgcctccacttcagctgccaatcacaacctctaggttgtttgacccatgcttctgaccaactggctaaatcagagttcccacaaccccctccacaagttcgatgaatttgctagagcagcttgcagaactcagggaaacactttacttactattaccaaagtattatgaaggatagtctaaaggataccaacaaacagctgaatgaagagacacacagagcaaggcatgggagaaggggcccagagcttcggtgccctcctcggacatgccaccctccaggcacccctacatgttcagcagactgcaagctctctgtagttcagggatgtctatggaggcttcatcacataggtacgatcaattattaactgaatctccagcctctgtcctcttcctggaaagtaaagggtgtagaggcagggctgaacatttcaagctgtttatcctggcttggtctttctggtgatcagccccaaccgaggaccccaccaagagttgcctcattagaacaaaagactcctatcacctaggaaatgccaggggattaagagctttgtgccaggaaccagggacagagaccaaatgcatatttcttatatcacaatgtcacagaaagctctgcaagtcatatttcccttttcaccttggctgttaggaagctcagacataaatgctgggcttcattgcaatagttattcttagctagttgtctggtacaccagtctcttatctactgccaggctcttactccttcgtctttgctttagtgtatcttttatcagaattccttctttgaaagtaggcaaggtgtgaatcactacaacgtgacaggccttgtcctagaggatactgggaacacaaatggacacaaagatgaacaagacccttctcagtcctcaaagagttctcaggctagaagtggaaatggaactaatccaggatgcaaatcagagcgccacaagaagatgtgcagagaactacaacagaggggtagtggagcccctcagggcccagcagtcatacctggctggggaagcaggaaggcttcatggaagaggtggcttcccagtggaatgtgagagagaagaaggaattcaacagacagagtgtcctggggaagttatgccggacagaggaagtgacatggaggtggaaaagtgggcagaatgaccagggttaacaagggtgcgatgttgtcactcacccatctggccccttccctgcagggtgtgatcacagtccagggcctggtggaccgtgagaagggcgacttctataccttgacagtggtggcagatgacggcggccccaaggtggactccaccgtggtgagtgggaccagggtgagagtccctcaggtgcggcccatcgctggccatgacacttccaaacccatgtcctcgccagccacccaatgtatgggccaggcagcgggcgagggtcttgatagcctgaggcctcgccatgtccagccatgccacaccttcccagcaggttgggctaggatgagacctcaggcaggtggagggtggcacctccagagacactgccgggagtggggtctggaagagccacagacggctaaccatttgcatctttgccttttctctcactcccctcctgctgctgcctctgcctacagaaggtgagtagcctgtggctggagcttcccctgtgctgttggctgtggccagtgctggccgggctctgcctggccctggaccttcccacctctcccagagagaaggcacgtggacaggcctgcagcaggccccctcccagtgcctccactctcacacctgagttcaggcccctctggggcatgtcccctgcctccaactctgtcctctgtgtcttgcctagccccggtagggtcttgggtggggagagtactagcaaaggagtcactggaagaccactgagggctcatcccagctccactcctcgatggctgtgtgacacaggcaagctgcttaacgtctctgtgcttcccttcctcgggtctaaaacgagggtcatgccagcatccctgccatcctcagaggatgagatggaagcagcaagagattgcaggcagaaagccctttgtaagccagtcctggaagcagatgtgactgcagtggggctctgtcctgatgcctcagctgctgcatccataaaggggaccccctccctctcctgggggttggtgcaagtgtgtggggtgggatgcacattgtggggcctgggagcgcttaggaaggggaccatgggcacaggttgtttctccctcaggacagcctctaagtaaaggcagagaagaccatgtgctgggcccctgggggaggggggcccactgaggtcagaagagccagacaacgttcctagaagaggcggcccggcctgaagggagaggcaggcaggggagctcatgctggggttgcaatgggagtgggtccagggccagctacctgagagaggtccatgggatggcatcctgtggtgatcccaggacactcagccatcaatctggcctggacactggccagtcacatcagctaccatctagagaccacctggggcatcaggctcctcatcagccttggttacagccacattgccacgccctgctgagtccctgtcacattaacctaaaaaagctagaagccaactcagtgtccaagccaagagccaaacacaatttcttggggttcttggccccaaggctccctggaggtgcccagttctagcggcactggttgtggctgggccatacctaaaggccccctccatccgtggggccagcctgggggtgagtgaggctgtgatgggcaagaagtctccacagctcccctcagctatgctccccaagggcagccggtgagcagagcgctcgggcagtgggtgccgagccacctgcgtcctgccactcccagccaaggggcagacactcaggggtaaagtgggaccctcttactgagcctcaccctcttcattcatacaatgggcccacctggccctcacacagcaggtgttgcgagaaggctgggaggagaggccagtgggagcccaagggtggcagggatggcaaggaggtccccctgcgtggactgccagccacttcctcagcacggctgttgagggcttcggagcacacacttctgcctgtgcccctgtatttccacagtgctttgccctcttccggttagcagggcccacccccttttgttctgccctggcttcctctgagaggctcccaggggccgctgccccagatccaccagccccggtagccccaaacactgtttgaggtgctagggtggaggcagaggaaggggccctttaaaggtggaaacatttcctctgctaggccggaacccaaaccacagctcacctccacctggctcctccctgtccccagcagccctggccggccccagaaggagtggtcaggcagaccagaaggggcaggctgggtagggcatggctctgctataagagctcttgagtaagttcaggccttcagggggtaggggagggcaatgtggattgtgaggccctgggtgaagacacagacacccatctcattcccataggcctgggaacctgtcctccttcctcacccactgaggccaacccccttccactgggaagtccagcagcccccctcacccctgccttgcagcctcaccaagatcagagcagtagtcattgtgggaacacctgctgtgtcccaggcactaggctgggttcaggttacagcaagaaaccaaaattagacatatcccttgccttcctaagtgtacgatacagtgagggaaagacattgatcaaatgatcacagcagtaaatgtatgccctgagagaaagcctataataaggtgtcagggaactagaagagggcttccctgaggaagggactcaagctgagagcgtcagaatgcatgagagttaacccagcctaaaaaggaagagcatttcgggcagagggaacggcaagcacaaaagccctgtggtgtgaggaaacacggtgagtctaaatgaggccttagctagagtgagggggtttgggagggatccgatcacaaggacccttgtctgttttcaccctgagaacagtgtgataggtattgtttttcccatttcaaatgggcggactggggctcagggacctcagggaactccatagcaaaactcatgacagatgggtagagtcttggcaagagaaatcatgaatgtctgccaggcaggaagcaggaacagggaagagtaggtgccaccccttcactttctgtttgctcagttattcctcccaacaggtgtcattctgattttcagctgaggaaatggaaaatcagagagcttgaataactttttccaaaatcgtgcagctcataagtggttgggttggcctagctgcgaagcccaggctcactctcctatacttctgagagctgcctacagataggggagtgtggctgggactgagcagtcaaacctgtatagaaggaagaatgacatggaatttcctctgcagcatgcacaggcttagccggctccccatgagtcctgtgcagagtcagcaggacctgggagcccctgaaccccacatgcagggaagcagagaatggggtctggcctggggcagggcagtgggagaaggcctgtcctgggatacctaaaacctgagctcctccaacccccctcacaccctcatcagtgaacccctgggtacctgtgattccagccgcagtggcctgtggccgtccgtggactggaggcctcacccgcggcaggccttcactctcctgcctctccacaagaagcccgagccacagacacaaaacaatatgctcttgcgtgccatttgttgcatgcccggtttttatttgacagtcagaaattcacatgccttccccatctgcccttctacccactggaaccaagccaccttgcagccccctcctgctcctgggcccatttccttccctctaagcccaaggttgcaaacaaagacaccttcgggcaatatctggccaccagatgtgttttggacagcccacacataatattcttctctaaattttattactcatcagccaatttcactttaaaatctagattccttatttttcatgaaaaacaggaagctttgctcatgctagaccagcattcctagcctccatccactttagccatggcctggcttttcagttctcctgtccccaccacctctgacagtctccccaccaggcctcttcccttgccctcctagccaagatttaagtgtgtctacctgccaccccacaccaatcagactgctaggagccatgggcccagggcctcctttgtaaagtcaggataggcttcggtgggctctgagggtttgctgatgttccagaacccactggggatctggtccctactggacccacggtgggacccaggtgtttggggccaaggaggggaaggaggctgtaggtctctgaccacgttcaccctcaggtctacatcactgtgctggacgagaatgacaacagcccccggtttgacttcacctccgactcggcggtcagcatacccgaggactgccctgtgggccagcgagtggctactgtcaaggcctgggaccctgatgctggcagcaatgggcaggtgggccaccgagtgaaacagccaggatccaccatgtcagcggggctcccacagctctcacagctggaggggccttctgagccacccccatcaccaagcaccaggttcttccggtctctgcccctgcaatcacccagtctgtggtcagggagaagggacagagctgcctcagagctatgcaggccggtggccctgcctgggtcatgtggacatggagcccgaaggccagccaaggcgcagcccctcagtgaagttgttttccgggtaactccttcccacgcagccccagctccctgagaggacatgctcgtcctctctcctgcttcctaggcccagccccatggcaggaggcgcttgctgtcgctccaggtttggacaccccagagtgcagagggagaagtgatgaaacccgccagtgttcacacagctttcatctgttccgtgcattaggccgtgtgtttgcgggtgttagcatggcttgcatggtctagggggtcgagggatgctggctttggagacaaaagtgtgtaggttcagacctctggcatttgcaagctgtgtgaccttggctggttgttccatgtttctgagcctcctctctgtgaactgagaacagttgctttctgtcaaggttgccgtaagaaccaagtagagtccaggtaacgccgcagcgtgtgcccaccccagcagcgtgagcacaatcccctctaccctgggaagacgtcagtgccatgggactcaagccccactcttccaggccaggatactgatatctcctagccccggaactttccatgggtgctacactacctccatgggcctgcacccccattttgagggagatgaatcacttctgcttaaaacactgcactcccaaaagcccttgctcaacagagggcccacgtgggcagaggaggaccagggagtcccccttggcttgacctggccacctctcctccacacctgctcacccctcaccctctcttctccccacaggtggtcttctccctggcctctggcaacatcgcgggggcctttgagatcgtcaccaccaatgactccattggcgaagtgtttgtggccaggcccctggacagagaagagctggatcactacatcctccaggtggggcctggcctcccttggactgagagaccactggctaagtgcctagaccggtcactactctccatccaggagagagcctgtccatcagcacactctggtggtcagtgcccctgctgtcaccaagtaacatggggccagctgcacccatcggggccaagagcacagtgaggctgacccaggatagggaaacctgggagggaccttagatacccaggaggaggtagttgaggtgtcttcccctgctgtaagagccaggaggatgagggagagcctggtggagctgggagagccccagctcttctacaaatacagtgtggccttggacaggttattaactctgggcctcattttccccacctatgcaatgtacaaaaaaatccccgtctggcctgccctgtggagggaagaagcaagtgcaggcttgaggagccacgaaggctatcattattgcagaatggccatggctgggatgtttgccaagggctttctgggaacctcaggactgcgcttctgcagagggctcagctcctgcagcacttatgactgcatcaaggctcccaggaacaggctcagccatagggcgccagctcattgcttataatattacttgaggctcttttcccgtttgccagagatcatgggacagagtgcatgggacagaggcctttgaagctaaagacaggagccttgggtcaggttgcaggcccagggtcatggtcaaaggctggcacagcccagaatacagtcagaggtaggtcaggaggtcaaggcttgggtacatgttaatcagattccaaacgaggatcccaagtcagacgacgattgggcaagaatcatttgcagcatggggcagaaggtgaaggctttggggagagcccagggctggccgggagagcccagggctggccaggccacccaggggttctcagtgagtctctttgccctcccaaatgctccccactgattgcacagcccttttggactccatattcccaatcctgcccgccacgctttagccctgactccagttgccctcctccttgcaggttgtggcttctgaccgaggcacccctccacggaagaaggaccacatcctgcaggtgaccatcctggacatcaatgacaaccctccagtcatcgagagcccctttggatacaatgtcagtgtgaatgaggtgagggcagccccggggcccatatagctggacatacggggggaccgtgggcacgagccaaccatgcagcccctgtttaaatgtctgcctggcccactggtccctcagatctcatggatgggaactgtggctcattcgtagtgatagccctaacgcctagcctggatcctagaatgcagtatctttttggagtagaggagaagagaaaagagaaaaagaagaaagttgcctttcaccagacaggaaactgaggtttaccccgggagcttgcttttttaaaaaatgtatttattattcagccctaagactgagccactccaatctgccctggcattgctgggtatcatgctaggttggacgttcatgaaggcaggatgacatgtggccagagtctagctctcaggccagactccctcacttcagcccactgattggctgtgtggacttgcacacattccttccctgcacctcagttttctcttctgtaaatgaggatgatgatgccagtacctaactcacagagttggagagaggacccagtgagttaatgcaggccccagcatatcagaggtgctcacagaatgttcgctgctatcatccttattatctccatcattgctctggggtagatgcagcaaagcttttgggaggtacagggggagccttcgggctacaggagcaggtgccagactgtgccccaatgccttgagtccagaatgactgctctcctgctctcctcccagaacgtgggtggaggtactgctgtggtccaggtgagagccactgaccgtgacatcgggatcaacagtgttctgtcctactacatcaccgagggcaacaaggacatgaccttccgcatggaccgcatcagcggtgagatcgccacacggcctgccccgcctgaccgcgagcgccagagcttctaccacctggtggccactgtggaggacgagggcaccccaaccctgtcggtgagcgatgggggtggccacagggaggagcgggtgggccagggcagctccgcctccgagtgaggggaacaagatgggtgagaatggaattccacacagcaggcgaatccttgacaactcctttagtccatctgcctttagtccatctgcccaagatggcctccccttacggaggcctgttgcgtgcaaagctggggtgctagtttggcctcccgagtctatagctactcagaagctctgtttagtcctcttttctctcacagagcagctctatggggtggtacaggttgagcctctgtattggggcctggcccagggagcaagtgggtatgaatctagcccccgcttcacttgcccacctatgcactgtgaggtcacaccaatgtgcatggtggtgtcttacagaaagggtgcctctctggccctcttcccctacattgtgtggtgtggcatgctgtcacaacacgtcagggtgggaagggattcgtgtctgtggttcacactaacgctcgaatgaacagcaccactgcccaaggcaatgttcaaagtttgccaggtgagggaaggacttgtggtcctcaagggctggatggagatctctaggagctgatgagctgtgttgggagtggcttataaactgaaagcagggaatttggagtcaggagcactgtggctggctgcatgatcttgagcaagtcagaacctctcagcatatcgcttttgtcatctgcaaaagggagataatatctacctcataggtgttgtttggggaatcaaattagctcatgtctgtggaagcacttggtaaaccatgaggaggaagaggactgttattagttctctattgccacaataatgctgccttacaaaccaaacaaaacagaggagtaaaacaataaccacatagttagcgctaattctgcaggctggcaatctggacatggcttagccgggtggttcttctggtctcagctgggcttctgcatttgtatgtgggcagctgcctgtcagcagggtgctatgcttctgagggttggctcgccagcagctggggtgacagggacaactcatcctccagaaggctagcccgtgcctgttcttatggggctggaaagtgtccagaagagacagcagaggcgtgcaaggcctcttgagtccctggcttggaactggcacaaggtcacttctaccacaatctgttggccaaagcaagtcacaaggccagcccagactcaagctatgggaaaataaactctaccttctgaaggaatgagctacaaagtcacactgcaaagagtgtggttacaaggaaggtgaagagttcagggacagttttgtaatctgtctcctggaaggaccctgattgcaaatgaggccccagctctgtccctctcatagcaggttagacctctcccctttgacagcagcactgtgggaggtggggtcacaccaggtctgggcagggctctttgtctggagcttctctggagatgttggtccaataactccaggaattgggattgggttaataatccaggaatccccaccccaccacaacattctgaggagtccaggaaatgagactgactctgggcacccctgtgggcatccttagccccatggctgcacagtgtcatcactagccacctcagccattcacacccagtgggctaaacaaggatacatttataggacacgtgtcactcactgggcagggtggggctggggcagagaggggtatcatttattgtgttaacgtgggaggacccagtttcgacatgaccccaccccactgcacttggcttcagggtggatcatcttggtcgtcccttcaatagcatttgtgaagtaacagaaactgactatggagtcataaataatcaaaatgcattttcccacagagcaaaaattctacagagaatgtggatttcaggctcagaggtgtcagagctcatgtttcttggcctttccctcatggtggcaagatagctactataactctaggcatcaagtcagcatccaaggcaggaagatgacaaaaagatggcaaagggctatggcagctacttctgcccttttatcaggaaagcaacaggtttcccagaaccaccctccagagtgctgcttgtgtctccttggccagaagtggctcacgtgggcaccctagctgcaagggaggttagaaaaaatgagggacaggattatcatggtcagcatattacttgggggccagatatatcacttcccacacaaaagcaggcctctgtcagtgaggaagaagtggagaatggatttggggtgggcatctgacagcatttgccacactgccctccccaatcctaatgcaggccagtcaacgcaccacccccactccccacccacactccaacccccacagtcctagggtctctcagggagaccatcggtggaatccataacattctaagaccctgcagtttgtaggcaaaatcaggcttcctttgggtccccagaataaatgggaattgaagaaatggaaaatcaccctggccacagttaatcacccagaatgcatgggccactatccaagcaatcctttaaaatcttgggattggtccccatggctaaaaagagtttccatctgctggccaaaccctctgcagggacccatcccaccccttggggagcataagcattcccacctcacatgtcagcccctgacattctggttctcactgaagcagggctcagcccataccagctccccggtgagagcaggagaagctgggtagcatccgccctgctcatcctggtcatcaccagctctgctccctgaggccccagaaaacaccctcaggatgattaggaccagggaccctgaggccatccatctccaggggaatatatatggggcttcctgggctgaaccatgatgctttcttccagaccgtaatataaacagcaacaggtaccaacttgaaagatgtataggaaaacaattttaagtcgaaaagaatccatccatcttcaatttttccccctgcttctccaagttgggaaaatattgctatcatttggtttttgcaggggacacctcagtgaagaattgcagtgaccatagggacatagagaaactagcactaaaccatatttattcattcattcactcattcactcattcactcattcattcattcagccattgtccctgaatggccactatgtgccaggcactggagataccgaaatgaagaaaatgtggtctgtggcctgaagaaatgaagttgagtaagggaggcaatgaaaacactggtgtgcaatggggcactgagaagggcttggggaaggcttcctggaggaggtgacacctgggccgagtcttgttggtcagtcttggttagcacagccaagaaagaagcatattctggggttcagcctgcacaaaggctgaagagcaagcaataatcagggatgggttctgggagccacaggtggtttaggcccggggctgcttccaaggccaagggcaggactctctatttccatatcctcccgggacagtgtatatgggactcgccataagagctgctcccgctgccttctcaagaccccccctctactgcctccatgcctggccgagccaaggtggggatggggcagagctagcaagcaggggtcctgcagcccacagtgcctaccagggtagcttgcctccaaggagcactggacccttgaagatttgcttccactgaccagaccctcaactttgggcagtaaacccctcagggttatgaatatccccaagagcagagcccttctctgcctctgggcagatttcactggatgcgtgtatgaggaaggagcattgtcccagcccctcctagagcaaccagagacctgagcagcatgcagccaaccaccctgagattccaggaatggctgccacagtctaatgggtgagacagcagctgctaccctgcatagatccatccagagaaagccagcaggcccacttgccatccttttactcccactgcagttatctgcctggcttcaaaatggccttcactggctcaggaccaaccttgctggaggacaagggcatgaaagattcattcatttgttcatccaacaccaagtatgtgttatgtgtgaggcctgtagtacaggctaggacaccagagatacatcaggcacaggtctgccctccaggagcctacggtctggcaggggaaggcacatgtactggagagctgacactgtgatgtggtagagtgctaggagcctggaagccagggcaggttttctggaggaagcatcatttgcatccctgttttgaaagatgtggctccctaagcagggggcctgagatttggctgctaagaccctccccagagccaagagaaattctctgagtccctccagctctacttttctccctgagaccctcgtccccccaggttcctgagagctggacattcctgcaaacagcctaggccacccccatccggcctcagcccatatcacccgaactcggaacagctgtgctgcaaggggtatctgggccagacccaggcccgccacacaatggtgtgccactggccgggggagtcattgtggagcctcagcccctgcctagctccaggccatgggaagacaggccaggcttgggggaggggtttaagtggttgtcagggaggcccctgcaaaggaagagctgggcccagggaggaagggcggaaggtaactgggaggtcaggagttagcccaacctcagaggcacttggcagtggggtggagagggagggagggcctaactgtggcctccctgccacgtgaattgcagccaaccgatactactattccagataagaagccctggcttctcaggctggtgaggacctgcagaagtcacctatccaggcagaaggacagaaatctcccaccgcccccttctggtatgcaagtccccagcagcggccccgtgacggtctatgagctggggacactgctcttggcagtacacctcatgtctttagagcagaggccccttctgtttattagacttggaccctgctattgtgaactctgcttcccctggcttgagatcagaaggtcccagcctggccctcaccctctgtggcaccaagaaggctggccttccctgacccagcacaagtacatccagacccttcccttggcctggcttcttgagggatgttccacagctgcccagatgctccacatacaactggctaagttcctccaagagaccctggggctcagctgctgagggtttctcccttccccatcccctaatgcaagcaagaggggtgcatgggccactgtgcctatcaggagtcctctagctccacagttggcaggcagaaaagggagtggcaggagctgatatggaaggagcctacccatcagcagcagcgtcttctggacccagaagaaggcccaggccagggcaggcagagcacagataggaacgtttctggtgtgcagtacagtggagccctggacctgtgggcacaagttcatctcccagagcccttgtatgtgctctaagcaagtccaaggtgaaggccaagccaggccctggcccataataccaatccattcagtgaggaggaagcaggagacccagggtttagtcgtagttccaccgtttacttgttttgacaagacacagacctttcagaacctctattgccctctgtgttaaatggcagcaataaaacctcccaggattttcagggaagggggtggatcaaacaagttacaacacatgtgaaagtgtgttggaaagcaccaagtattctaacagaaaaggccaagaaacagcatgcatgctgccacttccctctcccgtgcccaaggcagacatggctatctatctcggcactgtctcaccaagctatattgatcattcagaatccctctcaacacattccaggatagttagggtgacatagcctccatggggtgaagagaagcagcaatgcaaagcagggaatgcccagggaatgggccaggtggcctgtgccgtctatgggctgggcctcatgctcagctgggctgtggctgggcttcaagaggcctttgttcccagcatcctggttagcaaccccagttcctctttcgtgcattgtggttccctgagaaaacgttaacccagcccccagcacagtcaggccagccctggggaaggcctcattcatgaggcaggaccccaggggccaagttggtgctcggtggtggcaggacccctgcagccccctgtcccactgcacactcccaagtccaccccgcgaggagcaccccctgaaaaaggccatgtatcagcccctctgccctgggccactgcatgtagtgggagctctggtcaggcagaagtcttttgaaaagcaggtcctggggctcctgcacctccaccccagcgcccatcgccacggactcccccaggcagggccagcctgcccaccagcagtcaccagtggcctccatggtgtgtttttagggagtgctgagcagtccccgctgtgtcagcaaaaccctccaaatggtgctttcaattccattccttcagcctctccctgggagggaataaaggcaggaagtctctattaaactgtgaatgtcaggagataggtaagatggcccctaattcctgattgatctcctaacaatgaattagttcttaaaagcatggatttccctctcagggcctcagactgtgccacgaatccagcgctccaggagcctcctgccccagcccctagtgctcctcccgccccctggaggcgccatgttctcgcacccagctctcccatgcaccccagcccacagccaccagggctggcatcagaggcactaccatcccgggcaactcagagggcggctccagcagcctgcccctccccagcagcagcagggagggacgtccctagtgcgttgtaggcagggcctgtggccatggatgaagatggaactgggagctcagagtaaatttcgctgaaaacaggaaaccacgaagcccagatgcgttcagttgtaaaagggtccagagaagagagggcagggccgcaccagaggaagctgaggaggaagtgcggtggctgttctgccgcgggccgcctccctctccacacagcagcagccaggcctggggtctggcagccaaattcttagaagttgtctctgcctcaaggtcagcagctgagggctggggccaggccagcctccccagagggcagggcatgctcttcctgagttgggagaaccggaatctgggctgtgggcttgtccttcgactccaggaacagcaggtgtcctgtccccactcctgccatgcaggcccccatgaattgtgaaaaacataccctctttccttctttctttctttttaaaatttgttttgaggcaaagttttgctccgtccccaggctggagtgtagtggctcgaacacagctcacagcagccttgaacacctgggcttaagcggtccttccacctcagccctgcaaagtgctgggaggacaggtgtgtgccaccatggccagccagcaccctcttcctatggcagctggcatcaagcattgtggtgaccagagggaacaaaagaagggacccccctctgcctagggacaagggagaagccggggtttgggcatattctggccactcgaggtgtcagccccatctccgggcctatgtttaccctctcctcaaagcccctggcccagcccaggcagagcaggaggccctcagtggaccattcctttgggcctaactggggggcttagaagcagggccatgtgtccaggtggggttccctggctgtagccacaggcccagggctcactgctgccaggcagcctagaggtgctccccttttccatccccccaaccccccaagcaattgggcgaacatcttcccgcctagccccaaatcctggctttcagcacccaggcccagctcagcagagccagtgtaggctgctaggagacaaatgcccaggctggactatgctctccacagtacctggggcccccatcctgctaaacgctacagggggtctgcccagccccacctcacctgtccccatgctcaggcactgccttccctgttttacccccagagtgtacagagatgccccctactctcctcccctgctttaaaatccttcaatcacaattccacagaggactcaccttgcctatgtgtataaaaacaaagccagggcatgcccacaagcaggagatgggaacatcacccgcacctggccgaatggctctgaagcgaagactccaccaggcccagattgtatggagtggaaggtgggggtgggggaggagcagcagagtgcagatttaaactggctcttacaatccatctccagggtttgcacctgtttccccatgtagtttttaatagcatcccgcttcatactcagaagtgtcccagggtggacaagacattgtgtggcacccttgcaatggcccgcgctgagcagtgggagtaggggatggggagggcggggggcaggtgcccctctccactcaccttcccagaaggccccacccacctccctcagcaccatctccagtgggtggggcaacatctgtcctggcctcagattgcccaagacaccatttgctcacggaggccaccatgccccaatatgtacttcccgtttcgggaccaccaagctctggggactggaatgcaggcagtggaagccccagattgacttaacctgttgacagatcttcagagaaactgctggtaggaggcagctggggaaggtggcgatggccagtgggcaggcaggcctggccccagagccactgtggtacaaagaggaagtctgacagaagagcagcctcgggcaaaacgggggagccaaggcggccacgggggagaagtctctccaccgtgccctgtgtctggtgcctgggagggtggcccagtgtccatcttgtcccactgatgctgccacatcccaaggctcatgtctcagaacgagagctgctgaagggctggacgttctgagacttcttaagatgtaagtcatttggcatctgtagctggtgaatttcaggtctctaggggagaatctcagcaccccaaaatccttggaacaggggctgagccgtccagcatccccatgtagcatccagaggggttgaggggctgggcttctgggatgtcacagtatctgagcccagagcaggagggagggaaccagggccgaggccaaggaggccactcacagagccagccctggctcaaatgcacctgccccagacccagccacaacagcccactgtcccccagctgggctagatgacctcaaagtttggagagtcagggacagggtctgcaagaaaaggagaagcaaagtgaacggggcccctctgcccctcaccctcaaccccaccccgtgaggccgtggaactcttcagggaggtgaatgggggcccctctgtccctcaccctcaaccccaccccgtgaggccgtggaactcttcagggaggtgaatgggggcccctctgtccctcaccctcaaccccaccccgtgaggccgtggaactcttcagggaggtgaatgggggcccctctgtccctcaccctcaaccccaccccgtgaggccgtggaactcttcagggagggcagggagtgaggccgatgccctgcaggccatgaggtcatgaccttacaggtcatcgtgctgtgaaggtcaggaaacacttacccagggatgggaagaagacgtctccggggcctggaggagacaggggggtgctgggctccgaaagcagatgccgcccagactcagaaggctgccgctgggccacataggacagggggtgcctgactttggcctcgggtatcccctgggcaggtggtgaggcttcaaagccggggttttcaatcccttgaatgttgctgccacagaaccagaatggaaggtcatctgtgctgtccggagcgtgaactctgccctccctgcccccagtttttctctcctccctttctctcacctacatccccatccccaagcctcagcagcatctccaagcaagaaggcaggagccaggcccacagagcaaaggccatgggctgcacctgcccacctgtcctgagctgagggcatcagggcccaccagaacagaccccagctcctccctgtggtctgaccatcaaccccgggcacagccaggaagccaaaaatcacagacacttctagaacttcagcctcaggaatttggggacaagtttctctttggtcaatagagttgatggcattaggatcgaacatccccaaagcctgtcttgagctgaggggaggggttctcttctcttcccagttgggagtgggataacttctgaagacccctgcaactcttagattctagatgagttgcaagcaggacttccttcaacctgtcttgaagatcatccctttcaaacacctagaggagctttgtgtttggtgttgcaggtaccggggcaggaacttgggttccctgaacacaccctccaggccaggctgcatggcagcttcctgcccagagcacaccaatacacagtccccatcccctctgcccctagacccagcccactgcaccactctgggacccctcagcctctgcccttgtggcctgcagcggcctaacagctttctccttggagttctctgcgggcaggaggcacagctcaagggctgtggctggggctgggcccgctggcctcctttgcatgtctcactgtctgccccagacagtgcttcctccctgtccccatcctggcccaggctgaccactgagacccgaaggtgggtgcatgacacatctgagcagaatcagagctcagcctgctgagtcggggtggcaggagaacagccaatctgcacagatgtgcaggcttcagcagcagatggcagaggctcttctgaccagctgctctaggcagctaaacagggcccctactgcacagaagtatctcttcctggatagccggcccaggaagttttctcaagaaggtctccatgggccttacctgtccatccgcaccagctcctgggcacctagggacagacagacagagaagctggtcatggaagggaaggcttccccatacaacatccctgcccctgctggcagatgccctgcagggaacaggagcgagcccaggagggccctgcacagctccggactccatttcttttcacatgggtgctgtccagcagcgatctgcgtgtctgtccagcagatggggcctccatgaggggcccattttgacgactgataaatgaaactctatctgcattttccaggagtgtaagaacgctatctgccatcaggagaccaaaggcagccagcgctttctcctatggcttgacttacacagtgtcagaccttcaggatttaagtatcgagcaaaggtcaactcttgaatttgctaactggtgtctcttgtttgaacatttgccaggttctggtctttagccatgacttactgggtgggagtgtttaaggtcagttcctaattagagggctcctggtcctctctgtcctatcccctacattgcctaatagggtggcattctaggggacatctctcagggaaaccttacaaggtgcaagtccccgatcacttcccagccacttcactcactttctgcttctcatccaagttgctgccgcttgcctcagccttgggacaccccaccccccaaactggccaccaattagatgcagtgaccccaacttccctctttcatgcagcaccccatgtcctcccacagatgcttctcgttttaaggagatttactgctgattacgatggggaaacagatggtgggggaggggcacaacaacagaacaaacacagggaagttacccaaaagttcctgaaatctattcaaaccatggctattgcttacagccgactcatgggtcaggcttcgtgcaggtgcacacgggtattccctcatctcatcctctgtgccaccctttggggtgagggttgttggtcccattttagagctggggaaactgaggctcagtccaaagcaggatggaaatccacacctgttggcctctccagcaaactgccgtcctcaaggctcccagccctttccttttctttttttcctgagagtgcctcattcctgagcaggctctctgggccagccttccaccagggagggcacagcaacacctgctccccctgccctgctgcccagcgttgctcttctgttccaagccctttacctgcccccacccacccccagccatgggtattcctgcaggtaggttgtggtgtgttctaggagaggaataggggagttctgaaagcaagggtgaggtggccacagcccccgagtgacccactatggggcttcacgtgggggcccccgggaatgaggggagggagggatgacaagttgttaagggccggccacaggaaataagttgcgagccaaaagccacctggcaccagagcaatcctttctcagttacctctgtagccaggcagacgggaagaggccagggaggggaggcaagggtaaaaaactccctagccccttcttggaggactcagactaaccaagactcaagggcagggtcaggaactaggcaaggggcactgtcacctggccagggtgggaggtgaaagatgtttgtgcccatgacttaaagcccagccccaccacttatttgctgtgtggttccttaggcaagttacttaacccctctgtgcctccgtttgcccatcagtaaaatggggacaatggtaggaccaaattcttggacttgcaatgaggagtaagtgagagcatttttattatatggtggacttctattccctggaaagagcatgcgttgaaagctctgagattgagtcctagctctgccacttactaagttacgtaacattcagtcagttatgtaaccccactgatcttagccttctcatctggaaaaagaaagggttgagctaagttgtctgtaagaccccttccacttctgatattccaaagatcattttttgtcccaacaattgctactaattacaaaacaagcacgcccataccttaaacaggtcccccaaggatctctgagtggcagcaacttgcttttataaagcaacttgagctactgcatatgatcattcattcagaagacatgtattgagtgccgagccagcactgcctgggagccaaaggggctggtgggcacttggcccccggaaatggcatgcctcctttctctcggccatttcgcccagctcctggcgggaagtgcagctgctcccaactctcaaatgaaaaggaattgtgcctgcatcgtgcctttgcgaatcccaggggctgaactgggggctggagcaggtcactcgcaccgtccacccaccccaggcaggtaggaatactcacggcggttggaggctgcctgcctttgcttgtagaccaggagcaggatgagggggaggcagaggattcctacgatgcaggcacccgtagccagggctgcagccgtgatgtctgaaagggcagagaggtagccaaggtgaagccccattcccattgctcctcctgagcataaactgaggctcagagagggaaggccaggaagcaggagacccgcctttccccagagtcccacagctagacccccagcaacctacagaggcatggaagataaggcggttctcctttcaaagagagccctgtgcctgccgccctatgcccctggagcactcagaaacaagacctgtcacctacagctcaggcagctccaggcaagagagggaacagagtcctcatcccagcccacaaggtacagctggaacacccttggctacaggttgttctctgaaaagggagagcagggccttcgcagaccccatgccacagagctcaaggtcaaaagaagcctaagtgatgaaagttttgaaaatagacagtggtgacggttgcacattgtgaatgtaattaatgccaccaaactgtaggcttaaaatggttgaaatggcaaattttacattatatatgttttatcataatagataaaaagccccaactcatcccagagactccttagctctgggatggggcctctagaaccccttgatctcaccacacaagtcacaggagaaacacccggggtgagaactagaaaaacgtgaatccttgtacaatgtttttccattttaaacttattaaactaccaaaaaaagtacaagtttaaaaaatattcgaatctcctcctccccttgtaccaagaccccctctgaagagatcatccctgtgtgccggtttttgtgttatggtcctagttatattccctgcaaatacagcagacgcagcatcatatgacaatgcttttcccactgagcacagcttggacatctctctgtctcccctgcctcattctgcttagagttttatcacatggctcccactaaatttattgaagcagtcccctgttggtagacatgttgtttccattttcagcataactaataatgtagcaatgaacttgtgcacgcagcctggctcactcagcaaggaaatctgtagtaaattcctagcggtcaaagtgctgagccaaagagtatgtgcattttcttttaggctattgctaaattgccctccaaaaaggtgtacacgaagcttcgctgtcccaacagcatgaggaggtttgatttatttcagggcatctgctgactgcaggagtttagctgggaacagacgtgccctcagaaccacaaccaacataaacgcatttccttcccaattttagcctttcccagggccaaaagatgggctgggataccttgtcacagtgtcaacttcgccccaaagagctctgagaggtaaatggctgtggtctaaatgttgcctttccgctatttgtttgggaataaaggctgtttttgttttgctctacaatccgacagcgtaaacaagctttcaggaggtttgttcatactgcaaatgagaacaaactgttttcagtcactttagaagtacccactggtacaggaacagttgctatgctaattacaaagcaagttccgctccacattacagcaggttccctgcagatcttagcaaggctgcattttgacgtggaatattgaaagtaaagacattctataacccagacacctcagtatttcaaaacccccatcaaaggaccttattgtgggcaatatttgagaagccagttgcaaagcactctcttctagtgatcaaagcaggtctcctctggacggctagtaagcaacattttgtgagctttgccaggtgctcattgatacctgttccctatctgcctttggagggtgagcttggccagatatccctgcctaacttctatccccaggtagagatttcccctatgtggaccctctatcagatcaggacttaatttcactttgagagcctgaggcttccttacgatctgggctgagttgaggctggggcagaggggcgcagaggtttggggacaagtctgtggatccagctgctttctgaagccgtaggcatctctgcagagctcagcctcgccacagttccccaccccttcccccaagcgtggccagtgcctgggctggcactcacaggggaaggcaggcatactcactcaccatccagagccaggcttatcctgggaaggtgatcaggcgctggcagaggtagctgccgacaccgcactaaggagtgtgccaggccctgacacagcagggtgggatgggaggggcctggcctgctcaggcggcctttgtccagggcctgcctggtagcccacggggatatatggaggagggagttcggctgctgagggttgggctgcctggtttcccagggaggaagctgggtgaaagcagacagcacattctgctgcgctggggggtgggaagaagttcaaagggagatgagctgcctagaccccttctctgagctcactgagaaaccacagcccctcagcaatgcaggagctccttgggcaccaacttctctagtctcattcccctacctcaggttaacttgtactttcatgttatttcatagtcaagctacactcttacttcccaaggataacattaagaggctggcactggggctgggcatagtggctcaatcctgtaatcccagcactttggggagccaaggcgggtagatcacttgagcccaggagttcgagaccagcctgaccaacatggctctgaccaaaatgcatgttctaattttgctcttggcctgtttgttggtttgaaaaaagggtagctgagtaaaaagtcactgtagcctttgagttgggttttgttgggtccgtggtttagctgatccccattccggcttaggtcctcgtgcatgtcctcctggatgcctttgtatctccagggcctagcaggggctggtccccactggatgtctgacacatacagggtatagaggggtgtggaagccaagacctcttctcagaagagggaggtgcccttgcattttgtctccaagctgctgggtattctcacccaacctctcagcgccaggcacccttagggcagtgccctcttaccctgtagggcacctctctggcaagcaccggggggctaactgctacccactgcactgccccaagctgggaagaaggtgagtatgcagagctaagcaggcctgcagccagatcccagctatgctaccctgggctatgtgagcttgggcaagttagcatacatctctaggcctctctttccatggatacagagaagatggtgatgcctacttcatagagttcttataagaattccctgaggctaggcatggtggctcacacctgtaatcccagcactttggaggtcaaggtgggaagatcaattgagcccaggagttcaagaccagcctgggcaacatagcgagagtgcatctctaccaaaagtgatttttttgattttttgggacagagtctcgctctgtcacccaggctggagtgcagtggtgtgatctcggctcactgcaacttctgcctcccaggttcaagcagctctcatgtctcagcctcccgagtagctgggattacagatgcctgccaccatgccaggcaaattttgggttgttttttttttgagatggagtcttgctctatcagcaggctggagtgcagtggcgcgatctcggctcactgtaacctctgactcccgggttcaagcgattctcttgcctcagcctcttgagtagctgggactacaggcgtgcaccaccatgcctggctaatttttttgtatttttatagaaatggggtttcaccctgttagccaggctggtctcaaacttctgacctcagatgatacgcctgccttggcctcccaaagtgctgggattctaggtgtgagccaccgtgcctggccactcagctaattgttttgcatttttagtagagacggttgcccagactgctctcgagctcctgacctcaggcccacctggcctcccaaagtgttgggattataggcatgagccaccacatttggcctcctttttggtgttttactgacagggaagttgtcttgagaacactgctcaatcgttttctctctggctccttacaaccaagaaggaaaaannnnnnnnnnnnnnnnnnnnnnnnnnnnnnnnnnnnnnnnnnnnnnnnnnnnnnnnnnnnnnnnnnnnnnnnnnnnnnnnnnnnnnnnnnnnnnnnnnnnnnnnnnnnnnnnnnnnnnnnnnnnnnnnnnnnnnnnnnnnnnnnnnnnnnnnnnnnnnnnnnnnnnnnnnnnnnnnnnnnnnnnnnnnnnnnnnnnnnnnnnnnnnnnnnnnnnnnnnnnnnnnnnnnnnnnnnnnnnnnnnnnnnnnnnnnnnnnnnnnnnnnnnnnnnnnnnnnnnnnnnnnnnnnnnnnnnnnnnnnnnnnnnnnnnnnnnnnnnnnnnnnnnnnnnnnnnnnnnnnnnnnnnnnnnnnnnnnnnnnnnnnnnnnnnnnnnnnnnnnnnnnnnnnnnnnnnnnnnnnnnnnnnnnnnnnnnnnnnnnnnnnnnnnnnnnnnnnnnnnnnnnnnnnnnnnnnnnnnnnnnnnnnnnnnnnnnnnnnnnnnnnnnnnnnnnnnnnnnnnnnnnnnnnnnnnnnnnnnnnnnnnnnnnnnnnnnnnnnnnnnnnnnnnnnnnnnnnnnnnnnnnnnnnnnnnnnnnnnnnnnnnnnnnnnnnnnnnnnnnnnnnnnnnnnnnnnnnnnnnnnnnnnnnnnnnnnnnnnnnnnnnnnnnnnnnnnnnnnnnnnnnnnnnnnnnnnnnnnnnnnnnnnnnnnnnnnnnnnnnnnnnnnnnnnnnnnnnnnnnnnnnnnnnnnnnnnnnnnnnnnnnnnnnnnnnnnnnnnnnnnnnnnnnnnnnnnnnnnnnnnnnnnnnnnnnnnnnnnnnnnnnnnnnnnnnnnnnnnnnnnnnnnnnnnnnnnnnnnnnnnnnnnnnnnnnnnnnnnnnnnnnnnnnnnnnnnnnnnnnnnnnnnnnnnnnnnnnnnnnnnnnnnnnnnnnnnnnnnnnnnnnnnnnnnnnnnnnnnnnnnnnnnnnnnnnnnnnnnnnnnnnnnnnnggaactcaggaaaggtagttctgttccccttcctgaacctcttcctcctccctcccctgcaacagagaacatctgaagaacatagaaacacagaacacagaaatctgaagtagtttaattctaggccaagaggacccccagccttcccaagccatagggggctggtgggcagggcggcacttagctgcctggggcacccagtacctgtcatgaggcacttgccctggccaaaggtcactgccaaggcacagtcactccagagagtcaagaggagcagagactccagagcagatggaaggagagtgggcttctggggattgcaccaaggaggaagcagaagggatgtgcagcagcagaaaaggaggaggaccggggggttctgagggcttggggtgatgaggccagagttccaaacagggtctgggtgcaggatgaggacagaagaaaacagagaacccaaaaggggcaagaggttggtcccttactttcactctcctgggaggaggatgggtacaccacacagttggatggtgcatctttgcctgtgggaacaaacagaagggccattaggtgggtgtcaggcccaggaggccagggaggcttgtccaggccagtgtccccctcctgccccaggttctcacgctagtgcctactcggcagtgttggcccagtggcagcctgcacacgtttgcacccacacacaccctggcatgttctcaccctgcccattttcatgccactcccaggggcatgtgaatacccgctggtgcccacacctctatccgaaccatgggcccttgcactctcacctgaacagacagacacacacacgcatatattctccaacagccattcagccatccactgagtcatgccccagggcaccaatcagtcccactgatgcctatacccacagcagccatgatgtcatcatgagcagtcacactcccagcccaggtacctacagcctcacacattaaaaagtctcactgtcacaaatggagccaggtacaccctccctctccatcactccagctaactacaaacccacactccacacacccttgaccaccccatctcacccacacactccctggagtgccagtgttacccatgcagcctcacactctgcccagcacagtgtcatgaatggtcacaccatcagacaggcagccctccacacacgccaggctgtcacgtgcaggatgccctcacctgtctgcacctgcagctccatggcaccatggaccctgtgctccgagtggtggtgcctgatctccaccaccaggcagcagtagaggccgctatccagcagggtcaggttgcgcatggtgatggagaagttgccatggtggtcggaggccgactccagcccgtggcgctgagccaggtcgtggctggtgttggcagcctggtggcctccatggtgcaggtgaaggtcctggaacgtgaggttgcggatgggccggcgctctgagcaggtctgcacctcgcccctcgagctgcggtaccacgtcttgtagaaggtcacatcgtgccctttgtccacagggcccaagagcctgcaggtgagggtgacgttctgcccctcgggacagacatacagggaatacggcgtggcgaccttgaaggctgccaccggacctgctcagagagaggagagccctgtcacctgactgatccagtgctactcctggcaaccccagagcggggaagaaccttagcctctgctacttcccagccacaggccaggggcatgtcagctgacctccctaagactgccttctgcatttgttcacaaaccccactccatcctaggctgttgtagggggagtcacagaagcttccccaactaggggtgctcctggatgctggacagggcagggagagacttggagggcagtgatgcagtcgggtgtgtccctcttcccagtagagtatatgcaaaacctgttgggtgggaggcaggttggggagcaggaaggctgtttcgaacagcagctccttgtccttggccgctctgtaggggccatcaacacctctgccccttcctactcctaggactgaacatgccttcccatccttgccagggagcactaagagagcacctgcgtgtgcaaggcctgggccaggtgctgcatctcacctgcatgctgaatgcatggcctccccttgagcagacgaggcctgcattcccgacagcagaaccccatggcaaaggcaatccaatgccagccctcagggcacttggaggagggaggaaacagccttctggggacagtcagggacttcctgaaggagggagagtctttggacttggtgcatagataggatttcagccagtagaaagggtgtcctaggcaagatagtgtgaaaatgggaaaacccagtgtctgagggaccgggacagagagtatatgaaaggtcatctcatccatgcacgtccttccagccaaacttagaaaactgtctagttctgtttggtttttttcaccaagcaaatgaagcaattccctggtccactttgccttatcccaatcctccagcatttaattgggttgaccctcaaaaccatgagcttttgaaaacagaatattggatagaggccgcgtttctatctaactgtatgagcctcagtttcctcctctgtgcagtgagaaaactattggctacaatgcagggttgcaaaaggactagatgagggaaagatgagaacacaagatgtgagctctaatgccctctgcagacatctgagggatagctataattattatgcgttggtgttatttttatttatttatttgtttttgagacggagtctccctctgttgcccaggctgaccttgaactcctggcttcaagcaattctcctgccttggcctctcaaagtcttgggattacaagtgtgacccactacgcccggccagtggtatttttattttaaatggcatgtcaggctgttgtgggtctagcagagagggaaggagggttagaactatgtacagaatccaaactgatacatccttttcattgccccagccaggggcattgcccagaaccaatataatgccacatcctccttcagatgccccttccctgcccttagagcccaggaccctcggcggcaggctgggacccactggaagagctgaaagccttgcccagccaggagggaggcagcctggtggggcttctggagctggccagcctgtactggaccagtagctgtgagccacttagacgctgagccccgactcctcactcacagatgtttttcccagaaatgaaaacatctccctggcagagttgaggcaacggttagtaataattcacatgaagtgttctgtaagtgccatgcgagtagtcggcgcttggtacttgggagctagacaggtctctaattcattcagcaagtcaagaagtgcctcctaggagtgagaagcacagtgggatggagaagccagctttaaagtctttcctgctaaggtgtgaatgactgataacaacttgtgatccgatcctggggcgcttgtgtttaaaggagagtctccaaaggcaccaaagccccaaacggcatgtctgcaagagtggagttttaggcagagagccaagtctgggagccccagatttttggagtcattgtcagggtgagcagagatttcagaacttctttggcaagatacaggtctccttttcaggcagaaacacagagacccagaaagggaaagtggttggactgaagttccaaagttccagagggtatgatctcaaagcctggagcatgggggacttcaggtaacgcaggatctaggcagaaccgtaataagaagacacagcatgtgttgtgcactacgctaagggtttcatgggcatatctaacaatgccataaggtattgtttttattcccattgcactgatgaagaaactaaggcacagagaacttacgtaactcactgatgatcacacagcaagcaagtgctagagctagaattaaactcagacacatagacactatactgatgaaaaaaaaggccagaaactgggagcccacaggccacatccagccttcacacatatttcattggatcctcaaaatctttttaattttcttgagatggcaacatttaaaaaccaggaatttgacatgaaaattctgacttccagctctccttagaaaatcagaagataatgctaaaccagctttcccacagggcaactgtcagctggggctcagtagcagcttttggggggcaccggcactccagttcgccagagtccgtccgtactactccctaataattccacctggcctgcttcactctctcaccgtggtttcttggtcctgtggacatttgagtttgtgatgaatgagtgtggcttcttgggctagctggcatgggactctactgcccaaacccattatgctacaaatctgacccacagactcaagagaggagatgatccacccagggtccccagggaaagcctggcagtgcagggactagccaactctcctctgctaacccactgcccttacccctgcagcaggctcagtggaaaaggagccccaggaagcttggctgtgcccctggttttgtccgtgctggcctggacttccccttcacacctgagtggggtgggtgtagctgcaaaactatggctctgccgggaaacagaagtgaggaggacctagggaaagggctctcccacgtactcccaggaagaaacaaaacctgccccaagggggccctgtgctgcccccttccccagcaggccatgtggcaggtcccaccagcacctctcccagcttctgcccctttctccctttgcctgacatcacctcctaccccagagccaccccagggctgggagctgaattcagctccagcttcagctacggtagtatttaccaccagcacacataccttgggggctggccaaagggctggctcagcagacacggggctgcaggccagaggagggtatggcagggcaggcagagtagagctggcagccaaagcaagatgcgcaaagctgagctgggtggggttgggggccctcaagtggacagaggtgtggacaagtggggctagcgtggttgttggcctgagtgtccctgtgaacaaggtggggcagggcaccaggctgggagccctcagggtctaagcaatggggttaatgaccccaggattgtacccatagcacccgcagcagtagggaagggatgttctcccctggaggcaacttccttgagatgcacggcgggtgggtgcatcagagagaaagcagagttcagggagtacgggagagggggcattgctcaatcccccacacctccccacccctcacacactggccacccatcccacaggtcccaaaggagttgttccccttttagaaaaaagctgtcttaggattcaagtttggggagcaggggaggatgttcagttttcaagcaagagggccagacaggagagggtccaggacaagccagagggacaggacaaaccaagggtccacaggggtttgtcctggggagggagggaaggccagaaaacaccccatttactgtgtctgagactccagctgggacaaggcccacagcagcctgtcgttaggaggacactcgaaggcatggcatgggggagaggggcagcgcacagcacgcagaggggcctgcacgtgccccgcggactccacatctgtgcacatgcctgtgtgttgtcagggaagctgtgcagcccggctaaaattacaattctttggcgagaggatgttgcttattgtcaggagcagatccttttggacacctgggtcattgtcggagaccgggaaaagtgggtggggaggaaagcccctggctccagggtggccaaaagcatgtgggacaggaaaatgacccggggcctgggcctgagcatgtgccaggcgggaaccgtccagttgccgtgctgctgtcaagacccaggccccccgcccgccacccgccacctgccaccaggtaaggaggcagggccacctagaggaagagtgccgtgaacctgggaaagcctgagtctcaggagtaaaactctcgcttggattgcaacgtcctggggcctcagtgtccacttagttgtgccctcattgtgtgcccttgggcagatcccacgcttctctgagcctccgtttcttcatcttaacctgagggctgccagctctaaaatcctgtgggcaggagggaagagctgtcttatgaccatgtattatgtgctaggctcttgctgagcatcttatacctgtcacatttagttctcataacacccccaacatgggtggtatcatccccattttaaagatgaggaaacagactcagagaagtgacttgcccaaggccacacagcgctgtgtgactgagctgagattcacaccttggacaggccagcactgcagacaggaagagccacccacctctccagaaccctccagtgggcaggcggggctgatgcctcatccttcagctatttagaaaaaatgaactgaccgtgcattgacctccacgccctccgtgcaacattcctgctctgcctcagacccaagctgaaaacatcattctttcattccacaaatatttaccaaggtcctaacatgggccaggcccaggcagggaggctgtggggatgcagagttccatcaggggcatctgctcagaacttgggcctggacctgtgcctgagatttctagctgtggcaccctcagatgtttctgtcccagtacaagggaaaggagctcttgttggcatcttctcagaatgccagtttttgtgaccttcacctctctccacccagcaggccccgggtgacccctgtgagtgtgcacgggatgggtgtgtgtgggtgtggacaggcctgtgtatttttcatgacggggcgtgagcttagcccacagtcgccaaggcaacgccctagcctttggaggtgggacccaagcttggttagtcgggcctaggaagccccacccaaacagctgaactctgaccagctgctagaggttgtcaagtaaacagttattaattgcctgctgtggctggccctgcactagatgcaaaaggtcccgtccttggtctcacaggacatcccaaagagaatgggacctggttccagctccccgccaggccccatcccccaggatggtccacaggctggggctggggctgtaggaaaagactatgttctgtctttatcaagatgcagagggaaacagaggcatggatcaatcaggactggggctgccaaggctaagaaaggaagcgtcacaaggcataggctcagggcctgaagccagcaagtctgccctggggctttctggccagtgaggacaaagggcatctcagatgtgtttattgatacctgcccccgcaggaagtgtccattcacatcagaccaagggggctgggaaggggaagccaggctctattgaaggaagcggcacttccagcaccttgggaaagcctccgtgcatccggggctggagctggaggctagcatgcctccccggggagggcctaggcagctggccagaggtcccggcccgtggatgcttctgtggatgaacccctcccagactccccaggcccttttggaggaggactgtgtgcagctcaggctcccggctccagccagccaccctcacgcttctatgctgtgaagacgtcctcagggtccagctcaagtctttttgccccctactactctgtgccaggcatcattctaagtgcttgtttgtttggttggctttgttgctgttgttgttgttgttgttgtttgagatggagtctcgctctgttgcccaggctggagttcagtggtgcaatctcagctcactgcaacctccgcctcccaggttgaagcaactctcctgcctcagcctcccgagtagctgggactacaggcacccgccaccacgcctggctaatttttgtatttttagtagagacggggtttcaccacgttggccaggctggtcttgaactcctgacctcatgtgatccacccgcctcgtcctccccaagtgctgggattacaggagtgagccactgtgcctggccgtttggttggttttctttagtgagctagggtcttgctcttcactcaggctggaatgcagtgacaatgagatcatagcccactgtaacctcgaactcatgggctcaagttatcctcccacccctgcctcccaactaggactacagacacatgccactatgcccagctaatttttaaatttttcgtagtgatggggtctcgttatgttgtccaggctggtcccctggcttgaaactcctggcttcaagagatcctcccacctcagcctcccaaagtgctgggattacaggcatgagccactgtgctcggcctcattctaaacacttttacatagattagtttatgtaatccttccaccctatgaggtaggtactagtatcatctccattttacagatgagaaaacggaagcacagagagattagtatcttgcccacagcctcacaactaataagtgatggtgtcaggatctgaacccaggtagtcagcctctggaggtctggtgccatctgactactctctagagaatagaggtagctggggactgactggaggccccacctccttcttgaagacggacaaatgtcatgaccaatgaaagcccagcttgcctggccacgtctaccacatagttttacttttggttttacattaaataacattgaatcatatatagaagaggttattccctttacaattatttcagtcctgattacatcaaagagaaagtctcagtttgatgctaatatgtctctaaaacatctttctctcacttgctaatctccttttctttttaaattttattttattttaattttttgcaagggaaagcagcagttttcagactccgagccttcccaggctaaagtttccaactagaattcaatacccttatatggttttcctgttacgttcttttatggttttgttctatttatgacaagtgatactggctttccactaatgacagcgataaaaagtttccttttaaagatctacatactcaaataaaagaatgagtagatttaaagaaaaaaataagtaaatattatgaaaggcagacactgcagagatcacaaaggtgataagcaaatgactgaagctagggaaacaccatcatggaattaaccttcagaggagggtggtcagcctcactgagaccacgtcacccaacctgtccattgcacagacaaaggggaagtgtgtgtttgtgttcccatgatgagtgaacagcagaggcagggtttgaccccaggtccccatgggaaataagatcctacgcagaaaggctaaaggaatgggcttgcttggcttggtaagtagcagagcaacctcattattggattactgatgagaaagatggtggccactgtctttgtctttggtgatggccagccaaagtgaatggaccgaatgtaaaaagatcagatgtaagaaagatccaccaagataagcaaacccagggccaggcttgccttcaagttgcaatgtccccatctcctgacaactttaagaagagaacctgtaggcacctccatgggcatttcagactgtgagggcctacaggggctcacaggtagctggacgcagcccatgcacccttcatactccaggctttggagaatctagtcccagtgaagctcaccaatgccttcccaggccctgggcactccattaggccctgtagagagcaagcagcttagatagaaagccaatggcatgtggcctgcagaagccaagaaataccataatattacacagtattcacgaggagccgggtgctgtgttaagtgttcgttcattggctcttcacagttgccctccaagggaggtggtatcatcttcccactttagagggaggggaacttgctcagggagactgaataacttgtccaatatcacagagcagtaaatggccatcttgggatttaagcctaggtctgagtgactcacaaagcccaagagttaagcaaggggctgtacggaagccctggctttgccatatacaggcatgctgggactgcagctaagggcatctgtggggccactggaagccacagtgctgatccctggcccaccctcccctgggagaccagactgaccctgggtcattggttggctaaagcctggggcctcaagtttggtatgtggggctcgctcactgccaacgggttctccttgaggatccctttcttcctttcatctgctcaggcctaacaccccatacactgtgtgcggatagggaggtgacccctttagcgtctcagcagcacactcctgcctggaccaccctctcccaggaaggtcagaccccagcggaacctttgccctgcttgggtggaagcatgaacaactagtacagctcagcaagggactcccagtattgctggcccttgggtgtccctggcattgggtagatgacccctcatgccagggactggcctcaaggctgttcctctctactccagagcctctgggcagtgggttgtggatttcctaagagctgaccattgctgcgtcagaggcttgcagcactgggttactcaacaaggccctgcagcctggtttgctatgaaggagaagatggggtctctcgtccctagccccagtgcacttaaatgtgctagtcccagaggttgggagtcctgagtcagcctgtgaggacagggcaaggacagtaactgcctcgggtcctgggaatgtctgtggggaagaagaggctctgctacccttgagatctgctgggtcctggtccctaagtgtacctctccacccatctcaccctgagtcaggcccaggaaaggggtatctttggtgtttcctgggcttctgaacaccacattcatcactaccattctcctcagtgctggcccaaccccaagagctggagaacaggctggccccggccactctatctcactttccctggcataaaggctttgaccttgggcaacatacccagggcaacccagcacctcggcaggctggtgatcaatcttctcaacttacagatcctgctgaccatgcctgcaaccaggcctcccatctgctatctccctcagtgcacactgtcctagggagttgggtgaatatctattatagtgtgtccatgtcacagttcagaatcctgaggtcccagagcaattcaaatgcttctggctcctttcagtggaaagctgcagccagcctaaatcatctccctgtgctgggcccaggaagagatgaccctttagtataccatgttgtttgagtagccaagacctctgggagtaaaggcccctggccatataagcaatataggggaaggcgtcctgagctcctcttggggcctctctgctactgggtgctctgcaagctgggtccctgtgccctggatctctagaaatgtttctcaaattggggctgctgaacagagggcagcccagccaagtgagggcaggaagtgggcaagaaagcaggaagggtctcacagggccaccagggagggcagtgcagggcaggtggcccatgacaggtgggatgctggcttgcctgcctgccaccatcctctgttccttctggaagccatgccctgccatgagccatggccttggtgctgagactgtccattccacctcccattctcctcctccctctgactgtcaccttgagaagcatccaccctggggcttagggcagctgtgtctgtgacatgtggagccctcctcctcctcagaggcccaggccagcctccaagtgctgagatagccagctgcctgtgggcacccaggttgctaaggtatcttccaggttcagcctcctcctctccctcttatcctatcaccctctccttctattccatcctgcccattgggtccctgtgccaagccctccacctccctcctgcctccctccgagtccctgcatgactcatactttccctgggccctccctataaagtttggttccacaggctctttgaagagatccagcctcttcagctctgggcaggcaagaactaggcaaccaggccatgggtaccagggcctctgcccccagcccgggagcccctgtgttggggccaggatactatctgaacatgctgacagtctggactttggaaggggaaaatggtgcttccctgtgtgggcttctgtgtttgagctgaggaaactgaggccagagagatgccgtaatttatccagggacccagaaggggctcatagctgagctgaagagtgtcccacatcctccccagtactccacactggtccctgagtggcagccttgctaggatggcaggaatcagctgaccacttattcctgggccatcagacccttagaatagggaccaggtgggcagtgctgcctctgtgtctgaaagtggacccaccgtgaccagtgcccagtgcccaccaaggctcagccaggggtttcaccagggcatggggcactggctgagcataccacgccctctgtgtcctctgcaacactagagccctgagactagaggggcagaaagatgccagctgtcaaaagccagtgatatccaccagaacacactgaccgcccccaccctgtgcctctccttctttgcagaagctacctgtgccctgggttctctgggcagggaagggctggacaggcagccctcaggggacagccctgcctgccacttgggcagctgtcagagcatgcagatgtgcccgatgcctagctggggcacttggcacagttgccactgcaccctgcctaggggtcccagcagcctctgggcggtgggtggagtggggtgcacggtcacacaggctgagagggcccccaggacgcccccatcccacagttcccactccagtctgctgtcttctcccagctttttcccagcgccccgcctcccccgaccttacctagggacgcagccaggaagagagcgaagagcagggatccccagcgccagctgccggcctccagggccgtggggacgcccatgtcgccgtcggacgcgcagaggaacttctggtgccggggagcgggcgggacgcggccggcgcggggaagcctcccgcgactgagtgcgagcgagtgagcgctgcgggcggccccagcgccgtgctccaggcacccgcccccttcgcgcagcgcccccggggggccgtgtgggggaactgcctctccgagggccgcgtgggaggggcttcccggaggccggccccgtgggtggggagccagcgtgcgtcccagcgagtcagctccacttgatcggcagtttaaagcccgttctaccgtcccccagtccttttggagagaaattattattgctgcgcagcctaagaagtagatctacctctaacagcgtgatagacgttaccatggcttgcatctgccctcagccaccagcctttgagtgatctggggacagagacttgtaccctacatcctccagccagaccagggcttggtatgtggtaggcactcccagctgtggaatgagtgagtaaatgagtgaatgaatgaaatctgacattgtgaagagctaggcaagctggagccagtttaactgtagattcagagcctgaggcaccctgagtgcatgcgcgcgcacacacacacacacacacacacacacacacacacacagaacaggtgcaggactacacgccaagatcagcacatccctaccccgggacacacacagatatgcaggcaacacctgttggcgtgccccacagcacatcctgcaagctcccctccggcagaggcctcagctgtccgcctggctgtgcacccgccctccctccctggtgcctggatatctgcaggacactctgatgcaccctaacttctagtgcctctgctcttgcacccacacccagcactgctggcaccactggaatgtctctcccctcctaattcttctcatccctcagggctcagctcaagtcctcccacttcacgaaatgtcctgacccttcctttttcccagcaaatccttactgtccacacccccttcagctaccacctccagcctgagataaccagcagttggttcttcttccggctgttctgccctccagagcgaaactacaaacctctctctgatgtttctgagaccctagcacaaagctgggcgtggagaaggttttactgcacttttatctgaatggacaaaccaatgagtgagtgagtgattgtgtgatggaggagcagaggtgatcgtggccaggaccagggatcacaggagtggaagagcacagccattttactcagtttaccccagtctagctgaagcttccaggggtttttctggcactttagggatcttgggttaataggtgactcctaggctgagaggcagaggacactcagagtctgactgggtcaggaaccagggtatcaggactcaatgggagccaggagtcctgggggccttgtgggtggcctgatccaagtcacgggctctctggaggcccttagcccttgctctaagggcagggaaggctacaacagaggaaggctgaggcatcatgttattactaagtgaacttgtgcaggcccagtccccctggagccagtgaactccccaggatgggagccccagaggctggcaggacataacccaggtccttgggcatgctcctggccttgtgaccccaccttggaaggcagcccagggcccttcctgctggcatagcatgagctcccttccaccaggggaggtacaaagccaactgagatcaggtggacactgggcccttctcaccctgacatcctctggcaagtgaggggggtcccttaagggcaagatcctagagcaccaccccatctcaacccttcctggactggctttgctcaggacacccttgaaaccagactccctcttccccagggcctagcagccggggagggcctggaattagagaaaggggagcaattgccctgccaaccccttccccagggggatagagcctctgagctgggcccagttccctccccccttttcacttcctttctccctaccacactgcccaccactgagcctcctggggttgcatcagggtgagacacaggcattgcccaaggaccatggtccagaaacctcaagcactgtttcctcaacaccagggcaggacaggaagggctcagctgagagggcctttggagcactgactttctcctccctccgagaccagaggaagtcaaacccaccttccctccccaagcccagacctggtctcagagcaggaggggctccaaggcccaactctgttcaaactctccactcccagcccctgcagcctgcacactccatcatgtgtttgtgcttgttttcattaaaaatagtggtgaaggccccaaatattcgaataaagatgactgtcaaggaaagccaccatgtccatcttgtggctctgcagggcctggaggcagctgtgagtactctctactggtgaagggcccagccttgagccttcctgagtccccttacttgccggcaagaatacaagagcaccacattgcaggaaaggggctgaattccagcctccctgttggggaggggatgctgacatttcccacattcccaaactcacctcccaaactccctgagctagaaacaactttagaaatcaagccaggtcctttattaaacagacagaaaaggtccagagaggggatgtgacctgcccaaggccacgcagctccttttcaaggctgccaaccctatctgctttggaaaccgtttcagcaaacacccaatgccctccacccccaagatccagagctgcatatcagaggaatcattgcctcctcaggggcagtgacagccttcttgggtccagatcccctgcccatctgtccattcttccattggtagctccagagccagccagtcccaaggaaaaaaccatatgcaaattgcctacattgagttgtctgtaccacctgctttctgttctctggcctggcaatggcctagtcacgttctctctacccagacacctttgcagtgattaacaccttattattttatattagtcactcattatgatttgtattagttagggtcctggcaggaaacagatggcacactcagaaagggttcaactgaagagagtttaatacagggactgtttaggaaggctggtaaagcacccagagactagcaccaaccacaggaagccactaccactcacatgtccaaagggaaagaagaggaagtgatgttctggagcccagtgaaagctggtgctatgaaagggggacccctgtccccaagcaggagaaacacagccatgggcagaaccgcagtgaggaatggagggagtgtggaagaaacacccccgcctctttctccccactgctttcatcttcagccagggcctcccattggccacacccagcaggaagctggatagcaagggagccagggtaaggcagttagtccacaggggacatcttcccaggtggagaaaggcaggaagcaggagcaagaaccatttctagttgattcttgagtgctgattgccgagttctgattagctgaatattacttgtggtccaattgactcaagcattggcagagatggccgatcacaggagagtatgttgtagaagctgttcttggaatgaagttatgttctgtgagtcttatttttcacaggtcaacaagttctgcccacgaaattgccacaaacccaatgtcctccttctggaaatgctgaaaatatgtatttctttcatttacatgaacaatagatgaaggttaaatatggcattgggccgagtgcctcacattcttgcctcttgtagtctggcaggacatataggctcaataagacacaggccctcgtaaagctctgagctggggtgactaccagggttcatcccatatgccagtcttaatcactagaccactgtgctaacaaggatcccaagtttgcatctggcctcagcagttctgtgattgattagtgatgtctgctggggtcgcagacataggagtggtggtgccagtgccatcttggacagagcagttaccttacttggcttttggtggagtttttgagctttctctctctaccagcctgtgacctaccccctgctttcttctccttgccctttctgtttgagtcacatggagtgagttcagcccaggagaacagccatctggatccacctcggtccctctggccacctgaccaaggacgtgacccactcttttccacaggccaccacgcacgtgtacgtgaccattgtggatgagaatgataacgcgcccatgttccagcagccccactatgaggtgctgctggatgagggcccagacacgctcaacaccagcctcatcaccatccaggcactggacctggatgagggtcccaacggcacagtcacctatgccatcgtcgcaggcaacatcgtcaacaccttccgcatcgacagacacatggtcagcagctgatggcaggatcaagacaaggggcgaaacctatccagggattggcaaggagttcagtgacactggagggggatggagcaaagatgcagtctaggggaaactgtgggggcactcagtgtgggaggatgaaaagtttggtggagtggagcctggtctagggggtggcagtggttccccatcacagctccaatgtcagggcctacttcccaaattggtcagagggtgctgcagacctaccacccctagatccatccttgtcccttccctgtgtcccccagggtgtcatcactgctgccaaagagctggactatgagatcagccacggccgctacaccctgatcgtcactgccacagaccagtgccccatcttatcccaccgcctcacctctaccaccacggtgggtgcatgggacacagccccaacttgggcttggaggttggggaaggatgggacccagaaagctccgatgcgggaaggggttaggggaagattgtccgagggaaatgcctaaatccaagacccctgtcctaatctcagcaactcactcaaacttgctgtgtgactttaacgaggtcactgaacttccctgtgtggctacatctgtcagacaagtgacaatacctgccctcctctccttcatgggaaaaccatgaactctgggtttcaagtccttgctcttccactttctagctgtgtgaccctgagcaagttgcttaacctccctgcttccatttcctcatctgtgaaaggaggacaatacaaactatgttttaaggagtgagaggagcaaatgaaaccacgtaagacaaccacagtgcagcaacaaatagaagtttatgggcagtactattattatttttttgagacaagttttcactctatcatccaggctggagtgtagtggcttgatcacagctcactgcagactcgacctcctggactcaagagcaatcctcccacctcagcctcccaagtagctgggactacaggcatgcaccaccatgcccagctaatgtattactcttttattttttgtagaggtggggtcttgctatattgcccaggctggctctgcctcagcctcccaaagtgctgagattacaagtgtgaaccactgtgtctggccaatagcatttttattaatatgatgattgtgcccataaaaggctttggcaataatgataactcatccacatgcatagcttaaaagccccacccatatccgacttcccatatgattcctgcatgggcctcatgaggcagaattatcaggtccatttcacagaggaaggaactgaggcccagcacaaagctggctggggtgaggccttggctaagcttttccaccatctcaggtgcttgtgaatgtgaatgacatcaacgacaatgtgcctaccttcccccgggactatgagggaccatttgaagtcactgagggccagccggggcccagagtgtggaccttcctggcccatgaccgagactcaggacccaacgggcaggtggagtacagcatcatggatggagaccctctgggtgagtggggcttggggcatgccacccacagggtctcacctgcacacccgctcaggggaggataagaagggaggtctcaaggcatttggcctcaccattgtgtgattttgtcctctctgggcctcagtttccccatctatgacaatgatggaaataatcttctcccacctcttattcccagagatgtggcgagaacaccctataatctgggaacaagggctggtggccttggagggacacagactcctttaagaacatgattaaaaaatgccctgttgcatacccagaggaagggccccagggcagacgagggaagcacatccttacagtgcgtgcagaacacagcccccgccctcaggaccacaaacccacacaccaagggagcgcctggcttgctctgcacatctcatagtcacccattcacagccctctccttggatgaagagcagagtttgccttggccttgagggcaacttctcaagtccattttcactcattactatagagtgggaatcccagatccaaaggcgccagctagggtcaggcaaggagccttcgtgggagatggtgtaggaaagaatcaggagcagtggggactgcgcagccacaactcagctcctgccagtagtagctgtgtccagatcccagcctgggagtacctgggcccattttgaaaagaaaagcagaaatccaaatctttgtgaaacatcctgattttttaattggtcgtgcaggaaatatttcttgagtacctccagtgtgccggccatgttccaagagctggggataccaaacagatgcaaatccctgccccgtagaacgtacgttccagttggaggacacgggcaatgaaccaactgactaagtagatgacttagtatactgggaggtgctaagggctatggagaaaaataaaaccaagccggaggatggggaatgccagggtgaaggcagcaattgtaggttggcaaaaacctgaaggagggcaaaggtgagtcaagtgacatctggggaagagcattccaggcagaggaaacagcaagtggaaaggcactgaggttggagcatgcctgggatgttcacagagaagcaaaaaggcctgcagctgggggaaagttgagcaaagggaagcataggaagaaatgagaccagagaggtaatggggccagatgttgtcgggccttgaggggcatcatgagggcgtggcttttgctctgaggtgggaaccctaagagggctttaagcagaggagagacattatttgacttaggtttcagcaggaccactctggttcctgtgatcagaacagactgtaggggtgaaggaaaaggagcagggaagtcggatgggaacctgctgcaatcactcaggctagaatgaggtagccgggagagggtggtggcatcaccaccaaagggaaagaggtggccacctctggtgtaattcagaggtggagccagtaggatgtgctaactgattggctgtgggatgtgagagaaagtcaaggttttggcgtgagcaacccaaaagatgatggcgttgccattgacggatggagggctgcagcaggaggttgtggagggaaaggagggtcggttcgagataccaggtagaggttgcgtatacaagccaagagttcaggagagaggtctgggctggagacgggtatttgggagttgtcagcatagaggtatttaaatccaggaaacaaagagcggtgcgaagattcaacagtgaacccaagcctcgcttgcaattaagaggctgggggaaaaaacaacaacctatatatggagggcccaagtgacagaatgagagcccctgctgcccagagcttatgaggggtcactctgttcggacatgctaccctttcggatcccaaagtctcctctctggccaagcactaggccttcctctttggaaaccagcagagcaagggcctttctcttctgctgttttcacaaacacagagattttgtaattttatgggagtccctggagcacaggaggatgccggcacctggtggagaggcaggtgctgggtgagcagctgaagcccctccccatgaggggcccgctctgcaccccagcctcaaggcacagagcacacacctgtgctccagcacagtgcagacctccatgccatggcctttaagccacaagcgaaacttcctgggttcaatccacacgtgattgggatgagccttaagaatttggggccttgtgggggagtcccagcagactaacaggcaggctctcaaaggagtgagagacgcctaggagtttcctaaggctgacctgggtgggaggcttcctcccccaaggaaggaagagtagacatttagagcccaaagataactttggggtctctgagcgccacccgcatctcagaaatgatcaatgaaggcccagagaggtgaggaaggcctgatggtactgctgacatgggtcacgacatccatttcccacatctcctcccacctcggggttcatgttggtcactgaagggttgacggatgctacagccagcaccgctgtctggagagagctggtttcacagtgcaccactgcatggagggacgtgcctgggaccccagcttaaaggtcaccttcccaacactgcagcctgaggctggaaggctgctttctatagggagacagatgccagatttctgagcacttaccagccccactgagcccttaggaggagctgtgtgctcaaagaagagctgggagacaggccacatgcacttgagcctctcccgccagcgcctgccttctcagctgccctttctggtcacacccattccttggacccctttcctacatcctcaccctccctgaaagctccccgttccttcagaggcctgcctgggctccctttcgggatcagcacacacaaggtgggccagggtttgtccagcatcagcacaaccccaaggtggcatctctctattagcccatttttcagatgagaacatcaaggcaaggctccttaacatgcccaagggcacacaggcatgaagtccagatgcagacctagatatgattggacgaaagcctaggcttttaacctcctgtctccaggagttgtggagggatggggaagtctggccccagagcaagctgccaaggagaagaatttgcacaggggaactaggctggcccagcccccagcccctcaggcctgcctccctgagccttcaagggagtggtgctggtgtctcctcctggctttggaaggagagcaagaggccctctgcctgcatatggccggggcttgagacagggctgggaaacacctagaaagggaatccccagttctttggagaccttggggtgtcatgctcaggaaatcctgctttaagcagcttccaccccccaggcagggtgaagcctatgggacgggaagagcctgggagcggaagggctggtgggaaatcccagctgcaggtgggactgagaggggctgtttttgtacatcagagtgttaggagctggggacagggaattgtgaggtaggatgtgaagagacaggcagagaaaactgtgggggcgcctgggcccctgtccttgccatgccctgtgagctgtgtgcttcctgctgtctgtcccagagcaagtcagtgccccattctgggcccttccccctaagtattcaaagggaaagtgaaggaggtaactaaccttctctccattccatttcctgggggaatgcggagaggtggcctctcttctgcaggctctcccagttccctagctcacatcccctcaactttcttcctgccagagccacagcccccaccattcttgcctctccagctgggctcacgcttgctcactggtttccttccccctgtctcttctctccaccctccgtgttctcaccccgccccggtcagctctgagtggtgctgtctggaaagaacacaagtcctgtgcgaggcaatgggttaagacccagagtgctgggtttgaatcctggtctgtcattcacttgctgcaggagtgcagacaagtggtaaccctcccctgggctcccagttcattctccaaaggacacaagggactggacggtctctgggctgccttccaggtcagcatctgagaatctgaggttcttgctctggactgtcagacatcgggccctgcagcccagccaagaaaaggattctggggccacagggccagcggggctcttcagaaacatcaaggaaaggaaatcagggtcaccacaggtgtagggaacccactctgctttccaactatagctcaatatggggactaaatagagggcactgggggcttccctgcccctcatccgtccccttctgcctgcccggtgcctgcgcattcaccattagcaaagcattgctttgtggtcagctctgcccttcccaatatccttttttacaagccatggcatgtgggatggatcgtacattgcgaagcacctgatgccttcattgatcaagagtgcttagacagtgggtgctagtgtagcaagaagcccccactttttcaacatagccatcttacccaggtcagtctctggcctgcctgtggcccagggaaggaagctgcttggtctggcacatgagggcatgagtggcccgtgtccgcctgcacccgtggtggtgatccgctaccacccacctgcacatcccagcccttgcagatctcatgaggatctgaagctggggtcactggaggacccgggccccagctgtcccccacctgtgacgagtgaggcttgctagaggaagcagaaggagtcctggggtctccacagttcctgccaatgcccgactaacttgggcctctcctggtgacacccaggggagtttgtgatctctcctgtggagggggtgctaagggtccggaaggacgtggagctggaccgggagaccatcgccttctacaacctgaccatctgtgcccgtgaccgggggatgcccccactcagctccacagtgagtctgggggccccacccgctggcttcacctcgctgcccctgtacttgccacagagattcttgtaaacattgttacccttgtgccaagagaggccacaggctgccctggagccaggccaggcctgcccctggggcccttaatagacctctcgccacatccagcaactctttggggaggctgcctttcagcgcccctctgcacccaacccctgccccatcactcccttctccatcactgcccctcctctgcctctgcctttcctgcttccctcatcatcctcttttcatcttcttgcctttttaatgttctttttcttctttcttcctctccccttttctctttcttctccatgaccaactgcaccctccctccctccatgccgcccttggcgaacctcctcctcggttgccatgcacaacatctgtcgctcttcctcccctccctcctccttctctgactggcccagatgctggtggggatccgggtgctggacatcaacgacaacgaccctgtgctgctgaacctgcccatgaacatcaccatcagcgagaacagccctgtctccagctttgtcgcccatgtcctggccagtgacgctgacagtggctgcaatgcacgcctcaccttcaacatcactgcgggcaaccgcgagcgggccttcttcatcaatgccacggtagggcctagactgaccccagggagcttcccagggtttccagtgaaaaagaggaccctgccctagaggcttttctgctgccaccatctgggctccaccgggctcccgttcctgcactgggatgaggacacctctgtgggaagcatggaatcttggattcaccagtgaaccatctctggagtccacctagagccagccctgaagcttgtcatgtgcagagatggggccagagcctgtgggaccacttggtttaatcaagacgcaccaaagttctcacttagcctcttgaggtgtctgtagatggccaacaacaccatggggtcctccgagggccatctctcagaagcagcaaggcctgggcatgagtgggtcactctcgccccggcgagaccctgccgacccacatttttggccttctagatcatctcttaggcaatttagggaggccaagcagagcagttggcatctgtgggccaaagtagaaagcagggaaaaggtctccatgcagctcaccaccctccacatcccagacagggatcgtcactgtgaaccggcccctggaccgcgagcggatcccagagtacaagctgaccatttctgtgaaggacaacccggagaatccacgcatagccaggagggtgagactggagggcactggtgggagtgggctgggagctagaggcgcatggagagagaacacatcacccctcctgcaggcagcatagccaggcttagatgcacaggctttggagtgagcacgtgctggcttcaaatcccagttctctccttcagtaggtgcgtggctttggctagttaactcctcttggcctccatttctcttctgcaaaatgaagatctcacctaccccaaagttgtagaaaggatgaaggagccaatatatgtgaaagcctcagcacagtgcctggagtgtgacaaacactcagtgaacatcaactatcattgtttcctccccaaaccactgatacctggacacacactgcatttgtgcatggggcacatgggcctgcattcacccacaagcatgctctgaggtcctggaagggctgcgttttccaggtggctctcccctcagaagccaaagaaatgagctcttgactaaagggaggtggatgttgcaaagcaaacagtccctttgggttgggggtcagctctgtccttccagcccatgaatctgtggtagatccctagccagaagccttcaggcccagttcatctcagctctgcccctgactagctgtgtggctcagccaaggcaccactctttctgggcctcagtttccctatcggtctagccagaggagacgtcaggctggagaaactcataagctacatgcccctcccatgtggtgctcctctgcttcctactcttttttttttttttttttttttttgagacagagtctcactctgtcacccaagctggtgtgcagtggtgcaatcgtgatctcagctcactgcaacctccacctcccaggttcaagcgattcttgtgcctcagcctcccgagtagctaggattacatgcacacgccaccttgcccggctaatttttgtatttttagcagagatgggatttcaccatgttggcgaggcttgtctcaaactcctgacctcaagcaatccacctgcctcagcctcccaaagtgctgggattacaggtgtgagccaccatgcccagcttctactccctcatttttgcccccactttttctcttttctgctctcatttttcctctcccttgcctggcttcaggagggccccgggtaaaagcagcattgagtggcaggactcggtgggcttaggggctaagccccactctgctgctaactcaccacttggctctgaatgggcactccccatctctgcaccttggttcccttgtctctgaggtggtgacagtgcacaggggtactggaggttctgaggtttgcgagtgtgaagtgaggcactggcagagtttgaatgaactccagccagggcaacaggaaggccttgaaggtcgagaaacaggactcatcttcccgcctgaagtgagatggaacaggattcaatcccatttgccacacctccgtgaaggagttaaatccctatttgccagactagaaaactgagacccagacaggggaaatgaggcacccaagatcacccagaatagggtcttcaacccaggtctttgaaccctggtgtgggcgcttttcagattttttttttttttttttttttagattcagggagtacaagcacaggtttcttaacatgtccatattgtgtagtggtgaagactgggcttttagtgtacccatcaggtgtacccaaaactacctattatgtccaatgttcactgaactgtgaactcactgccactcactgaacagtgaacattgtacctaataaataatttttcaaccctcaccctcttcccatcctcccacccttctgagtctccaatgactcttattccattctgtatatccatggttacacattatttagctcccacttataagtgaaaatatgcaatatttgactttctatttctgagtcatttcacttaggataatggccttcagttccatccatgttgctgcaaaagacacgacttcactctttcttacggttgagtagtattccatggtctatataccacattttctttagtcagtcctctgtggatggacacttacattgattccatatctttgctattgtgaatagtgtggcgataaacatgtgagtgtaagtatctttttgatataacgatgtatttccctttgggcaggtacccagtagaggggtattgtgggattgaagggtaattctgtctttagttctttgagaaatctccatattgcttgccacagtggctgaaggaatttacattcccaccagcagtgtatgagcattcccttttctctgcatcctcaccagtgtctgttgtttttttcttgagacggtgtcttgctctcttgcccaggctggagtacagtggcacaatctcggctcactgcaatctctgcctcctgggttcaagcgattctcctgtctcaacttcccaagtagctgggattacaggtgtaagccatcatgcccagctaatttttttgtattttaagtagagacagggtttcaccatattggccaggctggtctcgaactcctgaccttaagtgatccgcccacctcagactcccaaagtgctgggattacaggcgtgagccaccatgcccagcatgttgttttttgactttttaataatagccgttctgactggtgtgagagggtacctcactgtggcttattgcatttctctgatgattagcaacactaagcattttttctttttttctttttttttgagatggagtcttgctctgtcatctgggctggagtgcagtggcgtgatatccgctcgctgcaagctccgcctcctgggttcatgccattctcctgcctcagcctcccaagtagctgggactacaggtgcgtgccaccacgcccagctaattttttgtacttttagtagagacggggtttcaccatgttagccaggatggtctcgatctcctgacctcgtgatctgcccgtcttggcctcccaaagtgctgggattacaggcatgagccactgcacccggccacattttttcatgtttgttgccctcttgtatgtcttcttttgaaaaatgtgagttcatgttggtgtgggcttttctgatcatccacctctgtgccccaatccccaacctcccaaccctcctcccacctaggtgggggcactttgctgagcatggcctacaacgtgccccattctgccccttgcaggattatgacttgcttctgatcttcctttctgatgagaatgacaaccaccccctcttcactaaaagcacctaccaggcagaggtgatggaaaactctcccgctggtaggtgctgggcccacccgggagctcctgctgttgccaggcaccactggggcctgggatgcctgaggacctcccttatgcctaacggcatagctgaacctagaccccagtgggtgcgggaggggaaggatgggtgcagctccgggagatggtgggctggggctcccgggcctcctatgagcacaaagaagccacaggtctggttggaagagacagtcgtggtcattgttccccagggtggtctgagagctgccccaccatccctcaagaagggcatgtaaggtgtgaggactaccccggaggggagtgggtccacccctcactgctccctccaccccaggagtgcagggcatcccagggccttctggaagccctggggagcatctataactagaagtgggaggtcagggggtcctgggtaggccagtgtagccctctccccacacacatgcactgaccaggctcacctccctccagagggacagaatctcctctgtgatgtcccctgaggtggcacctgcactcctccagtctccccagcccctgttcctcatctctggctgggcatcccccctaggtgaatttcattcttaaacctgtctgtgtgtatgctcacacatgtgcccgtgtgtgtccataccaaggcatgtgcgtggggttacacatgtgcacagacacatataggtacatgggtgcccactgatgcgctcgtgtgcagacatgcccacctgcagaggcacacgagtgcacaaccagggaatcccaggcctgtgcgtgctcctggacaagtgcctgtggccatgtgaacacagaacttgatgcacacatgtgtggatttttctagtcatgtatggccaggcccccaaaggcagagcattgtgtgaacacatgtgttgacaggcgagacccacacatggggaggggatgtcagggagccccagaccctcccgaggagcggccagcctcaaaggctgctgggaaggcagatgtggctctgggcagccggggccttgctcaccactctcatgttttctccccagcagggctttgaggccgctccccaggcatctgcgttcagtctgccaaggctgccgcaggcccgcccccagggcctccccaccctgtccacctcacctccctcccctctcatccatcgtcagccatggctcaccgggacagggcaggggaggtgggagggcagggggctgggttggtcttgtggtgacccctctccttctggcccaggcacccctctcacggtgctcaatgggcccatcctggccctggatgcagaccaagacatctacgccgtggtgacctaccagctgctgggtgcccagagtggcctctttgacatcaacagcagcaccggtgaggcctctgtgccacccagcactcccagcctgattctggggtggggatggccacactgctggattgagggcctcccttctcagtgctggacccaggctgtccgtggagaccccatttttcacagcccagagtccccatcttgcagctgggttatatcacccagtggcctggcagggggacgtgggaagaggcttggagacgatacacaggacctctgttggtgcacgaactctcagcctgggccgggagccccccagcccactcccgtcatctccccatgcgcaggccagaggctcaggcccctagtccagcagaagtagccagagcgactttcctgtcctccaaccagaccatgccacatccgtctggtcctggacaggaggccgctttggtgacaggtgccgacaggaaagcacatctgtcaacagagacggtcaaccctgtgccctgggtcactcttcccaggcaagagtcttgaagacagcagagggcacctgcagaggggacaaccacaggaaatgcatggggccctccctcagcacgggtggttgagcctgtgggggagaaagtcattttgttactgcctctgctcctctttcatctctgtcccatggtgcccctgtctttctctgctctctccctgttggttcttgccctgtcttcccaccgcaccccttttctgtgtgtttccctggctggcggcaccgggtgccaggtgtggtgaccgtgaggtcaggtgtcatcattgaccgggaggcattctcgccacccatcctggagctgctgctgctggctaaggacatcgggctgctcaacagcacggcccacctgctcatcaccatcctggatgacaatgacaaccggcccacctttagccctgccaccctcactgtccatctgctagagaactgcccgcctggtaagcaggggacaggccccagcaccccacaaccaggggccggttggtggtcacaggggactggagcctcaggttggacacggagtttgcctccagtggggagaaagatgggcagcagggtgagtgtagaacacactggagagggagtcaggagacctgggcccccgcttccctcctctgagcttctgtatcttgcctgcaaaacaagattcttttttcctttctttctttttcttttcttttctttttttttttttaagacggagttttgctcttgttgcccaggctggagtgcaatggcacaatctcggctcactgcaacctcagcctcccaggttcaagtgattctcctgcctcagcctcccgagtagctgggattacaggcgcccaccaccacacccagctaatttttgtatttttagtagagacggggtttcaccctgttggccaggctggtcgcaaactcctgacctcaggtgatccactcgcctcagcctcccaaagtgctgggattacaggtgtgagccaccacgcctggcctacaagattcctaagtattctccatttgaattcccagatggaaagactgactattttaaagtcaaaataggatcaacatgattcccatcaaaatcaaatataacttctggaagaataagaaaattttgaaaaacataagtataataagccagatttggcttaccagattttataacatattataaagctacagtatttaaggccatgcaatatgggcacaagactccaggacaaagtagcccagaaacagatactggtaaattaaagaataaaatatgatgtgataaaggaagcaatgaggccaatggggaagctacttattcagtgtgcaaaaacctatttaatctaatcaattacatccaattattataatctgtatgtaatctaatataataataatgtaatatttagtgtagattctcccccatgtcagacaccaaaataaaaaccaaaagaaaatattaaaaagtagaaaacactaaacaataaatgaagaaaacttaggtgaataactcatttctgggtaagaaggttctaagcataaaagaaaagaacttaagaggaaaaatattaaatttctatgcatgctaatttaaaccttgttacatcaaataattatagccaatattgaaaggcaaacaacaaaccaaaaagtatatttgtcttggtccaggcgaggtggctcacgcctgtaatcccagcaatttgagaggccgaggcgggcagatcacctgaggtcaggagttggagaccagcctggccaacatggtgaaaccctgtctctacaaaaaatacaaaaattagccaggcatggtggcgggtgcctgtaatcccagctattcaggaggctgaggcaggagaatcgcttgaacccaggaggcagaggttgcatcgagccgagatcacaccactgcactccagcctaggtgacagtgtaagactccatctaaaaaaaaaaaaaaaaaaaaaaaaaaaaaaaaaaaaatatatatatatatatgtctcaagttgtcataattatgtgacttgtataattgacagaaaaatggacaaaagacaaaagcagaccatttgcagaagatacaactaattattacattataaaatattgtttaatcaaagaatataaaataaaataacatgccattttcctataaaattgcaagtatgaaaaaggtataaaagaaaatgctgtcaaggctgtcatgagaaggggacttgagaagatcaccaacaaatgtgtcttggtagatctttctggaagaggccactgtgcgcagctactcccttttccctctccaacaggattctcagtccttcaagtcacagccacagatgaggacagtggcctcaatggggagctggtctaccgaatagaagctggggctcaggaccgcttcctcattcatctggtcaccggggtcatccgtgttggtaatgccaccatcgacagagaggagcaggagtcctacaggctaacggtggtggccaccgaccggggcaccgttcctctctcgggcacagccattgtcaccattctgatcgatgacatcaatgactcccgccccgagttcctcaaccccatccagacagtgagcgtgctggagtcggctgagccaggcactgtcattgccaatatcacggccattgaccacgacctcaacccaaagctagagtaccacattgtcggcattgtggccaaggacgacactgatcgcctggtgcccaaccaggaggacgcctttgctgtgaatatcaacacaggtacaagggcctgcacccctcccacctccctcccagctcccagtcctgtctcctcgctccctgcttcccccttctttctcctttctctttctttgctgttcccttgctactctcttctctccccctcctctggagggaaaccagaaccgtccttctcttttccatctctccccttgctttctttctctgcttcctcatcctcccttgagcagctcctctggccttcctgattccctcgccctaccagtgtatgagagcacctatctcaccacatcatgccagtattaaatatgataacattttcatgttggcaattttagaggaaagtaataccttgtttgttcttttgttttttgtttttgttttggctttttttttgagatggaatttcactcttgtcacctaggctggagtgcaatggtgcaatctcggctcactgcaacccctgcctcctgggttcaagtgattctcctgcctcagcctcccgagtagctgagattacagacatgtgccaccacacccagctaatttttgtatttttagtagagacatggtttcaccatgttggccaggctggtcttgatcatcctgacctcaggtgatccacctgcctcggcctcccaagtgctgggattacaggcgtgagtcactgcacccagccgtgataccttgtttaatatgcatttctttactaactaggtggctgaacactttcttcatatgtatgctggccatttaaatcctctgcaagttgcatgcgatcaatgattttcttacactatcacgaaaccaagagaaccatggcttatctttcacaatgtatgtagtttattgtaatgctgatggttttatcattttcccaaaagttcagtgtttttctcctttgaggagttaggaaagggacatggagctgatacgtgtacttcttggaaggcccagaggaatgatagaagaatcaacatggctgtgacaaagcactaaaacagcagtaagatatcagtttttcacacgtgattagtggacattaggatgctggacaatgttgatattggtgaccgtgtggggacatggaaaccctcatgcactgctgtaggagttgtgactgattccactgtctggatagcaatccagcataagggacacttgtaccaccattacccagtatatgttccagagaaagtctcagggcattaatgaaactgtctgaggatgctcactgcagtgttattggtgatggtggagttggggccatgcaggtatccatttctgggagactgaagagtaaaatatcatgggtgtgcatcatgggggtaccagccagcagtgccagcggtgagaagcaataaattagacacacacagagcaatgtagatggatcctaataataagtatttactgaaaaggataataaatgggatgagatatatgccacagcaccatttccataaatgtaaaatacatacaaaataatacatgattttcagaaatacttttattaacaaaaaatatacttcaatacattacaatgactgcctgaggggagaagggaaggagagatgagtatgggaatgaaagggagtagacgcacacataaaacaagagaagtgccagtggtcatagtgtgcagcgagccaaagaacatgataaactcaatctgcatttgaggcccaaagggaaacagaagaaggaaaaaccatgagcactaggagaagttagatagaaccagctacatcccaggttagcaaaattcctggctgcatgggttggtcaggaccatggagagctgctccacgtccctactcaacttgaggctctgctcaatcccctactgcttttctctttcctgttcccccttcctccagctgactctcttctctatttttctttccagtgtcttctctgccccctcctcctcagccctccactcctcccttgcccactttgctaccttttcttcttgccagagcctcagcccctgagctctccactccaaatgggcttccacttgctcccctggtttccttcccagtgcctcttcccctccccactccctgtttccacccctccctccctcctcccaccccgtcagctctgagtccccaccatcctccctgccctgctctgctccatccctgctgcaccctgaactaactgatgttaaccctcttctctcttcctcatggctggcaggcccacaggtttgagctctgtttctctgtcacttcccacctcatctcttctctgcctcaccccattgccttcctccatgcccaccacacccccaccacccttcctgtcctgtggggcctgggccaaggccgtggcccagcctttgcagactgaatgcagccgccctctccccatcctcgctccccagcctgggggacagggagcgagagtaggaagaggaggaggaggaggaggaggaggcggcccagggtaagtgactaccccatggctggggacccacggaagacagaagcccagcagggggatctgccaagggggaagggaatctcagatacccccgtacctgagagggagaggaggtctcactctgggatgaagccaatgggaggagaagccaccaggccctctaacaggcaggaacaagaaaggtcccaagaaacgcagcactgaggtcagccaaactaggtctgtccagtccccgcccatgcttctggggggttcctctctgatttggggagcaggcagggactctgggaggcagtgggtagaacagaaggaaaccccttgctaggactgccatggaaccaatgctcctgtcccacaatcagcccatgtcactccctatttaatcaagacaaagggatgggcctgaagtatccagacggtcccaccactgtcccctccagggaacccctcagggcttttcagctaccatgactttcctttaaacttgatctccctagaatctaagcattttttaaatggtgataaaatacacataacgaaatttaccattttagccactttttaattgtagagtccagtagtgttaagtacatttgcattgttaaggaatacagcagtttttaaacaagcagttacatagcttctgtgtgccacgcactgttctaagtactttacaaatggaaactcattttgtttttctaatcctcaaaatagtagggtattgagaaaaggatgggttgacagtcggtagtgtaattatctagttttacaaatgtggacacagaggtgcagagaggtgacataacttccccaacatcacctgcttagtaagcatcatgggaggggcagagccacgtgccccaagcttatgaggaggctgtgggcccaccccagccacaagtcccagattctactggggaccgtcatcctttgtggggattgggagggtttggccaggagcacccctgggaagggcagattttagggggttcttctcaggctgaacctggcctggtctggtccacaggatctgtaatggtgaagtcccccatgaatcgggagctggttgccacctatgaggtcactctctcagtgattgacaatgccagcgacctaccagagcgctctgtcagtgtgccaaatggtaaggttccctgcagacatctctcattggtcactcagagccaatcagggcagggggcaggtggggaacaggcactggtctgtccccagggagggagcaacaagacccagttgctctgggggccaggagtcaggcaacacaagaggcatgaaaggtggcagccaccgtgaggcccagggtggtgatggctacatagagctcagcagtggaggatccagaagctcagaattgtgtgtgatctgaacccccaggctgagagtaggaaggaggcttggtagagcctggaacagattgagaaaaaatggttagacagaggcttaggttcagccagcagaactggtaaccagggtgtgggtaggatgtgagatgggaaccctatgatcttataggaagccacagggttagcacaaaggaagcaaagaatgaggggaggtaacctgaggccacagacactgctttgggggtgcaggcacttacggtggagaacggaggggcccagtgttaccttctgccaatcgggcccaggccatcctgcctgcagcctgaggcgtgggctgggagggggctgccagaggggtggattttgtgtgggcagagcgagagttgagtgggggaagtggggatggggtggcctcaagttgcctcagccatgaggtacagacagctgctataggggaagccaggcctggcagatgaagactgcttatcttcacagcccagaagcccacattttccggaaggaagggcagacttggtcatctcttccatgtcagaggctcagatggttaagggcccaggccggttacatagaggggatacatacagctcagacaggatctagggtcttaaagattatcttgccctttctcattgagcagtttaggaaaccggggcacaggaagggccgagggctccaccagggtcacctagcccttcctcttatggaacagcaagtgagcacaccactggaaagcctcctgtgctgcagcctgagggtcaggtcaatcctcaggcagcctctggggggctgtgggatgctgccatgctcacccagcttggctgaggctaaggaaggcctggcccagccacactagtgtccttcccctctccctcactccctgcctccaccacagccaagctgactgtcaacgtcctggacgtcaatgacaatacgccccagttcaagccctttgggatcacctactacatggagcggatcctggagggggccacccctgggaccacactcattgctgtggcagccgtggaccctgacaagggccttaatgggctggtcacctacaccctgctggacctggtgcccccagggtatgtccagctggaggactcctcggcaggtaggttagaaatctgtcagaggagggctgggggacatatatctctgcttgcttagtccccaagagagaccacagcccctctgtggctcctcagtggactgggccagatccaagatggccagcattccatgccagattccagatgcccaaaccaggggaagggacagagtgcttactcctgggttgggatggaagcctcttgatgtctgccggaaacctgggataccccaccacccaagctcctactattagtaccaccgagggagcaggaaggccaagaaggaggtgtctcaggtcctgggctagttgatgctcattcctgtgactgggagaagctttttcaccctccataagaaaaactggacaccagtccctccctgccgtgtgccctgcaactgggtggtgctgcctgaccaccctccttcaagtgaccacagctgcccctcggagtccaggtctttctcctcatactttggagagctgccatgaatgaggagtggccaaaatggcagtgggggcctctgtgtcttagggaaggtcattgccaaccagacagtggactacgaggaggtgcactggctcaactttaccgtgagggcctcagacaacgggtccccgccccgggcagctgagatccctgtctacctggaaatcgtggacatcaatgacaacaaccccatctttgaccagccctcctaccaggtgggtggccaggccacaggctgggtccaggacctgcgcccattccttggggtctttgggcatcttcctctcccaccctgccagcctctaagccccctgggagtgcccagcccacgagcagcttgatgcctgcatcagtgagttctagggctgtgctcgggctctgggactgaccttggcctactctctctccctgccccctgggctccaggaggctgtctttgaggatgtgcctgtgggcacaatcatcctgacagtcactgccactgatgctgactcaggcaactttgcactcattgagtacagccttggagatggagagagcaagtttgccatcaaccccaccacggtgagcagtgatggagggcctggaatttggaagtgggaaggacccagggtcagagactgagcagccaccaaaagtattgtagtaatccctctgggtcttgtcgcctggacatctgcatccccagaggttctttagccaagtcagcaaaccctgttctcagagtcccagacatttggtagactgtggcctttctgtctcaacagatgtttaaggaagtggccaagtcttttggaatgagccctttgtgggacaacatctgagatgtgtcctctccacactaaaaaagcatgattgaagtccatggggcttctttttgagacagtcagaaaagaagcaggggaagcactgcagaaagtgggcacagtgtctgagcacctactgtatacatggccctatactcagtgctggggaagggaggatgccccaaagggtgcctcccacacatttccttgaatctcagacttgtggaagaccagaaattcaggagaaaagatgggtgatgatttcaaatgtctgctaattggttcaaagctgttattttcagtatagagagagagccctgtggcctaggtctggttggtcaggcagggccttccccagttgctggggctggaactggactttgcctcccactgccctgctctgtccacatcttctggcactctgccctttcagcggggttcactccttcctgcttggtatgagccatcagacatggctccaggcctggcattaagacaactgcatatttatggggtgcctactatatgctagttcctggtcaggcaggtagctccaggctgggctggtcaccccatccccaggtaggttggggtagtgagagcaagaagagcccctagaatgggagcttgctgggggcagaggttattgtctcttttgttcagtgtcaaatctccagagcccataacagcatctggccatagtaggtgctcaataaatatcttttgaatgattgaaggacctaaagccaccctccccctactagggtgacatctatgtgctgtcttctctggaccgggagaagaaggaccactatatcctgactgccttggccaaagacaaccctggggatgtagccagcaaccgtcgcgaaaattcagtgcaggtgaggggtgccaacctgggccagggatgacagggactggggttgtggaggcaacaagcaaagcctctagcaagtggactgctgcagactgggagcagagccccccggtcccctttgagacacagtgacagaaaggagaaggcaagagggtaactggatgggttacaatggctgtggcttaggaagacagggaccctctgggagaaatctttgccaaactgctatttggcaaaatattttggcaaataggcagctaaacatacctgggtgtaacccaaataatgcctggggctccacatggcccagtatcaccatagtgtcccattgaaagaaacacagtccagaaaccaaacataattataaaggaatcatctttatttatgtctctctctctcttttttttttttttttttttttgagatggagtttcactcttgttgcccaggctggagtgcaatggcgtgatccggctcaccacaacctccacctcccaggttcaagcaattctcctgcctcagcctcccaagtagctgggattacaggcatgcgctaccacacccggctaattttgtattttcagtagagacggggtttctccatgttggtcgggctggtctcgaactcccgacctcaggtgattcgcccacctcggcctcccaaagtgctgggattatagatgtgagccaccgagcccggcctatttatgtctcttaaagaatactaatgagggctccaagtcataaccccattctcattccagtgtccacgcagctgttctgaggccagcatctcaccctctcagctctcaatccccttttctatgcaaagtcccaggcctcaaggttttgcttcctctttctctctcctcccttctgtctttggcagccctatctttctgtatgcagtactcacttctccctcacaataatctcatcatccaaaggaaactctcttgaaaggtcgggggtgtgaacagctgaatgggccaagaccacttctctttggcaggtagagagaaagggctgggaacacatgcacatatccaaacctcatccctgtcacatatgcatgtgctgtgttgggaaaaacacagcatttggggccagaagactcaagttccatgagctgagcacactgcctttgtcagtcaacctctctgagcctccattgtcaaatctgcaaaggagggtgcagatgtgcaattggggacatgaggtggtttgaaagtgctctgtgcactgaaaggggatctttaaagtcacggctgctggccggagcatggtggctcatgcctgtaatcccagcactttgggaggccgaggcggggggatcacctgaggttaggagttcaagaccagcctggccaacatggtgaaaacccatctctactagaaatacaaaaattagccaggcatggtggtgtttgcctgtaatcccagctacttgggaggctgaggcaggagaatcatttgaacccaggaggtggaggttgcagtgagccgagattgcgccattgcactccagcctgggcaacaagagcgaaactccatcgaagaaaataaaatgaagtcactgctgtcaagggctctgaagaggatgcagttcaggcagctcccagcagccagggaacaaaggccccatggtttgctgtgtctgtaagacctgccctgggctggggggtcagccagggaagccaagtctccggccagacacaaatcgcagtcaagagaaccttggggaatggaggaatgccaccaatccagcactaagggatagagattagagccagatttatagggccctgtggggagcagcaaggaataaagtaggaggtgtgaggggataaggggtttctgcttcagggcccaggtgcagattacctgttaaccactgttctagttgttgagtgtttacttgagccacgcactgtgccaaggatctaggattgtgcaaccaaggtaactgaggctcagggggttaaataagttgcttcaagtcagactccaacacattagaagacattacttccctcccaggctggtgcctgtccttcctctatccaggcttactcctgcatgaccaggtccgctgaggctgccccatcctgctccttacctttggccttgacctccatccacccaggtggtgatccaagtgctggatgtcaatgactgccggccacagttctccaagccccagttcagcacaagcgtgtatgagaatgagccggcaggcacctcggtcatcaccatgatggccactgaccaggatgaaggtcccaatggagagttgacctactcacttgagggccctggcgtgggtatgtggccttccttggacacccatgatgtcttggggggtgggagggggaggcctgccagcccaggccaggagtagagggaagcgtgggaaggatgtctcaaccagagctactctcctgctcccactgccagaggccttccatgtggacatggactcgggcttggtgaccacacagcggccactgcagtcctacgagaagttcagtctgaccgtggtggccacagatggtggagagcccccactctggggcaccaccatgctcctggtggaggtcatcgacgtcaatgacaaccgccctgtctttgtgcgcccacccaacggcaccatcctccacatcagagaggtactcctgccccgagggcctcctgcccaccagtatttccttcttccagctgtggcctagaagagtggaagcaccccactctaaaggtggggaaacttggcttcaggaaagtagctccaggaaaaaaaaaacttttttaattaaataaaagtttgtaaaggtgggaaaactgaggccggagaaggaagcagacctgcccagtgccacacagggcagtattgaacagtggttactatatgggctgtgctagtaaaagatctttggtttggccaggtgcagtggctcacacctataatcccagcactttgggaggccaaggcaggtggaacatttgaggtcaggagttcgagaccagcctggccaacatagtgaaacctgatctctactaaaaatgcaaaaaaaaaaaaaaaaaaaaggctgggcatggtggtgcatgcctgtaatcccagctactcgggaggctgacgcaggataatcgcttgaacccgggagacggaggttgcagtgagccaagatcacaccactacactccagcccgggcaacagagtgagactctgtcaaaaaaaaaaaaaaaaaatctttagttgaagtctaactctatcgcttatcagcccaacgactttgagcaagtgacttctgttaagtctgttttctgtaagtctattttttcctctgcaaaacaggactaataagtaaatactccatctcttgctcctagatgtctaccaaaaaggacagactcctctacaacccacttcccccatacttgtctcagaataaacacacacgccccttccatctgtctgttgttcctgctgatacagtgtggagacagcctaggagctgaggctgagcatcaaaataagaaatgaggggaagtggcaaggttctggaatctctccaggtcttccacttctcggtctaaattgccatataaagataggggaagtattcctttgtcttctgctctccccctttcttctaagcacacaggcccaaagtgctccgtagtggcaccatcagaatgtctcccacttgttctttgtcccccaaactccacccaggctccacatctcagaatgtccatgctaagtccatcatgtcactctgtctcctctttgaggtcctgcgggagaaaactctcccaaggctaagctcaaagaagcgttgtgcctttaccaggtgctttgcttttttaccttgtgtctagtgtctcatcggcagtgattgagcagtcggtcctctttgctctgctttgctctttcagagtggtcaggatatctcgagtgaccctgcagggacagggcttacaccttgcttcccacccctcagctttcatcttcctgaccaatttttttctttactctagttttttaacttgatcaatcttgttataatttatgtattcttgtcccctgcattaaatctcttttgtggaatgaggcagggtacaaattaataataatctagtcctttttcacaccaaaagccccatttatgaacactttcccttcaagggctttgcatttggaaagatttatgtctcctgaacaatcagcatgtattaattatctatatgtcgtcctacttgttattaattagacgtaactgccatttagaactttcagttgtcatgatccatgagataaacaatgaaaccatgctgagctgatcatttttcaactaaaagcaaagaaacgtgccctttctttttccctgggcagccttgtcatgggtcaatgtatgatttcaatgaggtttcgagatcttggacttagctcaacagcgttcaggagactgaggctcagggaagtgaggtggcaagtccaggttccaggcaggttagtaacagactagaccctgatggccaacccctatcctatccaccatgtcaccctgcctgtgtcccccccattttcaggtaccccattggatggatggtgttgtttggggacacccagaattcctgtgtttggggtagcagagagagcaagactgatacaggacaaagggtggctgtggcctcagcacttagatcccctctgtccccaaaacctcagcatgcaatgaatgggactggaagggcggaggcagctcctgggaagatggtcaccctgggaaggcttgaagcatgtggttctcaggctggactgtcagtgcaatggccttagcttgggttggggaggagagaagagggacaacagctagcagaagcccagaatccaggagaatccagccgagcaggcaggcgctcctggcgggtgctgtaagctgttgaggacattctgctacggcaggagaaagagcaagggctccctcaggacctaggagctgagattctttcaggggtccaggagccttcctccccatgctccccacaggagatcccgctgcgctccaacgtgtacgaggtctacgccacggacaaggatgagggcctcaacggggcggtgcgctacagcttcctgaagactgcgggcaaccgggactgggagttcttcatcatcgacccaatcagcggcctcatccagactgctcagcgcctggaccgcgagtcgcaggcggtgtacagcgtaagggcggggcccggtgcgaggggcggggtctggggcggggctttcttctgggggcgggtcttgcacctcgcctcctggaaagtccctaggggaactggccaccgggaagtccccaagccaatcccctctcccagtcttttcctctgactgtgctcttccgctcctagctcatcttggtggccagcgacctgggccagccagtgccatacgagactatgcagccgctgcaggtggccctggaggacatcgatgacaacgaaccccttttcgtgaggcctccagtgagcttgcccacctcctgcgctggtcacacccacacagggactcacctgcctgcaagcacacactctcctatatacactgtgccagaatacacatttggctagacacggaaacatgtctgcatgcacttcatgcaagaacaactatttattgagcagctgtgatacactatattgagctatattgagcgctgaaaaaaaaaaaggcagaccaaaatgcctgactcatggagctgatagccctgtctttgcctgcacacacacatacacacacacaaagcatgaaaatcagctctgatttttttttttttttttgagacagagtctcgctccgttgccgaggctggagtgcagtggcatgaccttgactcactgcaacctccacccgggttcaagtgattcttctgcctcagcctcccaagtagctgggattacaggcacccgccaccatgcccagctaatttttgtatttctagtagagacgggtttttgccatgttagccaggctggtctcaaactcctgccttggcctcccaaaatgctgagactacaggcataagccactacgccccgcccagctctgatttattgatatagggctgacatgaaatctgacagcaaggctgagggcccctcctgtggactccaactctgacatggttgttttttcttcttgtgtgcacatgggatgtgatgttccttggcgactgctgagtgtgagtgcatacacatgcatgtgcatataagagtaacgtgtgtgcttctctcacttaagcactcatttgggttctgggcaacactccgtgagggcagagctcaggtccgcgggccatgctttgctcccttgaggttacaacggttctactcaccccataaggcctggacagtaaactccctcagcacctacaaagtcactgcccagggccctgaaacagggactggaagctcgggtcttcccttggccccatgtgatgacatccccctccctctgcagaaaggcagcccccagtaccagctgctgacagtgcctgagcactcaccacgcggcaccctcgtgggcaacgtgacaggcgcagtggatgcagatgagggccccaacgcgatcgtgtactacttcatcgcaggtggggccagacagagctagtgccctgattaccctggggctagagatgacccacatatgccctgctcctggccctgccccctcaccctgtgccatgatcccaccctcagccggcaacgaagagaagaacttccatctgcagcccgatgggtgtctgctggtgctgcgggacctggaccgggagcgagaagccatcttctccttcatcgtcaaggcctccagcaatcgcagctggacacctccccgtggaccctccccaaccctcgacctggttgctgacctcacactgcaggaggtgcgcgttgtgctagaggacatcaacgaccagccaccacgcttcaccaaggctgagtacactgcaggtgcagggactggagcctgggcacgaggtgtggggtggcccctgccctgccacttacaccacctgcctcttcctgcaggggtggccaccgacgccaaggtgggctcagagttgatccaggtgctggccctggatgcagacattggcaacaacagccttgtcttctacagcattctggccatccactacttccgggcccttgccaacgactctgaagatgtgggccaggtcttcaccatgggtagggcctggcagcacatgagtggcctctagccatgacctctcagtcactgcatggactgtcatctggggggagatggggtctgtgggagcaccacaggatatgggtggccccccagccagccacaccaatcctattcatccacctattcagcaatccgttctccagtgtatccacctatccacctcttcatctacccaccagccctttcttttcattctctcttcttttcaactcatctatccattagttatccgtccatccatgtatccacacttctggctgtccatctatccttccatccatctgtccatccctcattttatccttccatccgtccatctgtctcttccatccatcctttcttccatctgtccatccatcctgctttcattcatctgtccacctacccatcttcccactctccctcccataatatctgcctgttttttcagttgcgcacatcgccttcccctatgtcaggcattgtgttaggactggggcaccaggattcaaagctcacacttatatctatggatgtgcatgtttgcttgtgcactgacctgtgtggatggctgagaccctctgggtcaggctctagaagatgcccctgtgggtgtcccattaccttactcccagccgcaaccccttcccccttcttctccatctaaaggctcctcctctgtatgcctcgtctgtggcctggcattcaaggctcactagatcttcctcctaatccctctttctgttccacagtcacctgctatccttaagggccctgtgcccagcctagctaagctgcttagcatccccacggcctgctctctcccattctcccctggcctttgacccctctgccttcattgcctggaatgccattttgaccccttctttgccttcggatatccctccgccacccttcaaggtctagttcatgtgccacctcatccagttacacaagcagacaccatccctttgtcctctgagctctcactgctcttattttaataaatcaaggcacatagaggctcagtagcttgcttgaggtcacgcagctagaaagtgacaaattttgagcccaatctattgtcttttaagagaagactatgctgtaccacctgaccatctctcttctatgggttttgttgttttctttttccttttttttttttttttttttttttttggtgatagactctcactgtttgttgcccaggctggaatgcagtggtgcaatctcagctcactgcagcctctgcctcctggattcaagtgattctcctgcctcagcctgccaagtagctgggattaggtgcatgcaccaccatgcctggctagattttgtatttttagtacagatggggtttcatcatgttggccaggctagtctcaaactcctggcctcaagtgatctgcccgcctcagcctcccaaagtgttgagattcaggcgtgagccaccacacccgggcttatttgtggaattctgaggtacatgtgtttgaaagagagaggagaaacagacagacactcagggggctcagaaatggtcctttgcaccctagcatgggacaacagagtcacaaacttgtcatccgcactcccctgtgatgataaccggctgagacccgagccatttccacttcagatgggcatcgttcccacttgcctgtcacctttgctccctgctgtgccctgtgggcatttgtgccgcctcccctagatgtgcccacctaccccagggctcatgccccttcctggggattcggggcactgagtctctgagccgtaccccgcctttgggcttcctgcagggagcatggacggcattctgcgcaccttcgacctcttcatggcctacagccccggctacttcgtggtggacattgtggcccgagacctggcaggccacaacgacacggccatcatcggcatctacatcctgagggacgaccagcgcgtcaagatcgtcattaacgagatccccgaccgtgtgcgcggcttcgaggaggagttcatccacctgctctccaacatcactggggccattgtcaatactgacaatgtgcaggtgcctcatgggcccacccggggccggggcagtggagggagaaggaaggggaggccaggccacaaggagagacagggcattgtgcaaaggccagggcgtgaaaggcagtatagtccctacttagtcatttcctatcagtgcagctttgataaagttctcccaggtctctgggcctcagtttcctcttccataaaatggggccaataataaatagtacctggccaagtgtggatgaagtgattggcaccgtgcctggtcctcagcaaacattcaaacattcagtagtgaagggtctatttgcagggaagggcagaaggggttcctaaaagaggcctgcccatccctgtggccccctgctgtggtggccacaccctacaataccccttctcatctagttccatgtggacaagaagggccgggtgaactttgcgcagacagaactgcttatccacgtggtgaaccgcgataccaaccgcatcctggacgtggaccggtgagtcagggcctgtgtttggactgtcagcctgtctgtctgcctgcctccctgccctggagtaggggaggggacacaccaaaggagacacagaccacaccatcaggcccactgtgtggggccatctcccagactggggcagggctaggagagagagcagagtttgggggtatgagcaactctgtccctctgagcctccctctccccatctgtaacatgggagtattcaggccatgcgcagtggctcacacctgtaatcccagcactttgggaggccaagccaggtggatcacctgaggtcaggagctcaagaccagcctgaccaacatggagaaacctcgtctctactaaaaatacaaatattagttggcatggtggcacacacctgtaatcccagctactcaggaggctgaggcaggagaatcgcttgaacctggcaggtggagtttgcagtgggctgagatcatgccacactgcactccagcctgggcaacagagcaagactccatctcaaaaaaaaaaaaaaaaaaaaagggagtattccatccactgtaaggatggaacaggatcctacatgaaggttcgaggaaccttgtaaaacacaaagctgtcccagccggtggacctcaatcttgcaaggcttggggttgttgaactttggaggcttgaggcaggagcagagcagactgtcggtggtgggggaatggctgaggaggagagctgagacccctgcccctcgcccagggtgatccagatgatcgatgagaacaaggagcagctacggaatcttttccggaactacaacgtcctggacgtgcagcctgccatctctgtccggctgccggatgacatgtctgccctgcaggtacccggcgaccgtgccccacagccctagccgccctccccactgcccgggcttaccctggtcctgctcccgcagatggcgatcatcgtcctggctatcctcctgttcctggccgccatgctctttgtcctcatgaactggtactacaggactgtgtgagtgtcccccacccctgccatcagggggccgaccacctgctcccggatggccacgaggcaggcagggcctgagacgtcagcttggcccccctcaccagcccctctctgcttctctccagacacaagaggaagctcaaggccattgtggctggctcagctggtaagtgagggccatagtggggacacaggtgagaaggcagtgggctggggacctggagtgcccaccggagcctcacaagcctggctcaggcccttcactgggcccaggaccatgccccgcaccccatcctccctcaccccccaacaccacccctacccctggctatgcccctcccctccatgccccaacccttctccctgcagggaatcgtggcttcatcgacatcatggacatgcctaacaccaacaagtactcctttgatgggtgagtggggtactggccctgcccggtcccctgcggggagtcctgccaggacccagctggggagagctgcagtctcccagcgctggggctgccgaaacccaggctgtgggcgccccctggtgggcgggccaccctcccttcaccctccctccaccctcagaaaccacgtggctgacaggggctctccaccccagtgggcctcaagttccaggggatgcagactttgggcagtgggtgcagggtgaagcctctgcaccaaaggcaatccagactgacatgcggtcctggttccagcaggatcctatggtgggagcatgcaccacaggcaccagggcctcacaccccaagtcagtgaaaggcactatatggccagggaaatgggcaggatgtggggtgaggctggaagggcacctgtctactcgagccttccctccctccccacccttttccctccccaactgcagagccaaccctgtgtggctggatcccttctgtcggaacctggagctggccgcccaggcggagcatgaggatgacctaccggagaacctgagtgagatcgccgacctgtggaacagccccacgcgcacccatgtgagccagaggcggtcaggcatcacaaggggcaggggtggaggggctgggtctttgcaacctctggccaagaagctgggttctttaaggggtggccccctcccttgtacatgtgtgtggggtctgcctctgctccagctaacatcccctctccccagggaacttttgggcgtgagccagcagctgtcaagcctgatgatgaccgatacctgcgggctgccatccaggagtatgacaacattgccaagctgggccagatcattcgtgaggggccaatcaaggtgagccttccctgcaggctccgcgcccagtcccttggctgaggttggaccccactccagagaacacagggtggtagagacctccaggctcagctagacccaccctccactggggcgagaacaccagggctgatggggggctactccagcctgcggtggccttaagggcagggctcaggagtgagtccacctgtgtccaggctggccactgtctccaggctctgccgctgatcctctgccctaggatcaccaggatcagatgtccgtgtaccccttactcccagagggagtgggcgaggggcggggcaggcaggggagggccttggtgggggttaaccctttccctcccccagggctcgctgctgaaggtggtcctggaggattacctgcggctcaaaaagctctttgcacagcggatggtgcaaaaagcctcctcctgccactcctccatctctgaggtagccggctgggtggctgggagctgtgtgctgtgccccagcctggggatgctctctgtctcttgctgtcctgctgtccttctctatgtctctggagctctgcagccaggaccaaagacagcaatgggtgggggccaggaagtcagacagcaggatctgctttctgggcttttgggggctttcacaggaatggggtagtctctaaggcagtctttctctgattagaggaagacctcaagaacatacctttgggggtgatgtcactttaagaaacccggctgggtgcggtggttcacacctgtaatcccagcactttgggaggctgaggtgggaggatcaattgaggccaggagttcgagaccagtctggccaacgtggcgaaaccccatctgtactaaaaatacaaaaaattagccgggcctggtggcggacgcctataatcccagctactcagggggctgaggcaggagaattgctggaacccaggaggcggaggttgaagtgaaccaagaccatgccactgcactccattgggtgacagagtgagacttgtctcaaaaaaaaaggaaagaaaagaaactggccgtcagggtcaaataggcctacatatgtttgcctgtaatgattatgtcaacacttacaaaagtcaggctttacctaaaaacgaatctccagctgggcccatattctcaacaggaataagctagtcgaatagcctcatacaggaggacaacagtgccagtttcaagtctccaccccacctatttatcctctgcagcttgtcctattgacactttctgcctggacacaattagaggtgatctgcttgaggccaatttggcaacaaacccagataccacagttgcatcccaggatgtttatagagcaccaaagttaatacataaaattaaagattctcagccagatgtggtggcacacgcccatagtcccagctactcaggaaactgaaatgggaggatcacttgagcccaggagtccgaggctgcactgagctttgattacgttgctgcattccagcctgggcaacagagagaaaccctgtctctaaataaataaagggcaggtgcggtggctcacacttgtaatcccagcactttgggaggctgaggctggtggatcatctgaggtcaggagttccagaccagcctggccaacatggcgtgcctgtaatcccacctacgtgggaggctgaggccggagaatcacttgaagtcaggaggtggagattgcagtgagccaaaatcgcgccactgcgagactctgtctacacacacatacgcacacacacacacaattttcacaagaagccgatacacacacacacaattttcacaagaagccgatacacacacacacacacacacacagattttcacaagaagccaatcctcccaagaacccatctgcagcaacttaagcattcatgattcccctttgcaggcagtttgagaaacagagtctgacaggcctgctgcggtaggagcccaaggttcagccacatagccagtgggtctctggggccatccacctgctcaccccttgggcatggccctgagcatgtgggggtcccggcctcttgcagctgatacagactgagctggacgaggagccaggagaccacagcccagggcagggtagcctgcgcttccgccacaagccaccagtggagctcaaggggcccgatgggatccatgtggtgcacggcagcacgggcacgctgctggccaccgacctcaacagcctgcccgaggaagaccagaagggcctgggccgctcgctggagacgctgaccgctgccgaggccactgccttcgagcgcaacgcccgcacagaatccgccaaatccacacccctgcacaaacttcgcgacgtgatcatggagacccccctggagatcacagagctgtgactagacagggaagccttgtgggtgtgagcagcacccatccaccgtcccctcccagggagcaagggcagggacagggccggtcgggggggaccctccaaggccaggccttggggacaaccttggcttggccctggcagcccgcatcagctgctcagatcccacttttgccagacgctcattcagcatctgacctctaccttcataagatctgttatttttataagaaaaccaaacaaaaatgttaagcatctaaggacaaggtaaggagggtcactggggcccaagagtctggggaccagcttggctcaggctgagctgaaagaggccaaacaggccctcctccctcccggctccaccccgcaagcaccatcccctccggctaagcaggcgcaagggaggcccagcgcggacatcccctgctggccggacacccgactccagtccaagtctcgctacatttccgccacatccctctctgctggacgtccaggtggaggtggcatccccacgtggacaagaaagtcaatgtcaatgaacaagcattctctccatttcactggcttcccaaatgtgtgcccagcttataaacagaagtgactgatgttccctccggttttgaatgtggagtgtttgtgtgtgttccttttttaaattaagttattccctcaatagtttccccttggttttgtttaactggtactcactacaagtttctggaatggtttgtttaaaaatcaaggcaactctcaaggaactggcaacgtgctctgactctggcctctagggagcagggacaggggcaggtgaagagcagagccgaccttcaggtgcgcctgacctactgctggccctgagtcttggggaggatgaggtgggatcttcctttatccactttgctttcattctctggccaagatgggtcatgggagtgctgggccccaaaggtgtcatgggctcagagctcatcagagaggaacaaactcttccagctgaagggtcacagaaacattaggcccagatctggctaacagaattttattgttaaatcacagaaactttagtgcaaaacaaaaatcacgaagtccatttaatagcaacttcatgtcctgctggctttgcttgctgtctcctggcaaccagaagtggacagaagcgtgggtgcccaagtgggccacagacagcttccaacccccacaccccagcatccaatccacacccagcagacccttcggcatgccgccctctaccaggaagccagaggcctaggagctcgccatccatatttatttgaaaaggtcaaaaggagcatctatgagacaagggaggggtgcaggctgaagcagcgcctcaacagccagggacatgtaggcaacacgagcaggcacagcgcggccaccactgtccacacgctcacacaagccaggcccgcagggccttcggagagctagcaggttacattcaggcagatggccctcttcccacccaaacccacagaaccccaaacaaggcatcaccaggaaagacacgggaaagccaaatcacagttgaaccagggacagagaacccttggccccactgatgtcccaagccaccagcagctgcttccaaaatccctatgctattacagtgggaattacatcatttaaaaagcctgattattccaggcttctaatctttcatataaaactgcctttgttttgctgctttgttcaactgagaggcccaggaaagcggggagggtccctgatcagggcaggaggccacctcagaagcccaggcccaccagtgcccaagcacatgtcagggctcagaacaaggcctcaaccaagagggttgatggcctccagtcaagaaactgtggctcatgccagcagagctctctcctcctccagcaggcgccatgcaagggcaggctaaaagacctccagtgcatcaacatccatctagcagagagaaaaggggcactgaagcagctatgtctgccaggggctaggggctcccttgcagacagcaatgctacaataaaggacacagaaatgggggaggtgggggagccctatttttataacaaagtcaaacagatctgtgcgttcattcccccagacacacaagtagaaaaaaaccaatgctgtggtttctgccaagatggaatattcctcctcctagttccacacatggcgtttgcaatgctcgacagcctggtaggagagaggaagctgagtttagtcttcggatgaaaaactccgttcccggcccatcaatgtatcagatatcaccccaaaacaggacctgttctcttgtcctaggtcagctggatggcaccagatgctgaagacccaggacaggatctcacttaaaaacagggaacacgtggccatcagagttttgggaacttctaaggcacgagtccagagcagcagatgcctgcagcagtttgcagatgagtacccacgcaggcagggctcaggaccttcatctacctgcacccggcacccagcgtcctgctagcagcctgcacactaactcccaggcagaacctccttgcctgagttaggctacacaccagctcgggccttgagaagcaggcccacatttccccaggacagcagcagaaccagctgtggggtggggctggcggtggagatgggctggagcctagctggaggaaagagctggacatggccagaatgggggccccctgcccctccctgcagtggtccgaaatgacacaaccgccactgacatggtcacagggaagcccggtgaggaaggaaaagttgcacaaagcaacattaagtaacagggaccgaaccaaacatccccacccagggaagcagcacaagtcacccaactggtggctgccaggccaggccagggccacagtgccctagggctgctgggcaggggccagttctcagggccttgagtgaggactcgggcccggcttcagcaagggcaaacatgttcccgggggacaggacctgggcaaagctctgggcaatgaatcccacagaccttgtacaatccctggagtgaccttgtacaagtctgacactgtcacaagggaaatgaagacaaaagcaacaaagcagaagcaaaaaaatactaaaaaaaataaataattaaaatccaccccacccttcactacaagagtgtagttcaccctgtcttttctaggggaccatgagtaagcctaaccacctctctgggcctcagctttctgataacataaaagcagggtggagagttgatcactgggttcccattaaagcaggattctcacacaggctaccccagggcaagacaggctggtgacactgtctgctgagctactcacattgcactgggctgctgtctctgtgttctggcaccagtagcttgggccccatatacacttctcagttcccaacaagggcttatgggccgaggggcaggctccaattttctatatggtgagaaaaggaaaaaagaaagggggagaatgagagctgcccgatgtatcgctttcaaaactaagaaaacagtttccagaaggagctaggatcacagctccaccacgctctttcagaacatcagggttgctgaggaaagcgatggggcttggggggctggctccctaccttcttggctctcccacagcagaacccagagactccaccccacggccaagtctcagagcaacccttccgggtctctgcagccccccaggttacagctgcccgagaggaccacaccacccagtgaggctcaccaagcacacgaaggaaggatccatcacctccaccaggatctcgatcagcacgggctcgtactctgccacaaactgatcacactataaaggaaagcggggacacaggtccagctctgggggtgtccgagcatagtggggcacaaaaggccaggcaggccctggatacactgttccctgagagctcctggcattcccagcccactgggtcctggggcctccctttccagacaccctatctacatttggcctctctacttcaggttgcttcccccagtggctcatcttaagccaacaaatcacctccaagtaaaacttcattggactccatgcccggaggcagaaacagctggttttccatcaaaatgtaccccagccttggcatacttcatcaggttctgccatgctggcctaccgcagcccagcccggggcgtacctgcttctggtaagggtctggcaggaagctgcagcctttctcaagagcagccaggatctcctgcttggtgctgtttttctccaggttgcgatccaaataacccaccagcttcttgcacacttcgcagaagccaccgtcctttggctgagtcacgtgaactacataagagggcagcgggctcaacgctggcagggccctcccagacccaagaggggcaccatcctctcccgcaccacacccagcgctcaccggtcagtgcaggcagccgcgtgccagagcagaggtgcagcatgctgcacaccagctcagggctgacctcctccagcaggatggacaggatggagctgccgtacgtgtccaccacctcctggcactcttccgacagggacttcggcagcttcgagcacattttgtcaaaagcgtcgagtatttctttctgaaacacacgagaggatcgtgtgagaagacgggaggccggacaagggttgggggacattctgaaaatactaacatggccaggaaatgagtcaatggtgggtgccgtttccacccacaaaaaactaccaaactacaaagcagggcaatggtgtccacctccccggacccccgccagcctagaggtcccactggtgaggattgccttccacgagatggggacatggctgtacacatgtcaaggctgggccaagccctctctcctgtgggactttcccactgggacattcaggctcgggggggcaggagaggccctccctctgccaggaggacagcatacctcagtcttgttgttgtcaatcagcttggtcacctccttcaccaggaattcacacacctcacagtaaacatcagactttgctgggacctcgtgcttctgtggaaagagtagaaggagagtactttcaatgctgggactcacagcccttggtcttgctcccctaaaggaaaggggacacagagaccagggtgggttagcacatcaagggccactgcctcctgaattccaaatggcgtgtggcttctaatatccaagttaattccctatttttacattcacccccttccccaatcctctaccacccccacctccccctaaccccaccaaaacaaaacccaggaattcacagttcaggagacagaaagtcccttccccaccccgaagagctgtcctgatgatgtgttcggttacaatcatttcatcattcagggttcattttggggaggaggatgaaggaccaaaagcaaagtgaaggggctcactatcggtccactatctagaagacagaatgttgaacacacttcaggtctgctcgtgtgtctcccatgtctcattagcacttgagaatgctcttctggaacccacctttaataaggcaatactgttacagaggatgttctgtggcaatggaaatgttctctatctctgctgtccactataagctccagctacctgtgcactgagcacctgcaatgtggctggtgtagccaaggggctgaatttttaattttgctccatggtatttcattaaaatttaagtagtcacatgtggttggagtgcgagctataactcttcactttctctggccgtcactttggtcagcaggctggagctgaggagcacccggtggagaggaaggcaagaagcagtgcttcctggattccagctgacacttcggcctggcccctgggtcacacactctgcacatgcagagaggagacagcagagagagaccaacagctggcagtcaagtgccgtgggatgttctagaacaagaagcgtgtacatgtgccacgtgttaaggcatcacacagcccaggccttgaagaactagaatgtaagccccacgggcacaatgacatcatctgttcaccacagcccctaacatgctgcctgacccataataaatgccaaatacaaatttattatgggatgaagtagtctaatcttcaccaagtgaggtgttttagttaaataaaatagacacccacatgtacttagtatacaggctgcaggcccagtgaggcttccgtacactctgaggggtgtgctgggaacatccagtctgtcagggccacaggatggggaaggacccagacagtgcatgtgagaaggtgaggctgaagccaggcactgcaaagtcacctttgaatggcatgctgaaaatacacaggctaatgatcccacgaacattagggtttacaaccaaggaaataaaatgttttcaaaagaactcagggtcgggggctgcattagtataggggataggataaaccagtgatcacaaactcaaagacctttaggagccaggcagggaaccgaaagaaacaagtgactcgtaagttgtgatgtgacacagcagggagtagtgtggcattgcacagccctgaccaggacacaaagtgacaccaggtaccttaatgggctccaccagttccagggcagggatgacattcttggaggccactttggcggggaccagagtctgcatgggcatctctttcacctcatcacagaacccaaccagcgcacagatctccttgggttgctgaagagagcacagaacaaccagtcagcagcaagcctacgcccactgctcctcagtcccaatccagccagaggacagggagctggacagcaccctgggcccaggtcaaggctacctccctctccccctcccacaacggggcagattccagtttccatgttaaagggctcgtgtctgaagcagtgcatatgtgccagttacatctcggggaggagaccacacaaagctcctaaggaacatcaaacagagtctccatccagggccaccacgagggagactccccagcaccttccacatctccaaggacacctggtctgttctagaatgtgtcttttcaggtcactctaggtaggaactaagctatgcttttttctagagggggaactaccatgcccataaactaacagaaagccaaatgtgttagaaataaaaccacaccagatttttcagcggcaggaccatttaaaatgatgcattaaggggaaatgctggctttttaaaaaaccacattctatgttcaagctgcacacagtgcacatgaaaacccaacccgccaaatggatgaatcattttaagccacaaggtctccagattgatcccctttcaccatttagacaccaaacacagagcactagatagtctagacatcctgaccatgacactctgatggccaagagtgagacaagtgtatagactctgtatattgtggaaataaatgcaaccagcaactagctctgagcctgagtgcatttgccttccagcaccaaaccctaaagcagcaggaacaaaagtgctaaaaacaggacctgttaagggaaaagagctagaccatgactatggctcatcttgttttaatatcaagaaggttcgagaattaataagaccgggggagtctgaaaagtatatcccaaataccctgtctctgccacaccttaagaatgaaaaataaataaataaataaataaataataagaacgcagctgaagatacagcaagctttttagaaaaaaaaaaaagacgccaatattcaggaggtatagggctgcttctgcctcgatcagctttgttccaactccttgaggaggcctaggtaaaaattcaggtatttcaaccaaagtcctctcccattagacttcaaaataccttcaaaaaaagctccaatgctaatcctagcagatggatgccaacgctcagaggtggcagtgttcaggacggccccgaaggacactggctcagagcaagtatggactgggcatttggttcttgtagcatgccatctgatgtggctctagatcccaaaggaccctgttacccagaggggcagaagccacaatcaagagattgtttccaattctctggatccaacagccaggaacagtctgctggctgtctgcaaatgtttgctcatgcagcagaagcatttctgtgtttatgaaaaacagcactaaagacatgcaatgcctacttgcgttgtgacagacacaaggtgccctggggaagccagacctacactggacttcctaactggcctacgttgaaggaggctgaggcacctcctgggccacccatggttccccattgtcacactggtggcctgcatgtacgtatgctgtatgtggactgtgaccagagcacaaggctctgctggcttcattttactggaccccgaaggggagatgagacccccaaaacctcaagggctgaattacaggggagagatgcagaagccctccccagcctattaacagagagggaccctgcctctcgtaaccattccttgtatctgtcagagctaatcatgccatacccaaaaaaaaaaaaagcaaagtaactagaggaagcagcagaccactactgcaagcagattccccgacacatacctgatcctgctgttgaacaaaaaaacaggaaatcggaggtgaaaataagagaaaggaaaggacacaacagttaagaaaaattaaaacaacaatcaagcagttaaccaggtgtaaggatgtcccaagaggttcaggggaaatgctcttgcaatcagatcttagcaacctaccttgttcctgctatcttgcggacaagggggccctgaaagctttcctggccctgcagggatagaccatttgggggctgtcctgctctgtgtgcaccatctccaggtcttacacactaaatcacactcaaaacacttgtagcaagagccccagaaaatgcttgatgaagggtctccatactcaggagcccacactggccccgggcccacaaggctttcccacaggttagtgaccagcagcaccacagaacaagacacagggctgcccaagtaaggggggtaagggatccctgaggggtaagggatcctagggcaatctactgcaggtggccaaatggcagcctggaaggccaatttaacaatgtatccaaagcctcatgcttccattcagcagttccagctttagttctctataataaggggaaaggcaggcatatgcatatatgtatgcatttggctataaggatattcatcttcccaaaggcaaacctgaaaacaacctagatacatccggccaccggggaccaattatgtaaattctcttctatgtacacaggtgattattctgcaagcatttagtcatttgtacaagaatattcaatggccaacatatttttaggcaaaaaatgcaaactacaaagtacaaggtagtatatatgaccccgttgatatattctgaaactccaaatgatttttgtgtgggaagtattgtccatattttcaacacatttctacacagtataacttttataatgagaaaaatattttaagttagctatgaggaagtacttcacgagattaaatcccgtcaatgcttatctttacctacttcaggtgcatgtctctgtaagctgccttttaactgtttttagaacatggtagggtgtgagtaataatcccaaataaactactcctcctcagcttgcttgagtggttacagcaggtcagagagtcaatctttcaggctccttggccataagatctggctgcaactactcaactgtgctgctgtagcacaaaacaggcgtcgctgtgttccaaaaaaataccctttaagtacaaaacatgatgggccagtttgctgacccctggatcagagaacaaactcaaacgctggtatgtcaatctcaagtagtcagaaagcatgacagacagggaaaaggtgccccccacccactcagccctgccaatcagatctaaggaggcagtgcctgttcccaacgtgagcaggccgccctgctctgcgtggactagcgagctcatttcctgaatgggtattcttgattctaatgaaggaatgccccctgccacctgaatgcatccaaagccagctcaggagttaccagctcaagcagcagcttcagcggacgctgctgccatgcacgggacaaactccgggaggcagtattcccccgactcaggtggcaacacagccattctcaggcctggcttagttagagagcacttgacttctacagatcccagggttaaagccagacctagaaacctgatggctggcctgaacgggcagaggcaaacaaattgccaggaagccaccagggcagtcctgggatcaagatgcttcagcctgcctctcccgtaacaggggaggtactgagattgcaagtggagagtctcctagccagaggggtcgatttagcccaattcagcactctaaggtaaaaaagggaaactaaaccatataattttcaaaattcctagaaatgacgaaacctgaaaaacaaagaaaaatgctaacaaggggcctccgtgccacctaccatgtgcatcatcatctggatagcaatttcagaatactggctgatatagttcttgcactga

SEQ ID NO: 342 - DNA, 2563 bp, Homo sapiens
gcggcggcggcggctcgggagagagggacgcgggctgcaggcgcgatgcttggctagaggacgcgtccgacggcggccggacgctgaggtggtcggggctagtcagcccggcctgggcatggagcgcggggtggcagagcctctggacgtttggggcgcgcccagtccgagcccccggcgcgcctgaagttgcgagcggcgagcggcgagcggcgagcggcccgcggagacccaggagctgccggcacgccgcggatgagccttcgcgccggcgggaagacgcggcggtggccagggccagagcaggcggcccgcgggggccgatccggcggagagcagagcccgaggcgaggcgaggcgcggcgccgctgcacacacgcacacggagccatggggcgccatgttgccaccagctgccacgtggcctggcttttggtgctgatctctggatgctggggccaggtgaaccggctgcccttcttcaccaaccacttctttgatacatacctgctgatcagcgaggacacgcctgtgggttcttctgtgacccagttgctggcccaagacatggacaatgaccccctggtgtttggcgtgtctggggaggaggcctctcgcttctttgcagtggagcctgacactggcgtggtgtggctccggcagccactggacagagagaccaagtcagagttcaccgtggagttctctgtcagcgaccaccagggggtgatcacacggaaggtgaacatccaggtcggggatgtgaatgacaacgcgcccacatttcacaatcagccctacagcgtccgcatccctgagaatacaccagtggggacgcccatcttcatcgtgaatgccacagaccccgacttgggggcagggggcagcgtcctctactccttccagcccccctcccaattcttcgccattgacagcgcccgcggtatcgtcacagtgatccgggagctggactacgagaccacacaggcctaccagctcacggtcaacgccacagatcaagacaagaccaggcctctgtccaccctggccaacttggccatcatcatcacagatgtccaggacatggaccccatcttcatcaacctgccttacagcaccaacatctacgagcattctcctccgggcacgacggtgcgcatcatcaccgccatagaccaggataaaggacgtccccggggcattggctacaccatcgtttcagggaataccaacagcatctttgccctggactacatcagcggagtgctgaccttgaatggcctgctggaccgggagaaccccctgtacagccatggcttcatcctgactgtgaagggcacggagctgaacgatgaccgcaccccatctgacgctacagtcaccacgaccttcaatatcctggttattgacatcaatgacaatgccccggagttcaacagctccgagtacagcgtggccatcactgagctggcacaggtcggctttgcccttccactcttcatccaggtggtggacaaggatgagggcctgaacagcatgtttgaggtgtacttggtggggaacaactcccaccacttcatcatctccccgacctccgtccaggggaaggcggacattcgtattcgggtggccatcccactggactacgagaccgtggaccgctacgactttgatctctttgccaatgagagtgtgcctgaccatgtgggctatgccaaggtgaagatcactctcatcaatgaaaatgacaaccggcccatcttcagccagccactgtacaacatcagcctgtacgagaacgtcaccgtggggacctctgtgctgacagtcctggtgagtccccgcttcactgcagggccactgagctctccagggccgactgtggtgaggcacccagagggattttgtccaagggacctcagcaatcagggaaggaggcacccccaaatccctgagctgtgtttgttggtgtattaaataaagtttttggactcttcaggaaggggctcccttgacctaggttgcaatatggaaaaggagccaacctgaggggtgacaagactgagctgaggacactggttttctgcctttccccgagagagactcagtgagggtgggctgggagccctggaagccccctcaaatgggtgggaaggtgccagccatccttgagaagggcaaccctctccatgtgagcacaggcaccagagaggggcaggcgcctggagggtaccggggcacccccagctgcccatggctggacttgccctttgacaaggggccctcccagtgtcatttgtatctgtcagtactcttggttgcaagggacagaaacccttaagtagttcaagcaaaaaaggattggctcatgtaactcaaaagtataagtgatttcaggccgggctcggtggctcacgcctgtcatccaacaccttgagaaagccgaggtgggcggatcacttgaggtcgggagtttgagaccagcctggccaacatggcaaaaccccgtctctactaaaaatacaaaaattagccgggtgtggtggcacacgcctgtagtccc

SEQ ID NO: 343 - protein, 561 aa, Homo sapiens [sequence omitted]

SEQ ID NO: 344 - DNA, 11072 bp, Homo sapiens
gcggcggcggcggctcgggagagagggacgcgggctgcaggcgcgatgcttggctagaggacgcgtccgacggcggccggacgctgaggtggtcggggctagtcagcccggcctgggcatggagcgcggggtggcagagcctctggacgtttggggcgcgcccagtccgagcccccggcgcgcctgaagttgcgagcggcgagcggcgagcggcgagcggcccgcggagacccaggagctgccggcacgccgcggatgagccttcgcgccggcgggaagacgcggcggtggccagggccagagcaggcggcccgcgggggccgatccggcggagagcagagcccgaggcgaggcgaggcgcggcgccgctgcacacacgcacacggagccatggggcgccatgttgccaccagctgccacgtggcctggcttttggtgctgatctctggatgctggggccaggtgaaccggctgcccttcttcaccaaccacttctttgatacatacctgctgatcagcgaggacacgcctgtgggttcttctgtgacccagttgctggcccaagacatggacaatgaccccctggtgtttggcgtgtctggggaggaggcctctcgcttctttgcagtggagcctgacactggcgtggtgtggctccggcagccactggacagagagaccaagtcagagttcaccgtggagttctctgtcagcgaccaccagggggtgatcacacggaaggtgaacatccaggtcggggatgtgaatgacaacgcgcccacatttcacaatcagccctacagcgtccgcatccctgagaatacaccagtggggacgcccatcttcatcgtgaatgccacagaccccgacttgggggcagggggcagcgtcctctactccttccagcccccctcccaattcttcgccattgacagcgcccgcggtatcgtcacagtgatccgggagctggactacgagaccacacaggcctaccagctcacggtcaacgccacagatcaagacaagaccaggcctctgtccaccctggccaacttggccatcatcatcacagatgtccaggacatggaccccatcttcatcaacctgccttacagcaccaacatctacgagcattctcctccgggcacgacggtgcgcatcatcaccgccatagaccaggataaaggacgtccccggggcattggctacaccatcgtttcagggaataccaacagcatctttgccctggactacatcagcggagtgctgaccttgaatggcctgctggaccgggagaaccccctgtacagccatggcttcatcctgactgtgaagggcacggagctgaacgatgaccgcaccccatctgacgctacagtcaccacgaccttcaatatcctggttattgacatcaatgacaatgccccggagttcaacagctccgagtacagcgtggccatcactgagctggcacaggtcggctttgcccttccactcttcatccaggtggtggacaaggatgaggtgaggcctgaacagcatgtttgaggtgtacttggtggggaacaactcccaccacttcatcatctccccgacctccgtccaggggaaggcggacattcgtattcgggtggccatcccactggactacgagaccgtggaccgctacgactttgatctctttgccaatgagagtgtgcctgaccatgtgggctatgccaaggtgaagatcactctcatcaatgaaaatgacaaccggcccatcttcagccagccactgtacaacatcagcctgtacgagaacgtcaccgtggggacctctgtgctgacagtcctggcaactgacaatgatgcaggcacctttggggaagtcagctacttcttcagtgatgaccctgacaggttctcgctggacaaggacacgggactcatcatgctgattgccaggctggactatgagctcatccagcgcttcaccctgacgatcattgcccgggacgggggcggcgaggagaccacaggccgggtcaggatcaatgtgttggatgtcaacgacaacgtgcccaccttccagaaggatgcctacgtgggtgctctgcgggagaacgagccttctgtcacacagctggtgcggctccgggcaacagatgaagactcccctcccaacaaccagatcacctacagcattgtcagtgcatctgcctttggcagctacttcgacatcagcctgtacgagggctatggagtgatcagcgtcagtcgccccctggattatgaacagatatccaatgggctgatttatctgacggtcatggccatggatgctggcaacccccctctcaacagcaccgtccctgtcaccatcgaggtgtttgatgagaatgacaaccctcccaccttcagcaagcccgcctacttcgtctccgtggtggagaacatcatggcaggagccacggtgctgttcctgaatgccacagacctggaccgctcccgggagtacggccaggagtccatcatctactccttggaaggctccacccagtttcggatcaatgcccgctcaggggaaatcaccaccacgtctctgcttgaccgagagaccaagtctgaatacatcctcatcgttcgcgcagtggacgggggtgtgggccacaaccagaaaactggcatcgccaccgtaaacatcaccctcctggacatcaatgacaaccaccccacgtggaaggacgcaccctactacatcaacctggtggagatgacccctccagactctgatgtgaccacggtggtggctgttgacccagacctgggggagaatggcaccctggtgtacagcatccagccacccaacaagttctacagcctcaacagcaccacgggcaagatccgcaccacccacgccatgctggaccgggagaaccccgacccccatgaggccgagctgatgcgcaaaatcgtcgtctctgttactgactgtggcaggccccctctgaaagccaccagcagtgccacagtgtttgtgaacctcttggatctcaatgacaatgaccccacctttcagaacctgccttttgtggccgaggtgcttgaaggcatcccggcgggggtctccatctaccaagtggtggccatcgacctcgatgagggcctgaacggcctggtgtcctaccgcatgccggtgggcatgccccgcatggacttcctcatcaacagcagcagcggcgtggtggtcaccaccaccgagctggaccgcgagcgcatcgcggagtaccagctgcgggtggtggccagtgatgcaggcacgcccaccaagagctccaccagcacgctcaccatccatgtgctggatgtgaacgacgagacgcccaccttcttcccggccgtgtacaatgtgtctgtgtccgaggacgtgccacgcgagttccgggtggtctggctgaactgcacggacaacgacgtgggcctcaatgcagagctcagctacttcatcacaggtggcaacgtggatgggaagttcagcgtgggttaccgcgatgccgttgtgagaaccgtggtgggcctggaccgggagaccacagccgcctacatgctcatcctggaggccatcgacaacggccctgtagggaagcgacacacgggcacagccaccgtgttcgtcactgtcctggatgtgaatgacaaccggcccatctttctgcagagcagctatgaggccagcgtccctgaggacatccctgaaggccacagcatcttgcagctgaaagccacggacgcagatgagggcgagtttgggcgtgtgtggtaccgcatcctccatggtaaccatggcaacaacttccggatccatgtcagcaatgggctcctgatgcgagggccccggcccctggaccgggagcggaactcatcccacgtgctgatagtggaggcctacaaccacgacctgggccccatgcggagctccgtcagggtgattgtgtacgtggaggacatcaacgatgaggcccccgtgttcacacagcagcagtacagccgtctggggcttcgagagaccgcaggcattggaacgtcagtcatcgtggtccaagccacagaccgagactctggggatggtggcctggtgaactaccgcatcctgtcgggcgcagaggggaagtttgagattgacgagagcacagggcttatcatcaccgtgaattacctggactacgagaccaagaccagctacatgatgaatgtgtcggccactgaccaggccccgcccttcaaccagggcttctgcagcgtctacatcactctgctcaacgagctggacgaggccgtgcagttctccaatgcctcatacgaggctgccatcctggagaatctggcactgggtactgagattgtgcgggtccaggcctactccatcgacaacctcaaccaaatcacgtaccgcttcaacgcctacaccagcacccaggccaaagccctcttcaagatagacgccatcacgggtgtgatcacagtccagggcctggtggaccgtgagaagggcgacttctataccttgacagtggtggcagatgacggcggccccaaggtggactccaccgtggtgagtctacatcactgtgctggacgagaatgacaacagcccccggtttgacttcacctccgactcggcggtcagcatacccgaggactgccctgtgggccagcgagtggctactgtcaaggcctgggaccctgatgctggcagcaatgggcaggtggtcttctccctggcctctggcaacatcgcgggggcctttgagatcgtcaccaccaatgactccattggcgaagtgtttgtggccaggcccctggacagagaagagctggatcactacatcctccaggttgtggcttctgaccgaggcacccctccacggaagaaggaccacatcctgcaggtgaccatcctggacatcaatgacaaccctccagtcatcgagagcccctttggatacaatgtcagtgtgaatgagaacgtgggtggaggtactgctgtggtccaggtgagagccactgaccgtgacatcgggatcaacagtgttctgtcctactacatcaccgagggcaacaaggacatgaccttccgcatggaccgcatcagcggtgagatcgccacacggcctgccccgcctgaccgcgagcgccagagcttctaccacctggtggccactgtggaggacgagggcaccccaaccctgtcggccaccacgcacgtgtacgtgaccattgtggatgagaatgataacgcgcccatgttccagcagccccactatgaggtgctgctggatgagggcccagacacgctcaacaccagcctcatcaccatccaggcactggacctggatgagggtcccaacggcacagtcacctatgccatcgtcgcaggcaacatcgtcaacaccttccgcatcgacagacacatgggtgtcatcactgctgccaaagagctggactatgagatcagccacggccgctacaccctgatcgtcactgccacagaccagtgccccatcttatcccaccgcctcacctctaccaccacggtgcttgtgaatgtgaatgacatcaacgacaatgtgcctaccttcccccgggactatgagggaccatttgaagtcactgagggccagccggggcccagagtgtggaccttcctggcccatgaccgagactcaggacccaacgggcaggtggagtacagcatcatggatggagaccctctgggggagtttgtgatctctcctgtggagggggtgctaagggtccggaaggacgtggagctggaccgggagaccatcgccttctacaacctgaccatctgtgcccgtgaccgggggatgcccccactcagctccacaatgctggtggggatccgggtgctggacatcaacgacaacgaccctgtgctgctgaacctgcccatgaacatcaccatcagcgagaacagccctgtctccagctttgtcgcccatgtcctggccagtgacgctgacagtggctgcaatgcacgcctcaccttcaacatcactgcgggcaaccgcgagcgggccttcttcatcaatgccacgacagggatcgtcactgtgaaccggcccctggaccgcgagcggatcccagagtacaagctgaccatttctgtgaaggacaacccggagaatccacgcatagccaggagggattatgacttgcttctgatcttcctttctgatgagaatgacaaccaccccctcttcactaaaagcacctaccaggcagaggtgatggaaaactctcccgctggcacccctctcacggtgctcaatgggcccatcctggccctggatgcagaccaagacatctacgccgtggtgacctaccagctgctgggtgcccagagtggcctctttgacatcaacagcagcaccggtgtggtgaccgtgaggtcaggtgtcatcattgaccgggaggcattctcgccacccatcctggagctgctgctgctggctaaggacatcgggctgctcaacagcacggcccacctgctcatcaccatcctggatgacaatgacaaccggcccacctttagccctgccaccctcactgtccatctgctagagaactgcccgcctggattctcagtccttcaagtcacagccacagatgaggacagtggcctcaatggggagctggtctaccgaatagaagctggggctcaggaccgcttcctcattcatctggtcaccggggtcatccgtgttggtaatgccaccatcgacagagaggagcaggagtcctacaggctaacggtggtggccaccgaccggggcaccgttcctctctcgggcacagccattgtcaccattctgatcgatgacatcaatgactcccgccccgagttcctcaaccccatccagacagtgagcgtgctggagtcggctgagccaggcactgtcattgccaatatcacggccattgaccacgacctcaacccaaagctagagtaccacattgtcggcattgtggccaaggacgacactgatcgcctggtgcccaaccaggaggacgcctttgctgtgaatatcaacacaggatctgtaatggtgaagtcccccatgaatcgggagctggttgccacctatgaggtcactctctcagtgattgacaatgccagcgacctaccagagcgctctgtcagtgtgccaaatgccaagctgactgtcaacgtcctggacgtcaatgacaatacgccccagttcaagccctttgggatcacctactacatggagcggatcctggagggggccacccctgggaccacactcattgctgtggcagccgtggaccctgacaagggccttaatgggctggtcacctacaccctgctggacctggtgcccccagggtatgtccagctggaggactcctcggcagggaaggtcattgccaaccagacagtggactacgaggaggtgcactggctcaactttaccgtgagggcctcagacaacgggtccccgccccgggcagctgagatccctgtctacctggaaatcgtggacatcaatgacaacaaccccatctttgaccagccctcctaccaggaggctgtctttgaggatgtgcctgtgggcacaatcatcctgacagtcactgccactgatgctgactcaggcaactttgcactcattgagtacagccttggagatggagagagcaagtttgccatcaaccccaccacgggtgacatctatgtgctgtcttctctggaccgggagaagaaggaccactatatcctgactgccttggccaaagacaaccctggggatgtagccagcaaccgtcgcgaaaattcagtgcaggtggtgatccaagtgctggatgtcaatgactgccggccacagttctccaagccccagttcagcacaagcgtgtatgagaatgagccggcaggcacctcggtcatcaccatgatggccactgaccaggatgaaggtcccaatggagagttgacctactcacttgagggccctggcgtggaggccttccatgtggacatggactcgggcttggtgaccacacagcggccactgcagtcctacgagaagttcagtctgaccgtggtggccacagatggtggagagcccccactctggggcaccaccatgctcctggtggaggtcatcgacgtcaatgacaaccgccctgtctttgtgcgcccacccaacggcaccatcctccacatcagagaggagatcccgctgcgctccaacgtgtacgaggtctacgccacggacaaggatgagggcctcaacggggcggtgcgctacagcttcctgaagactgcgggcaaccgggactgggagttcttcatcatcgacccaatcagcggcctcatccagactgctcagcgcctggaccgcgagtcgcaggcggtgtacagcctcatcttggtggccagcgacctgggccagccagtgccatacgagactatgcagccgctgcaggtggccctggaggacatcgatgacaacgaaccccttttcgtgaggcctccaaaaggcagcccccagtaccagctgctgacagtgcctgagcactcaccacgcggcaccctcgtgggcaacgtgacaggcgcagtggatgcagatgagggccccaacgcgatcgtgtactacttcatcgcagccggcaacgaagagaagaacttccatctgcagcccgatgggtgtctgctggtgctgcgggacctggaccgggagcgagaagccatcttctccttcatcgtcaaggcctccagcaatcgcagctggacacctccccgtggaccctccccaaccctcgacctggttgctgacctcacactgcaggaggtgcgcgttgtgctagaggacatcaacgaccagccaccacgcttcaccaaggctgagtacactgcaggggtggccaccgacgccaaggtgggctcagagttgatccaggtgctggccctggatgcagacattggcaacaacagccttgtcttctacagcattctggccatccactacttccgggcccttgccaacgactctgaagatgtgggccaggtcttcaccatggggagcatggacggcattctgcgcaccttcgacctcttcatggcctacagccccggctacttcgtggtggacattgtggcccgagacctggcaggccacaacgacacggccatcatcggcatctacatcctgagggacgaccagcgcgtcaagatcgtcattaacgagatccccgaccgtgtgcgcggcttcgaggaggagttcatccacctgctctccaacatcactggggccattgtcaatactgacaatgtgcagttccatgtggacaagaagggccgggtgaactttgcgcagacagaactgcttatccacgtggtgaaccgcgataccaaccgcatcctggacgtggaccgggtgatccagatgatcgatgagaacaaggagcagctacggaatcttttccggaactacaacgtcctggacgtgcagcctgccatctctgtccggctgccggatgacatgtctgccctgcagatggcgatcatcgtcctggctatcctcctgttcctggccgccatgctctttgtcctcatgaactggtactacaggactgtacacaagaggaagctcaaggccattgtggctggctcagctgggaatcgtggcttcatcgacatcatggacatgcctaacaccaacaagtactcctttgatggagccaaccctgtgtggctggatcccttctgtcggaacctggagctggccgcccaggcggagcatgaggatgacctaccggagaacctgagtgagatcgccgacctgtggaacagccccacgcgcacccatggaacttttgggcgtgagccagcagctgtcaagcctgatgatgaccgatacctgcgggctgccatccaggagtatgacaacattgccaagctgggccagatcattcgtgaggggccaatcaagggctcgctgctgaaggtggtcctggaggattacctgcggctcaaaaagctctttgcacagcggatggtgcaaaaagcctcctcctgccactcctccatctctgagctgatacagactgagctggacgaggagccaggagaccacagcccagggcagggtagcctgcgcttccgccacaagccaccagtggagctcaaggggcccgatgggatccatgtggtgcacggcagcacgggcacgctgctggccaccgacctcaacagcctgcccgaggaagaccagaagggcctgggccgctcgctggagacgctgaccgctgccgaggccactgccttcgagcgcaacgcccgcacagaatccgccaaatccacacccctgcacaaacttcgcgacgtgatcatggagacccccctggagatcacagagctgtgactagacagggaagccttgtgggtgtgagcagcacccatccaccgtcccctcccagggagcaagggcagggacagggccggtcgggggggaccctccaaggccaggccttggggacaaccttggcttggccctggcagcccgcatcagctgctcagatcccacttttgccagacgctcattcagcatctgacctctaccttcataagatctgttatttttataagaaaaccaaacaaaaatgttaagcatctaaggacaaggtaaggagggtcactggggcccaagagtctggggaccagcttggctcaggctgagctgaaagaggccaaacaggccctcctccctcccggctccaccccgcaagcaccatcccctccggctaagcaggcgcaagggaggcccagcgcggacatcccctgctggccggacacccgactccagtccaagtctcgctacatttccgccacatccctctctgctggacgtccaggtggaggtggcatccccacgtggacaagaaagtcaatgtcaatgaacaagcattctctccatttcactggcttcccaaatgtgtgcccagcttataaacagaagtgactgatgttccctccggttttg

SEQ ID NO: 345 - protein, 1759 aa, Homo sapiens
MTFRMDRISGEIAWAPPDRERQSFYHLVATVEDEGTPTLSATTHVYVTIVDENDNAPMFQQPHYEVLLDEGPDTLNTSLITIQALDLDEGPNGTVTYAIVAGNIVNTFRIDRHMGVITAAKELDYEISHGRYTLIVTATDQCPILSHRLTSTTTVLVNVNDINDNVPTFPRDYEGPFEVTEGQPGPRVWTFLAHDRDSGPNGQVEYSIMDGDPLGEFVISPVEGVLRVRKDVELDRETIAFYNLTICARDRGMPPLSSTMLVGIRVLDINDNDPVLLNLPMNITISENSPVSSFVAHVLASDADSGCNARLTFNITAGNRERAFFINATTGIVTVNRPLDRERIPEYKLTISVKDNPENPRIARRDYDLLLIFLSDENDNHPLFTKSTYQAEVMENSPAGTPLTVLNGPILALDADQDIYAVVTYQLLGAQSGLFDINSSTGVVTVRSGVIIDREAFSPPILLLLAKDIGLLNSTAHLLITILDDNDNRPTFSPATLTVHLLENCPPGFSVLQVTATDEDSQGELVYRIEAGAQDRFLIHLVTGVIRVGNATIDREEQESYRLTVVATDRGTVPLSGTAIVTILIDDINDSRPEFLNPIQTVSVLESAEPGTVIANITAIDHDLNPKLEYHIVGIVAKDDTDRLVPNQEDAFAVNINTGSVMVKSPMNRELVATYEVTLSVIDNASDLPERSVSVPNAKLTVNVLDVNDNTPQFKPFGITYYMERIGATPGTTLIAVAAVDPDKQGLVTYTLLDLVPPGYVQLEDSSAGKVIANQTVDYEEVHWLNFTVRASDNGSPPRAAEIPVYLEIVDINDNNPIFDQPSYQEAVFEDVPVGTIILTVTATDADSGNFALIEYSLGDGESKFAINPTTGDIYVLSSLDREKKDHYILTAKDNPGDVNRRENSVQVVIQVLDVNDCRPQFSKPQFSTSVYENEPAGTSVITMMATDQDEGPNGELTYSLEGPGVEAFHVDMDSGLVTTQRPLQSYEKFSLTVVATDGGEPPLWGTTMLLVEVIDVNDNRPVFVRPPNGTILHIREEIPLRSNVYEVYATDKDEQGAVRYSFLKTAGNRDWEFFIIDPISGLIQTAQRLDRESQAVYSLILVASDLGQPVPYETMQPLQVEDIDDNEPLFVRPPKGSPQYQLLTVPEHSPRGTLVGNVTGAVDADEGPNAIVYYFIAAGNEEKNFHLQPDGCLLVLRDLDREREAIFSFIVKASSNRSWTPPRGPSPTLDLVADLTLQEVRVVLEDINDQPPRFTKAEYTAGVATDAKVGSELIQVLALDADIGNNSLVFYSILAIHYFRANDSEDVGQVFTMGSMDGILRTFDLFMAYSPGYFVVDIVARDLAGHNDTAIIGIYILRDDQRVKIVINEIPDRVRGFEEEFIHLLSNITGAIVNTDNVQFHVDKKGRVNFAQTELLIHVVNRDTNRILDVDRVIQMIDENKEQLRNLFRNYNVLDVQPAISVRLPDDMSALQMAIIVLAILLFLAAMLFVLMNWYYRTVHKRKLKAIVAGSAGNRGFIDIMDMPNTNKYSFDGANPVWLDPFCRNLELAAQAEHEDDLPENLSEIADLWNSPTRTHGTFGREPAAVKPDDDRYLRAAIQEYDNIAKLGQIIREGPIKGSLLKVVLEDYLRLKKLFAQRMVQKASSCHSSISELIQTELDEEPGDHSPGQGSLRFRHKPPVELKGPDGIHVVHGSTGTLLATDLNSLPEEDQKGLGRSLETLTAAEATAFERNARTESAKSTPLHKLRDVIMPLEITEL

SEQ ID NO: 346 - DNA, 4062 bp, Homo sapiens
gcatcatgggaggggcagagccacgtgccccaagcttatgaggaggctgtgggcccaccccagccacaagtcccagattctactggggaccgtcatcctttgtggggattgggagggtttggccaggagcacccctgggaagggcagattttagggggttcttctcaggctgaacctggcctggtctggtccacaggatctgtaatggtgaagtcccccatgaatcgggagctggttgccacctatgaggtcactctctcagtgattgacaatgccagcgacctaccagagcgctctgtcagtgtgccaaatgccaagctgactgtcaacgtcctggacgtcaatgacaatacgccccagttcaagccctttgggatcacctactacatggagcggatcctggagggggccacccctgggaccacactcattgctgtggcagccgtggaccctgacaagggccttaatgggctggtcacctacaccctgctggacctggtgcccccagggtatgtccagctggaggactcctcggcagggaaggtcattgccaaccagacagtggactacgaggaggtgcactggctcaactttaccgtgagggcctcagacaacgggtccccgccccgggcagctgagatccctgtctacctggaaatcgtggacatcaatgacaacaaccccatctttgaccagccctcctaccaggaggctgtctttgaggatgtgcctgtgggcacaatcatcctgacagtcactgccactgatgctgactcaggcaactttgcactcattgagtacagccttggagatggagagagcaagtttgccatcaaccccaccacgggtgacatctatgtgctgtcttctctggaccgggagaagaaggaccactatatcctgactgccttggccaaagacaaccctggggatgtagccagcaaccgtcgcgaaaattcagtgcaggtggtgatccaagtgctggatgtcaatgactgccggccacagttctccaagccccagttcagcacaagcgtgtatgagaatgagccggcaggcacctcggtcatcaccatgatggccactgaccaggatgaaggtcccaatggagagttgacctactcacttgagggccctggcgtggaggccttccatgtggacatggactcgggcttggtgaccacacagcggccactgcagtcctacgagaagttcagtctgaccgtggtggccacagatggtggagagcccccactctggggcaccaccatgctcctggtggaggtcatcgacgtcaatgacaaccgccctgtctttgtgcgcccacccaacggcaccatcctccacatcagagaggagatcccgctgcgctccaacgtgtacgaggtctacgccacggacaaggatgagggcctcaacggggcggtgcgctacagcttcctgaagactgcgggcaaccgggactgggagttcttcatcatcgacccaatcagcggcctcatccagactgctcagcgcctggaccgcgagtcgcaggcggtgtacagcctcatcttggtggccagcgacctgggccagccagtgccatacgagactatgcagccgctgcaggtggccctggaggacatcgatgacaacgaaccccttttcgtgaggcctccaaaaggcagcccccagtaccagctgctgacagtgcctgagcactcaccacgcggcaccctcgtgggcaacgtgacaggcgcagtggatgcagatgagggccccaacgcgatcgtgtactacttcatcgcagccggcaacgaagagaagaacttccatctgcagcccgatgggtgtctgctggtgctgcgggacctggaccgggagcgagaagccatcttctccttcatcgtcaaggcctccagcaatcgcagctggacacctccccgtggaccctccccaaccctcgacctggttgctgacctcacactgcaggaggtgcgcgttgtgctagaggacatcaacgaccagccaccacgcttcaccaaggctgagtacactgcaggggtggccaccgacgccaaggtgggctcagagttgatccaggtgctggccctggatgcagacattggcaacaacagccttgtcttctacagcattctggccatccactacttccgggcccttgccaacgactctgaagatgtgggccaggtcttcaccatggggagcatggacggcattctgcgcaccttcgacctcttcatggcctacagccccggctacttcgtggtggacattgtggcccgagacctggcaggccacaacgacacggccatcatcggcatctacatcctgagggacgaccagcgcgtcaagatcgtcattaacgagatccccgaccgtgtgcgcggcttcgaggaggagttcatccacctgctctccaacatcactggggccattgtcaatactgacaatgtgcagttccatgtggacaagaagggccgggtgaactttgcgcagacagaactgcttatccacgtggtgaaccgcgataccaaccgcatcctggacgtggaccgggtgatccagatgatcgatgagaacaaggagcagctacggaatcttttccggaactacaacgtcctggacgtgcagcctgccatctctgtccggctgccggatgacatgtctgccctgcagatggcgatcatcgtcctggctatcctcctgttcctggccgccatgctctttgtcctcatgaactggtactacaggactgtacacaagaggaagctcaaggccattgtggctggctcagctgggaatcgtggcttcatcgacatcatggacatgcctaacaccaacaagtactcctttgatggagccaaccctgtgtggctggatcccttctgtcggaacctggagctggccgcccaggcggagcatgaggatgacctaccggagaacctgagtgagatcgccgacctgtggaacagccccacgcgcacccatggaacttttgggcgtgagccagcagctgtcaagcctgatgatgaccgatacctgcgggctgccatccaggagtatgacaacattgccaagctgggccagatcattcgtgaggggccaatcaagctgatacagactgagctggacgaggagccaggagaccacagcccagggcagggtagcctgcgcttccgccacaagccaccagtggagctcaaggggcccgatgggatccatgtggtgcacggcagcacgggcacgctgctggccaccgacctcaacagcctgcccgaggaagaccagaagggcctgggccgctcgctggagacgctgaccgctgccgaggccactgccttcgagcgcaacgcccgcacagaatccgccaaatccacacccctgcacaaacttcgcgacgtgatcatggagacccccctggagatcacagagctgtgactagacagggaagccttgtgggtgtgagcagcacccatccaccgtcccctcccagggagcaagggcagggacagggccggtcgggggggaccctccaaggccaggccttggggacaaccttggcttggccctggcagcccgcatcagctgctcagatcccacttttgccagacgctcattcagcatctgacctctaccttcataagatctgttatttttataagaaaaccaaacaaaaatgttaagcatctaaggacaaggtaaggagggtcactggggcccaagagtctggggaccagcttggctcaggctgagctgaaagaggccaaacaggccctcctccctcccggctccaccccgcaagcaccatcccctccggctaagcaggcgcaagggaggcccagcgcggacatcccctgctggccggacacccgactccagtccaagtctcgctacatttccgccacatccctctctgctggacgtccaggtggaggtggcatccccacgtggacaagaaagtcaatgtcaatgaacaagcattctctccatttcactggcttcccaaatgtgtgcccagcttataaacagaagtgactgatgttccctccggttttg

SEQ ID NO: 347 - protein, 1063 aa, Homo sapiens
MVKSPMNRELVATYEVTLSVIDNASDLPERSVSVPNAKLTVNVLDVNDNTPQFKPFGITYYMERIGATPGTTLIAVAAVDPDKQGLVTYTLLDLVPPGYVQLEDSSAGKVIANQTVDYEEVHWLNFTVRASDNGSPPRAAEIPVYLEIVDINDNNPIFDQPSYQEAVFEDVPVGTIILTVTATDADSGNFALIEYSLGDGESKFAINPTTGDIYVLSSLDREKKDHYILTAKDNPGDVNRRENSVQVVIQVLDVNDCRPQFSKPQFSTSVYENEPAGTSVITMMATDQDEGPNGELTYSLEGPGVEAFHVDMDSGLVTTQRPLQSYEKFSLTVVATDGGEPPLWGTTMLLVEVIDVNDNRPVFVRPPNGTILHIREEIPLRSNVYEVYATDKDEQGAVRYSFLKTAGNRDWEFFIIDPISGLIQTAQRLDRESQAVYSLILVASDLGQPVPYETMQPLQVEDIDDNEPLFVRPPKGSPQYQLLTVPEHSPRGTLVGNVTGAVDADEGPNAIVYYFIAAGNEEKNFHLQPDGCLLVLRDLDREREAIFSFIVKASSNRSWTPPRGPSPTLDLVADLTLQEVRVVLEDINDQPPRFTKAEYTAGVATDAKVGSELIQVLALDADIGNNSLVFYSILAIHYFRANDSEDVGQVFTMGSMDGILRTFDLFMAYSPGYFVVDIVARDLAGHNDTAIIGIYILRDDQRVKIVINEIPDRVRGFEEEFIHLLSNITGAIVNTDNVQFHVDKKGRVNFAQTELLIHVVNRDTNRILDVDRVIQMIDENKEQLRNLFRNYNVLDVQPAISVRLPDDMSALQMAIIVLAILLFLAAMLFVLMNWYYRTVHKRKLKAIVAGSAGNRGFIDIMDMPNTNKYSFDGANPVWLDPFCRNLELAAQAEHEDDLPENLSEIADLWNSPTRTHGTFGREPAAVKPDDDRYLRAAIQEYDNIAKLGQIIREGPIKLIQTELDEEPGDHSPGQGSLRFRHKPPVELKGPDGIHVVHGSTGTLLATDLNSLPEEDQKGLGRSLETLTAAEATAFERNARTESAKSTPLHKLRDVIMPLEITEL

SEQ ID NO: 348 - DNA, 3935 bp, Homo sapiens
gcggcggcggcggctcgggagagagggacgcgggctgcaggcgcgatgcttggctagaggacgcgtccgacggcggccggacgctgaggtggtcggggctagtcagcccggcctgggcatggagcgcggggtggcagagcctctggacgtttggggcgcgcccagtccgagcccccggcgcgcctgaagttgcgagcggcgagcggcgagcggcgagcggcccgcggagacccaggagctgccggcacgccgcggatgagccttcgcgccggcgggaagacgcggcggtggccagggccagagcaggcggcccgcgggggccgatccggcggagagcagagcccgaggcgaggcgaggcgcggcgccgctgcacacacgcacacggagccatggggcgccatgttgccaccagctgccacgtggcctggcttttggtgctgatctctggatgctggggccaggtgaaccggctgcccttcttcaccaaccacttctttgatacatacctgctgatcagcgaggacacgcctgtgggttcttctgtgacccagttgctggcccaagacatggacaatgaccccctggtgtttggcgtgtctggggaggaggcctctcgcttctttgcagtggagcctgacactggcgtggtgtggctccggcagccactggacagagagaccaagtcagagttcaccgtggagttctctgtcagcgaccaccagggggtgatcacacggaaggtgaacatccaggtcggggatgtgaatgacaacgcgcccacatttcacaatcagccctacagcgtccgcatccctgagaatacaccagtggggacgcccatcttcatcgtgaatgccacagaccccgacttgggggcagggggcagcgtcctctactccttccagcccccctcccaattcttcgccattgacagcgcccgcggtatcgtcacagtgatccgggagctggactacgagaccacacaggcctaccagctcacggtcaacgccacagatcaagacaagaccaggcctctgtccaccctggccaacttggccatcatcatcacagatgtccaggacatggaccccatcttcatcaacctgccttacagcaccaacatctacgagcattctcctccgggcacgacggtgcgcatcatcaccgccatagaccaggataaaggacgtccccggggcattggctacaccatcgtttcagggaataccaacagcatctttgccctggactacatcagcggagtgctgaccttgaatggcctgctggaccgggagaaccccctgtacagccatggcttcatcctgactgtgaagggcacggagctgaacgatgaccgcaccccatctgacgctacagtcaccacgaccttcaatatcctggttattgacatcaatgacaatgccccggagttcaacagctccgagtacagcgtggccatcactgagctggcacaggtcggctttgcccttccactcttcatccaggtggtggacaaggatgaggtgaggcctgaacagcatgtttgaggtgtacttggtggggaacaactcccaccacttcatcatctccccgacctccgtccaggggaaggcggacattcgtattcgggtggccatcccactggactacgagaccgtggaccgctacgactttgatctctttgccaatgagagtgtgcctgaccatgtgggctatgccaaggtgaagatcactctcatcaatgaaaatgacaaccggcccatcttcagccagccactgtacaacatcagcctgtacgagaacgtcaccgtggggacctctgtgctgacagtcctggcaactgacaatgatgcaggcacctttggggaagtcagctacttcttcagtgatgaccctgacaggttctcgctggacaaggacacgggactcatcatgctgattgccaggctggactatgagctcatccagcgcttcaccctgacgatcattgcccgggacgggggcggcgaggagaccacaggccgggtcaggatcaatgtgttggatgtcaacgacaacgtgcccaccttccagaaggatgcctacgtgggtgctctgcgggagaacgagccttctgtcacacagctggtgcggctccgggcaacagatgaagactcccctcccaacaaccagatcacctacagcattgtcagtgcatctgcctttggcagctacttcgacatcagcctgtacgagggctatggagtgatcagcgtcagtcgccccctggattatgaacagatatccaatgggctgatttatctgacggtcatggccatggatgctggcaacccccctctcaacagcaccgtccctgtcaccatcgaggtgtttgatgagaatgacaaccctcccaccttcagcaagcccgcctacttcgtctccgtggtggagaacatcatggcaggagccacggtgctgttcctgaatgccacagacctggaccgctcccgggagtacggccaggagtccatcatctactccttggaaggctccacccagtttcggatcaatgcccgctcaggggaaatcaccaccacgtctctgcttgaccgagagaccaagtctgaatacatcctcatcgttcgcgcagtggacgggggtgtgggccacaaccagaaaactggcatcgccaccgtaaacatcaccctcctggacatcaatgacaaccaccccacgtggaaggacgcaccctactacatcaacctggtggagatgacccctccagactctgatgtgaccacggtggtggctgttgacccagacctgggggagaatggcaccctggtgtacagcatccagccacccaacaagttctacagcctcaacagcaccacgggcaagatccgcaccacccacgccatgctggaccgggagaaccccgacccccatgaggccgagctgatgcgcaaaatcgtcgtctctgttactgactgtggcaggccccctctgaaagccaccagcagtgccacagtgtttgtgaacctcttggatctcaatgacaatgaccccacctttcagaacctgccttttgtggccgaggtgcttgaaggcatcccggcgggggtctccatctaccaagtggtggccatcgacctcgatgagggcctgaacggcctggtgtcctaccgcatgccggtgggcatgccccgcatggacttcctcatcaacagcagcagcggcgtggtggtcaccaccaccgagctggaccgcgagcgcatcgcggagtaccagctgcgggtggtggccagtgatgcaggcacgcccaccaagagctccaccagcacgctcaccatccatgtgctggatgtgaacgacgagacgcccaccttcttcccggccgtgtacaatgtgtctgtgtccgaggacgtgccacgcgagttccgggtggtctggctgaactgcacggacaacgacgtgggcctcaatgcagagctcagctacttcatcacaggtgctgccccggcctccgcccacctgtgcaggcctcctggggccctgcctccacccctcccagatggacagccagactaggtgggggcaggtgagggtggaaaagaggtcagggctctactgttgggctttagcctctggtggtgcctcccgaggatttgctcctggctcttcccaagggctttgcagctggatcactctggactggctccctggggacctcctgaacctgttggttgcagggacggggagcatctaccaaggttcattctagagggaggtaaggccccatgattcctagggaggagccctgagccccactccccgccccaagtctgggtgacagagcagtgacttggaggaatgtggcctcatccttccttggggacctgttgagaattcccacctgtttagaggcagatggttttgatctccctaaatg

SEQ ID NO: 349 - protein, 671 aa, Homo sapiens
MFEVYLVGNNSHHFIISPTSVQGKADIRIRVAIPLDYETVDRYDFDLFANESVPDHVGYAKVKITLINENDNRPIFSQPLYNISLYENVTVGTSVLTVLATDNDAGTFGEVSYFFSDDPDRFSLDKDTGLIMLIARLDYELIQRFTLTIIARDGGGEETTGRVRINVLDVNDNVPTFQKDAYVGALRENEPSVTQLVRLRATDEDSPPNNQITYSIVSASAFGSYFDISLYEGYGVISVSRPLDYEQISNGLIYLTVMAMDAGNPPLNSTVPVTIEVFDENDNPPTFSKPAYFVSVVENIMAGATVLFLNATDLDRSREYGQESIIYSLEGSTQFRINARSGEITTTSLLDRETKSEYILIVRAVDGGVGHNQKTGIATVNITLLDINDNHPTWKDAPYYINLVEMTPPDSDVTTVVAVDPDLGENGTLVYSIQPPNKFYSLNSTTGKIRTTHAMLDRENPDFAELMRKIVVSVTDCGRPPLKATSSATVFVNLLDLNDNDPTFQNLPFVAEVLEGIPAGVSIYQVVAIDLDEQGLVSYRMPVGMPRMDFLINSSSGVVVTTTELDRERIAEYQLRVVASDAGTPTKSSTSTLTIHVLDVNDETPTFFPAVYNVSVSEDVPREFRVVWLNCTDNDVQAELSYFITGAAPASAHLCRPPGALPPPLPDGQPD

SEQ ID NO: 350 - DNA, 2567 bp, Homo sapiens
gcggcggcggcggctcgggagagagggacgcgggctgcaggcgcgatgcttggctagaggacgcgtccgacggcggccggacgctgaggtggtcggggctagtcagcccggcctgggcatggagcgcggggtggcagagcctctggacgtttggggcgcgcccagtccgagcccccggcgcgcctgaagttgcgagcggcgagcggcgagcggcgagcggcccgcggagacccaggagctgccggcacgccgcggatgagccttcgcgccggcgggaagacgcggcggtggccagggccagagcaggcggcccgcgggggccgatccggcggagagcagagcccgaggcgaggcgaggcgcggcgccgctgcacacacgcacacggagccatggggcgccatgttgccaccagctgccacgtggcctggcttttggtgctgatctctggatgctggggccaggtgaaccggctgcccttcttcaccaaccacttctttgatacatacctgctgatcagcgaggacacgcctgtgggttcttctgtgacccagttgctggcccaagacatggacaatgaccccctggtgtttggcgtgtctggggaggaggcctctcgcttctttgcagtggagcctgacactggcgtggtgtggctccggcagccactggacagagagaccaagtcagagttcaccgtggagttctctgtcagcgaccaccagggggtgatcacacggaaggtgaacatccaggtcggggatgtgaatgacaacgcgcccacatttcacaatcagccctacagcgtccgcatccctgagaatacaccagtggggacgcccatcttcatcgtgaatgccacagaccccgacttgggggcagggggcagcgtcctctactccttccagcccccctcccaattcttcgccattgacagcgcccgcggtatcgtcacagtgatccgggagctggactacgagaccacacaggcctaccagctcacggtcaacgccacagatcaagacaagaccaggcctctgtccaccctggccaacttggccatcatcatcacagatgtccaggacatggaccccatcttcatcaacctgccttacagcaccaacatctacgagcattctcctccgggcacgacggtgcgcatcatcaccgccatagaccaggataaaggacgtccccggggcattggctacaccatcgtttcagggaataccaacagcatctttgccctggactacatcagcggagtgctgaccttgaatggcctgctggaccgggagaaccccctgtacagccatggcttcatcctgactgtgaagggcacggagctgaacgatgaccgcaccccatctgacgctacagtcaccacgaccttcaatatcctggttattgacatcaatgacaatgccccggagttcaacagctccgagtacagcgtggccatcactgagctggcacaggtcggctttgcccttccactcttcatccaggtggtggacaaggatgaggtgaggcctgaacagcatgtttgaggtgtacttggtggggaacaactcccaccacttcatcatctccccgacctccgtccaggggaaggcggacattcgtattcgggtggccatcccactggactacgagaccgtggaccgctacgactttgatctctttgccaatgagagtgtgcctgaccatgtgggctatgccaaggtgaagatcactctcatcaatgaaaatgacaaccggcccatcttcagccagccactgtacaacatcagcctgtacgagaacgtcaccgtggggacctctgtgctgacagtcctggtgagtccccgcttcactgcagggccactgagctctccagggccgactgtggtgaggcacccagagggattttgtccaagggacctcagcaatcagggaaggaggcacccccaaatccctgagctgtgtttgttggtgtattaaataaagtttttggactcttcaggaaggggctcccttgacctaggttgcaatatggaaaaggagccaacctgaggggtgacaagactgagctgaggacactggttttctgcctttccccgagagagactcagtgagggtgggctgggagccctggaagccccctcaaatgggtgggaaggtgccagccatccttgagaagggcaaccctctccatgtgagcacaggcaccagagaggggcaggcgcctggagggtaccggggcacccccagctgcccatggctggacttgccctttgacaaggggccctcccagtgtcatttgtatctgtcagtactcttggttgcaagggacagaaacccttaagtagttcaagcaaaaaaggattggctcatgtaactcaaaagtataagtgatttcaggccgggctcggtggctcacgcctgtcatccaacaccttgagaaagccgaggtgggcggatcacttgaggtcgggagtttgagaccagcctggccaacatggcaaaaccccgtctctactaaaaatacaaaaattagccgggtgtggtggcacacgcctgtagtccc

SEQ ID NO: 351 - protein, 420 aa, Homo sapiens
MSLRAGGKTRRWPGPEQARGRSGGEQSPRRGEARRRCTHAHGAMGRHVATSCHVAWLLVLISGCWGQVNRLPFFTNHFFDTYLLISEDTPVGSSVTQLLAQDMDNDPLVFGVSGEEASRFFAVEPDTGVVWLRQPLDRETKSEFTVEFSVSDHQGVITRKVNIQVGDVNDNAPTFHNQPYSVRIPENTPVGTPIFIVNATDPDLGAGGSVKFQPPSQFFAIDSRIVTVIRELDYETTQAYQLTVNATDQDKWLSTLANLAIIITDVQDMDPIFINLPYSTNIYEHSPPGTTVRIITAIDQDKGRPRGIGYTIVSGNTNSIFALDYISGVLTLNGLLDRENPKHGFILTVKGTELNDDRTPSDATVTTTFNILVIDINDNAPEFNSSEYSVAITELAQVGFALPLFIQVVDKDEVRPEQHV

SEQ ID NO: 352 - DNA, 4069 bp, Homo sapiens
gcggcggcggcggctcgggagagagggacgcgggctgcaggcgcgatgcttggctagaggacgcgtccgacggcggccggacgctgaggtggtcggggctagtcagcccggcctgggcatggagcgcggggtggcagagcctctggacgtttggggcgcgcccagtccgagcccccggcgcgcctgaagttgcgagcggcgagcggcgagcggcgagcggcccgcggagacccaggagctgccggcacgccgcggatgagccttcgcgccggcgggaagacgcggcggtggccagggccagagcaggcggcccgcgggggccgatccggcggagagcagagcccgaggcgaggcgaggcgcggcgccgctgcacacacgcacacggagccatggggcgccatgttgccaccagctgccacgtggcctggcttttggtgctgatctctggatgctggggccaggtgaaccggctgcccttcttcaccaaccacttctttgatacatacctgctgatcagcgaggacacgcctgtgggttcttctgtgacccagttgctggcccaagacatggacaatgaccccctggtgtttggcgtgtctggggaggaggcctctcgcttctttgcagtggagcctgacactggcgtggtgtggctccggcagccactggacagagagaccaagtcagagttcaccgtggagttctctgtcagcgaccaccagggggtgatcacacggaaggtgaacatccaggtcggggatgtgaatgacaacgcgcccacatttcacaatcagccctacagcgtccgcatccctgagaatacaccagtggggacgcccatcttcatcgtgaatgccacagaccccgacttgggggcagggggcagcgtcctctactccttccagcccccctcccaattcttcgccattgacagcgcccgcggtatcgtcacagtgatccgggagctggactacgagaccacacaggcctaccagctcacggtcaacgccacagatcaagacaagaccaggcctctgtccaccctggccaacttggccatcatcatcacagatgtccaggacatggaccccatcttcatcaacctgccttacagcaccaacatctacgagcattctcctccgggcacgacggtgcgcatcatcaccgccatagaccaggataaaggacgtccccggggcattggctacaccatcgtttcagggaataccaacagcatctttgccctggactacatcagcggagtgctgaccttgaatggcctgctggaccgggagaaccccctgtacagccatggcttcatcctgactgtgaagggcacggagctgaacgatgaccgcaccccatctgacgctacagtcaccacgaccttcaatatcctggttattgacatcaatgacaatgccccggagttcaacagctccgagtacagcgtggccatcactgagctggcacaggtcggctttgcccttccactcttcatccaggtggtggacaaggatgaggtgaggcctgaacagcatgtttgaggtgtacttggtggggaacaactcccaccacttcatcatctccccgacctccgtccaggggaaggcggacattcgtattcgggtggccatcccactggactacgagaccgtggaccgctacgactttgatctctttgccaatgagagtgtgcctgaccatgtgggctatgccaaggtgaagatcactctcatcaatgaaaatgacaaccggcccatcttcagccagccactgtacaacatcagcctgtacgagaacgtcaccgtggggacctctgtgctgacagtcctggcaactgacaatgatgcaggcacctttggggaagtcagctacttcttcagtgatgaccctgacaggttctcgctggacaaggacacgggactcatcatgctgattgccaggctggactatgagctcatccagcgcttcaccctgacgatcattgcccgggacgggggcggcgaggagaccacaggccgggtcaggatcaatgtgttggatgtcaacgacaacgtgcccaccttccagaaggatgcctacgtgggtgctctgcgggagaacgagccttctgtcacacagctggtgcggctccgggcaacagatgaagactcccctcccaacaaccagatcacctacagcattgtcagtgcatctgcctttggcagctacttcgacatcagcctgtacgagggctatggagtgatcagcgtcagtcgccccctggattatgaacagatatccaatgggctgatttatctgacggtcatggccatggatgctggcaacccccctctcaacagcaccgtccctgtcaccatcgaggtgtttgatgagaatgacaaccctcccaccttcagcaagcccgcctacttcgtctccgtggtggagaacatcatggcaggagccacggtgctgttcctgaatgccacagacctggaccgctcccgggagtacggccaggagtccatcatctactccttggaaggctccacccagtttcggatcaatgcccgctcaggggaaatcaccaccacgtctctgcttgaccgagagaccaagtctgaatacatcctcatcgttcgcgcagtggacgggggtgtgggccacaaccagaaaactggcatcgccaccgtaaacatcaccctcctggacatcaatgacaaccaccccacgtggaaggacgcaccctactacatcaacctggtggagatgacccctccagactctgatgtgaccacggtggtggctgttgacccagacctgggggagaatggcaccctggtgtacagcatccagccacccaacaagttctacagcctcaacagcaccacgggcaagatccgcaccacccacgccatgctggaccgggagaaccccgacccccatgaggccgagctgatgcgcaaaatcgtcgtctctgttactgactgtggcaggccccctctgaaagccaccagcagtgccacagtgtttgtgaacctcttggatctcaatgacaatgaccccacctttcagaacctgccttttgtggccgaggtgcttgaaggcatcccggcgggggtctccatctaccaagtggtggccatcgacctcgatgagggcctgaacggcctggtgtcctaccgcatgccggtgggcatgccccgcatggacttcctcatcaacagcagcagcggcgtggtggtcaccaccaccgagctggaccgcgagcgcatcgcggagtaccagctgcgggtggtggccagtgatgcaggcacgcccaccaagagctccaccagcacgctcaccatccatgtgctggatgtgaacgacgagacgcccaccttcttcccggccgtgtacaatgtgtctgtgtccgaggacgtgccacgcgagttccgggtggtctggctgaactgcacggacaacgacgtgggcctcaatgcagagctcagctacttcatcacaggtggcaacgtggatgggaagttcagcgtgggttaccgcgatgccgttgtgagaaccgtggtgggcctggaccgggagaccacagccgcctacatgctcatcctggaggccatcgacaacggccctgtagggaagcgacacacgggcacagccaccgtgttcgtcactgtcctggatgtgaatgacaaccggcccatctttctgcagagcagctatgaggccagcgtccctgaggacatccctgaaggccacagcatcttgcaggcaggttgcagagctgaggatagggctctggctccccacaaacaggaggaagacttggcctccccctgcatatctcccgccccacccagaagggcctttcagagtagcggggagaaagagacgtcacaatttcccggaaaggagttgagaagagagccagggcccagcaaggcccagaacagagctgctttcacagagcccttggccgaggctcccctcttgggaagtaaacaggcacaagaagaaagggctcctttgcccagggagcaggcgcaacagctccaaggctcagagggagagaagggaggaccc

SEQ ID NO: 353 - protein, 831 aa, Homo sapiens
MFEVYLVGNNSHHFIISPTSVQGKADIRIRVAIPLDYETVDRYDFDLFANESVPDHVGYAKVKITLINENDNRPIFSQPLYNISLYENVTVGTSVLTVLATDNDAGTFGEVSYFFSDDPDRFSLDKDTGLIMLIARLDYELIQRFTLTIIARDGGGEETTGRVRINVLDVNDNVPTFQKDAYVGALRENEPSVTQLVRLRATDEDSPPNNQITYSIVSASAFGSYFDISLYEGYGVISVSRPLDYEQISNGLIYLTVMAMDAGNPPLNSTVPVTIEVFDENDNPPTFSKPAYFVSVVENIMAGATVLFLNATDLDRSREYGQESIIYSLEGSTQFRINARSGEITTTSLLDRETKSEYILIVRAVDGGVGHNQKTGIATVNITLLDINDNHPTWKDAPYYINLVEMTPPDSDVTTVVAVDPDLGENGTLVYSIQPPNKFYSLNSTTGKIRTTHAMLDRENPDFAELMRKIVVSVTDCGRPPLKATSSATVFVNLLDLNDNDPTFQNLPFVAEVLEGIPAGVSIYQVVAIDLDEQGLVSYRMPVGMPRMDFLINSSSGVVVTTTELDRERIAEYQLRVVASDAGTPTKSSTSTLTIHVLDVNDETPTFFPAVYNVSVSEDVPREFRVVWLNCTDNDVQAELSYFITGGNVDGKFSVGYRDAVVRTVVGLDRETTAAYMLIAIDNGPVGKRHTGTATVFVTVLDVNDNRPIFLQSSYEASVPEDIPEGHSILQAGCRAEDRAPHKQEEDLDCISPAPPRRAFQSSGEKETSQFPGKELRREPGPSKAQNRAAFTEPLAEAPLLGSKQAQEERAPLPREQAQQLQGSEGEKGGP

SEQ ID NO: 354 - DNA, 11076 bp, Homo sapiens
gcggcggcggcggctcgggagagagggacgcgggctgcaggcgcgatgcttggctagaggacgcgtccgacggcggccggacgctgaggtggtcggggctagtcagcccggcctgggcatggagcgcggggtggcagagcctctggacgtttggggcgcgcccagtccgagcccccggcgcgcctgaagttgcgagcggcgagcggcgagcggcgagcggcccgcggagacccaggagctgccggcacgccgcggatgagccttcgcgccggcgggaagacgcggcggtggccagggccagagcaggcggcccgcgggggccgatccggcggagagcagagcccgaggcgaggcgaggcgcggcgccgctgcacacacgcacacggagccatggggcgccatgttgccaccagctgccacgtggcctggcttttggtgctgatctctggatgctggggccaggtgaaccggctgcccttcttcaccaaccacttctttgatacatacctgctgatcagcgaggacacgcctgtgggttcttctgtgacccagttgctggcccaagacatggacaatgaccccctggtgtttggcgtgtctggggaggaggcctctcgcttctttgcagtggagcctgacactggcgtggtgtggctccggcagccactggacagagagaccaagtcagagttcaccgtggagttctctgtcagcgaccaccagggggtgatcacacggaaggtgaacatccaggtcggggatgtgaatgacaacgcgcccacatttcacaatcagccctacagcgtccgcatccctgagaatacaccagtggggacgcccatcttcatcgtgaatgccacagaccccgacttgggggcagggggcagcgtcctctactccttccagcccccctcccaattcttcgccattgacagcgcccgcggtatcgtcacagtgatccgggagctggactacgagaccacacaggcctaccagctcacggtcaacgccacagatcaagacaagaccaggcctctgtccaccctggccaacttggccatcatcatcacagatgtccaggacatggaccccatcttcatcaacctgccttacagcaccaacatctacgagcattctcctccgggcacgacggtgcgcatcatcaccgccatagaccaggataaaggacgtccccggggcattggctacaccatcgtttcagggaataccaacagcatctttgccctggactacatcagcggagtgctgaccttgaatggcctgctggaccgggagaaccccctgtacagccatggcttcatcctgactgtgaagggcacggagctgaacgatgaccgcaccccatctgacgctacagtcaccacgaccttcaatatcctggttattgacatcaatgacaatgccccggagttcaacagctccgagtacagcgtggccatcactgagctggcacaggtcggctttgcccttccactcttcatccaggtggtggacaaggatgaggtgaggcctgaacagcatgtttgaggtgtacttggtggggaacaactcccaccacttcatcatctccccgacctccgtccaggggaaggcggacattcgtattcgggtggccatcccactggactacgagaccgtggaccgctacgactttgatctctttgccaatgagagtgtgcctgaccatgtgggctatgccaaggtgaagatcactctcatcaatgaaaatgacaaccggcccatcttcagccagccactgtacaacatcagcctgtacgagaacgtcaccgtggggacctctgtgctgacagtcctggcaactgacaatgatgcaggcacctttggggaagtcagctacttcttcagtgatgaccctgacaggttctcgctggacaaggacacgggactcatcatgctgattgccaggctggactatgagctcatccagcgcttcaccctgacgatcattgcccgggacgggggcggcgaggagaccacaggccgggtcaggatcaatgtgttggatgtcaacgacaacgtgcccaccttccagaaggatgcctacgtgggtgctctgcgggagaacgagccttctgtcacacagctggtgcggctccgggcaacagatgaagactcccctcccaacaaccagatcacctacagcattgtcagtgcatctgcctttggcagctacttcgacatcagcctgtacgagggctatggagtgatcagcgtcagtcgccccctggattatgaacagatatccaatgggctgatttatctgacggtcatggccatggatgctggcaacccccctctcaacagcaccgtccctgtcaccatcgaggtgtttgatgagaatgacaaccctcccaccttcagcaagcccgcctacttcgtctccgtggtggagaacatcatggcaggagccacggtgctgttcctgaatgccacagacctggaccgctcccgggagtacggccaggagtccatcatctactccttggaaggctccacccagtttcggatcaatgcccgctcaggggaaatcaccaccacgtctctgcttgaccgagagaccaagtctgaatacatcctcatcgttcgcgcagtggacgggggtgtgggccacaaccagaaaactggcatcgccaccgtaaacatcaccctcctggacatcaatgacaaccaccccacgtggaaggacgcaccctactacatcaacctggtggagatgacccctccagactctgatgtgaccacggtggtggctgttgacccagacctgggggagaatggcaccctggtgtacagcatccagccacccaacaagttctacagcctcaacagcaccacgggcaagatccgcaccacccacgccatgctggaccgggagaaccccgacccccatgaggccgagctgatgcgcaaaatcgtcgtctctgttactgactgtggcaggccccctctgaaagccaccagcagtgccacagtgtttgtgaacctcttggatctcaatgacaatgaccccacctttcagaacctgccttttgtggccgaggtgcttgaaggcatcccggcgggggtctccatctaccaagtggtggccatcgacctcgatgagggcctgaacggcctggtgtcctaccgcatgccggtgggcatgccccgcatggacttcctcatcaacagcagcagcggcgtggtggtcaccaccaccgagctggaccgcgagcgcatcgcggagtaccagctgcgggtggtggccagtgatgcaggcacgcccaccaagagctccaccagcacgctcaccatccatgtgctggatgtgaacgacgagacgcccaccttcttcccggccgtgtacaatgtgtctgtgtccgaggacgtgccacgcgagttccgggtggtctggctgaactgcacggacaacgacgtgggcctcaatgcagagctcagctacttcatcacaggtggcaacgtggatgggaagttcagcgtgggttaccgcgatgccgttgtgagaaccgtggtgggcctggaccgggagaccacagccgcctacatgctcatcctggaggccatcgacaacggccctgtagggaagcgacacacgggcacagccaccgtgttcgtcactgtcctggatgtgaatgacaaccggcccatctttctgcagagcagctatgaggccagcgtccctgaggacatccctgaaggccacagcatcttgcaggcagctgaaagccacggacgcagatgagggcgagtttgggcgtgtgtggtaccgcatcctccatggtaaccatggcaacaacttccggatccatgtcagcaatgggctcctgatgcgagggccccggcccctggaccgggagcggaactcatcccacgtgctgatagtggaggcctacaaccacgacctgggccccatgcggagctccgtcagggtgattgtgtacgtggaggacatcaacgatgaggcccccgtgttcacacagcagcagtacagccgtctggggcttcgagagaccgcaggcattggaacgtcagtcatcgtggtccaagccacagaccgagactctggggatggtggcctggtgaactaccgcatcctgtcgggcgcagaggggaagtttgagattgacgagagcacagggcttatcatcaccgtgaattacctggactacgagaccaagaccagctacatgatgaatgtgtcggccactgaccaggccccgcccttcaaccagggcttctgcagcgtctacatcactctgctcaacgagctggacgaggccgtgcagttctccaatgcctcatacgaggctgccatcctggagaatctggcactgggtactgagattgtgcgggtccaggcctactccatcgacaacctcaaccaaatcacgtaccgcttcaacgcctacaccagcacccaggccaaagccctcttcaagatagacgccatcacgggtgtgatcacagtccagggcctggtggaccgtgagaagggcgacttctataccttgacagtggtggcagatgacggcggccccaaggtggactccaccgtggtgagtctacatcactgtgctggacgagaatgacaacagcccccggtttgacttcacctccgactcggcggtcagcatacccgaggactgccctgtgggccagcgagtggctactgtcaaggcctgggaccctgatgctggcagcaatgggcaggtggtcttctccctggcctctggcaacatcgcgggggcctttgagatcgtcaccaccaatgactccattggcgaagtgtttgtggccaggcccctggacagagaagagctggatcactacatcctccaggttgtggcttctgaccgaggcacccctccacggaagaaggaccacatcctgcaggtgaccatcctggacatcaatgacaaccctccagtcatcgagagcccctttggatacaatgtcagtgtgaatgagaacgtgggtggaggtactgctgtggtccaggtgagagccactgaccgtgacatcgggatcaacagtgttctgtcctactacatcaccgagggcaacaaggacatgaccttccgcatggaccgcatcagcggtgagatcgccacacggcctgccccgcctgaccgcgagcgccagagcttctaccacctggtggccactgtggaggacgagggcaccccaaccctgtcggccaccacgcacgtgtacgtgaccattgtggatgagaatgataacgcgcccatgttccagcagccccactatgaggtgctgctggatgagggcccagacacgctcaacaccagcctcatcaccatccaggcactggacctggatgagggtcccaacggcacagtcacctatgccatcgtcgcaggcaacatcgtcaacaccttccgcatcgacagacacatgggtgtcatcactgctgccaaagagctggactatgagatcagccacggccgctacaccctgatcgtcactgccacagaccagtgccccatcttatcccaccgcctcacctctaccaccacggtgcttgtgaatgtgaatgacatcaacgacaatgtgcctaccttcccccgggactatgagggaccatttgaagtcactgagggccagccggggcccagagtgtggaccttcctggcccatgaccgagactcaggacccaacgggcaggtggagtacagcatcatggatggagaccctctgggggagtttgtgatctctcctgtggagggggtgctaagggtccggaaggacgtggagctggaccgggagaccatcgccttctacaacctgaccatctgtgcccgtgaccgggggatgcccccactcagctccacaatgctggtggggatccgggtgctggacatcaacgacaacgaccctgtgctgctgaacctgcccatgaacatcaccatcagcgagaacagccctgtctccagctttgtcgcccatgtcctggccagtgacgctgacagtggctgcaatgcacgcctcaccttcaacatcactgcgggcaaccgcgagcgggccttcttcatcaatgccacgacagggatcgtcactgtgaaccggcccctggaccgcgagcggatcccagagtacaagctgaccatttctgtgaaggacaacccggagaatccacgcatagccaggagggattatgacttgcttctgatcttcctttctgatgagaatgacaaccaccccctcttcactaaaagcacctaccaggcagaggtgatggaaaactctcccgctggcacccctctcacggtgctcaatgggcccatcctggccctggatgcagaccaagacatctacgccgtggtgacctaccagctgctgggtgcccagagtggcctctttgacatcaacagcagcaccggtgtggtgaccgtgaggtcaggtgtcatcattgaccgggaggcattctcgccacccatcctggagctgctgctgctggctaaggacatcgggctgctcaacagcacggcccacctgctcatcaccatcctggatgacaatgacaaccggcccacctttagccctgccaccctcactgtccatctgctagagaactgcccgcctggattctcagtccttcaagtcacagccacagatgaggacagtggcctcaatggggagctggtctaccgaatagaagctggggctcaggaccgcttcctcattcatctggtcaccggggtcatccgtgttggtaatgccaccatcgacagagaggagcaggagtcctacaggctaacggtggtggccaccgaccggggcaccgttcctctctcgggcacagccattgtcaccattctgatcgatgacatcaatgactcccgccccgagttcctcaaccccatccagacagtgagcgtgctggagtcggctgagccaggcactgtcattgccaatatcacggccattgaccacgacctcaacccaaagctagagtaccacattgtcggcattgtggccaaggacgacactgatcgcctggtgcccaaccaggaggacgcctttgctgtgaatatcaacacaggatctgtaatggtgaagtcccccatgaatcgggagctggttgccacctatgaggtcactctctcagtgattgacaatgccagcgacctaccagagcgctctgtcagtgtgccaaatgccaagctgactgtcaacgtcctggacgtcaatgacaatacgccccagttcaagccctttgggatcacctactacatggagcggatcctggagggggccacccctgggaccacactcattgctgtggcagccgtggaccctgacaagggccttaatgggctggtcacctacaccctgctggacctggtgcccccagggtatgtccagctggaggactcctcggcagggaaggtcattgccaaccagacagtggactacgaggaggtgcactggctcaactttaccgtgagggcctcagacaacgggtccccgccccgggcagctgagatccctgtctacctggaaatcgtggacatcaatgacaacaaccccatctttgaccagccctcctaccaggaggctgtctttgaggatgtgcctgtgggcacaatcatcctgacagtcactgccactgatgctgactcaggcaactttgcactcattgagtacagccttggagatggagagagcaagtttgccatcaaccccaccacgggtgacatctatgtgctgtcttctctggaccgggagaagaaggaccactatatcctgactgccttggccaaagacaaccctggggatgtagccagcaaccgtcgcgaaaattcagtgcaggtggtgatccaagtgctggatgtcaatgactgccggccacagttctccaagccccagttcagcacaagcgtgtatgagaatgagccggcaggcacctcggtcatcaccatgatggccactgaccaggatgaaggtcccaatggagagttgacctactcacttgagggccctggcgtggaggccttccatgtggacatggactcgggcttggtgaccacacagcggccactgcagtcctacgagaagttcagtctgaccgtggtggccacagatggtggagagcccccactctggggcaccaccatgctcctggtggaggtcatcgacgtcaatgacaaccgccctgtctttgtgcgcccacccaacggcaccatcctccacatcagagaggagatcccgctgcgctccaacgtgtacgaggtctacgccacggacaaggatgagggcctcaacggggcggtgcgctacagcttcctgaagactgcgggcaaccgggactgggagttcttcatcatcgacccaatcagcggcctcatccagactgctcagcgcctggaccgcgagtcgcaggcggtgtacagcctcatcttggtggccagcgacctgggccagccagtgccatacgagactatgcagccgctgcaggtggccctggaggacatcgatgacaacgaaccccttttcgtgaggcctccaaaaggcagcccccagtaccagctgctgacagtgcctgagcactcaccacgcggcaccctcgtgggcaacgtgacaggcgcagtggatgcagatgagggccccaacgcgatcgtgtactacttcatcgcagccggcaacgaagagaagaacttccatctgcagcccgatgggtgtctgctggtgctgcgggacctggaccgggagcgagaagccatcttctccttcatcgtcaaggcctccagcaatcgcagctggacacctccccgtggaccctccccaaccctcgacctggttgctgacctcacactgcaggaggtgcgcgttgtgctagaggacatcaacgaccagccaccacgcttcaccaaggctgagtacactgcaggggtggccaccgacgccaaggtgggctcagagttgatccaggtgctggccctggatgcagacattggcaacaacagccttgtcttctacagcattctggccatccactacttccgggcccttgccaacgactctgaagatgtgggccaggtcttcaccatggggagcatggacggcattctgcgcaccttcgacctcttcatggcctacagccccggctacttcgtggtggacattgtggcccgagacctggcaggccacaacgacacggccatcatcggcatctacatcctgagggacgaccagcgcgtcaagatcgtcattaacgagatccccgaccgtgtgcgcggcttcgaggaggagttcatccacctgctctccaacatcactggggccattgtcaatactgacaatgtgcagttccatgtggacaagaagggccgggtgaactttgcgcagacagaactgcttatccacgtggtgaaccgcgataccaaccgcatcctggacgtggaccgggtgatccagatgatcgatgagaacaaggagcagctacggaatcttttccggaactacaacgtcctggacgtgcagcctgccatctctgtccggctgccggatgacatgtctgccctgcagatggcgatcatcgtcctggctatcctcctgttcctggccgccatgctctttgtcctcatgaactggtactacaggactgtacacaagaggaagctcaaggccattgtggctggctcagctgggaatcgtggcttcatcgacatcatggacatgcctaacaccaacaagtactcctttgatggagccaaccctgtgtggctggatcccttctgtcggaacctggagctggccgcccaggcggagcatgaggatgacctaccggagaacctgagtgagatcgccgacctgtggaacagccccacgcgcacccatggaacttttgggcgtgagccagcagctgtcaagcctgatgatgaccgatacctgcgggctgccatccaggagtatgacaacattgccaagctgggccagatcattcgtgaggggccaatcaagggctcgctgctgaaggtggtcctggaggattacctgcggctcaaaaagctctttgcacagcggatggtgcaaaaagcctcctcctgccactcctccatctctgagctgatacagactgagctggacgaggagccaggagaccacagcccagggcagggtagcctgcgcttccgccacaagccaccagtggagctcaaggggcccgatgggatccatgtggtgcacggcagcacgggcacgctgctggccaccgacctcaacagcctgcccgaggaagaccagaagggcctgggccgctcgctggagacgctgaccgctgccgaggccactgccttcgagcgcaacgcccgcacagaatccgccaaatccacacccctgcacaaacttcgcgacgtgatcatggagacccccctggagatcacagagctgtgactagacagggaagccttgtgggtgtgagcagcacccatccaccgtcccctcccagggagcaagggcagggacagggccggtcgggggggaccctccaaggccaggccttggggacaaccttggcttggccctggcagcccgcatcagctgctcagatcccacttttgccagacgctcattcagcatctgacctctaccttcataagatctgttatttttataagaaaaccaaacaaaaatgttaagcatctaaggacaaggtaaggagggtcactggggcccaagagtctggggaccagcttggctcaggctgagctgaaagaggccaaacaggccctcctccctcccggctccaccccgcaagcaccatcccctccggctaagcaggcgcaagggaggcccagcgcggacatcccctgctggccggacacccgactccagtccaagtctcgctacatttccgccacatccctctctgctggacgtccaggtggaggtggcatccccacgtggacaagaaagtcaatgtcaatgaacaagcattctctccatttcactggcttcccaaatgtgtgcccagcttataaacagaagtgactgatgttccctccggttttg

SEQ ID NO: 355 - protein, 1759 aa, Homo sapiens; identical to SEQ ID NO: 345

SEQ ID NO: 356 - DNA, 21779 bp, Mus musculus
gccaggtctgtctgccagtccagctggcttaacttttaaggagagatagcagcaagccaccagtcaggagtagagtctgactcttctaggatcttccccgtaatgtgcctccaagtcaattgtactaccagagcctccctgaactgtctcatctggccttgaaatccctctgtatcccggacaggctttgaagtctctgttctcctttgcctctgcctctcccccttctttctaagtacctggaaccacaggcctgccgcaccctgactcttgagaaccccacattcaccatttgtacattgctttatatataaccaacttcctcccagttccttacctaatttgtctctgaattctttctgtgacaatgctgggaccctggggacaggggactgagccctcacaccgctgggcagagctgtcacactgctcccgagactgctccactctgcattgtcactgagcaagtgtcctgccagcaccaggcccttctcctgtccaacaattaatgtcctgttggggcccacataaacggctgcaactctgtgtgtgtgtgcgtgtgcatgtgcatgtgtgtgtgcgtgtgtgttttgagtatgtaaccctgccctggaactccttatgtagagcaggctggcctccaactcacagacattctcctgcctctacctcctgaatgctgggactaaaggcctgcgccaccacacctagctctttcttttttcacatttatttctttggggcgacacatacacacacacacacacacacacacacacacacacgcacgcacgcacgcacgcacgcacgcgcgcactcgcgcacctcagcctgtgagtggagctcagaggacaactctccagtgggtgctctctccttccactgtatgggaaaccagaattgaacttaggacctcaggcttagtggctcctttacccaatgaggcacacacacacacacagatacatgcagatacgcacacaggcacacacagacatacacagtcacacacagacacacacttgcagatatacacacagatacatgcagatacatacccagacacacagatacacacaaagacacagacatatacatacagacatagacagacacacacacaatcagattcacacacaggcacccacagacatacacacagagacacacagagacacagacacacatacagacatatgcacacagacacacactacccaccctctttttttttcttctttgagacaggatctcggcaggcaactgtagttagccttgaattcatgctagtcctcctgcctcagcttcaggagtgctgaggtcacaggggacacatgtcctgccatgtcccagtgatatggtcatctgttactttccaccttctgtcattgctagccccatgggccagtactggatgaattcagtctctgtactggctagttttgtgtcaacttgacacagctggagttatcacagagaaaggaatttcagttgaagaaatgcctccatgagatccaactgtaaggcattttctcaattagtgatcaagggggaaagaccccttgtgggtgggaccatctctgggctggtagtcttggttctataagagagcaggctgagcaagccaggtgaagcaagccagtaagtagcacctcttcatggcctctgcatcagctcctgcctccaagttcctgtcctgtgtgagttcctgtcctgacttcctttggtgatgaacagcaatgtagtcaagaaagtgagctcagtagatcatgaacttctaaaattctgaccaccgggacttaggagcaaaaatgacagcattttgctgtggtgtgtattttgatgttggactacacaatttcttaatcaggaatagaatccctgactaaaacagtctctgaatttacaacttagatcaacccctagcaccataactgcccagactagattggaaagatggggctcgggacagtggagttcgtccatctgaggggtgacttcctgcagctggccaggcaagctggagagagctttataaagccaagaaccccagccagaccctggcaaatgtccccgggacaagatgaggcctggcaaaggctgggtgcccctcccacctggttgacccccccccgggggggggggctgctatttgccaccccagaggagagttggtgtcttgcagggagagactgctaatggactataggcctagaggactcccctcagccctcagggcctgtgggcaatccctggggcctccgggcagcttgaggctcctctgccaggctttttgaggcccctccggcctggaagggctgtggaagttggcagggtttctttcctcctcgctaactcagcagctgaggctttttctttttctttctttctttttttttttcttttttctttttttcacccgcctgggccgctgctgaactggataaataagcaggagcgtccaacgtcaacgaaacaggagctcgctccgggctcagccgcacaaaagccgctttgagcagcagcgggcgcctcccgcccgggccgtcggggctccccccagcccagccaggctgcacttggccttcatgctcgcccccccaaaccccaccttttcccagaagcgcccccagccctgctcgggatcccgcctgcccccagcagggtctggttctttgtccgggtgttagaaaacgctcgcccctttaaaagctttgcctggccctctgttgccctagggggatcccggagtcctggctgggggcctccgctttaccagactaatgcgtccttgtcctcgagggccgatgcttctctctctctctctctctctctctctctctctctctctctctatctctctctctctctcttcctcctctcttcctgtccccttgcttcctccccctcctatccccccccgcctttctcttcctctcccccccccccttcctagtttttcttctttttggagctttcagacagagtctcatgaagcctcggctgatctcaaattccctgtgcaacacaggatgacttaaactcgtgatcctcctgcctcagcctcccaagtgctggaattcgttgtgcacccacactgtgcatcttgaacacccttccctttccttctccgtggcttcctcttcggactgaggtcctgcggggcagggagtatcacctctctgcgttctcctcacgatctgggatctggaccgtgatggtgccttaccccttacctcttccgcttcagtcgccacaagtgacgtgaagactgtgaactgcagggggcgcaaaggagtcgttgcctggcactgagcaagtgctcagttaagtctgtatcaagctcttggttataggcttttaattccagcacctgggaggcagaaaaaagcaaggagatctctgagttcagagccagcctggtctatggaactaagaactaggtgcagggcaaccagggctactcagagaaacactgggggggggggggaggagagagaaagagaaaagggggcagagcgggagagagagcagggagaaagaaagaaagaaagaaagaaagaaagaaagaaagaaagaaagaaagaaagaaagaaagaaagaaagaaagaaaggaaggaaggaaggaaggaaggaaaagaaagaaagaaagaaagaaagaaagaaagaaagaaagaaagaaagaaagaaagaaagagagagaaagagagaaaggtcgggtggtggtgactcaggcctttaatcccagcagcacttgggaggcagaagcaggcagatttctgagtttgaggccagcctggtctacaaagtgagttccaggacagccaggactacagagaaaccctgtctcgaaaaaaaaaaaaaaaaaaaaaagaagaagaagagaaaagagagaagaaaatcaagccacttagtagacttagtagcacaagtctttaattttaacaggtggatctctgtgagtttgatgctagccaaggctacacaaggagaccctatctccaaacaaacgaataagtaaaataagtctttttaaaaaatcatatcgttgggtcagcaagatggctcagtaggtaaagtcacttactaccgacctgaccatctggtggaaggagagaactgattcacatacaataggtgactcacatgggtcccaatacacagacagacagacagacagacagactgactgactgactgactgactaattaaatatcaagggctgtagaggtagaaaagtctcataacctaaatccctatggtagacagaaagaactgacccctggaagctggcctctggccttcacacatactctatagtgcctgtttgcgcacgcgcaaaagcacatttcgtacatgtatggaaatgttatatgagaccatcatgtaattatatatcattgatccatgctaataagacataaacagacagagccaagtgtggtgccatacacctttaatgccagtactaagatacagaggcaggcagatctctatgaattcaagaccagcttggtctacatagtgagttccaggtcagccagggttaataagtgagaccctgtgtggtggtttgaatacgtttggcccatagacagtggcactattagggggtgtggctttgttggagtaggcgtgaccttgttggaggaagtatgtcactgtgtaggcgggctttgaagtcccaatgcacaagctccacccagtgtgaaattccagagcctcctctttgagtccccttctgctacctgctgatcaagctgtagaactctgggcccctccagcatgatggctgcctgcacactaccatgcttcccaccatgatgatactggactgaaactgtaagccagccccaattaaatgttgtcctttataagagttgaattggtcatggtgtctcttcacagcaataaagtccaaactaagacaccctgtttcaaaaacaaccaaaacccaaaaccttaaaaaaaaattgccatttaaggtataataccaataatgtccctccatatggtttacgaggagagggaggccagcatggggggagcggagaaggaaagaaaagaaaacgaaaaagaaaaagtaagctgatggcacctctgcatctcccaatcctctggcgtccagtccagaagatgttaatgacaggcttccgccaccatacctggctttggatttggcctctcattaactgtgtaacctaggctgaccttgaactcatgacaattcctctgctcccccaaatgctgggattacaagtatgtgccaccatgactggcttctattttattttgagatggggtcttactgtgtagccctggctcttccggaattcactatgtagaccaggctggtttcaacatacattgatttgccttcttctgcctcagagtgctggcgtgtgcctgcgtgctcagagtgcctagattttaagaaaatgcttctttcagagcatggtggtgcacgcctttaatcccagcactcagggggcagaggcaggtggatctctgagagtttgaagccagactagtctacacagccagttccagaaacagccaggactacacaaggaaacccccatcttgataaactaaagaagaaagagaaggaggagaaggaggaggaggaagaggagaaggaaaaagaaaagaagagaagagaagagaagagaagagaagagaagagaagagaagagaagagaaaagaaaagaaaagaaaagaaaaaagcgaaaagaaaagctttttggggctgaagatggctcagcagctaagagtatgcactgctctctcagagcacccgagtttgcttcccagcacccatgtcaaacacctcacagccacctataactccagctcctgggtgtctgacatctttttctggcctctgaggtccccagatctcatgtgcacatacccctccctatacaaatacaaacatataaaaatttaaaaattttaataattaaaaaaaagatgcttttttagggctggcaagatggctcactgggtaaatgtgtgtgccgcccagtttgatgacctgagttctagtcccaaaggtgacatagtggaggagagagccaaccccgaggttgtcctttaacctttacatgtgcattgtagcctacacactgtagcaggtatatggcccctcccccgaataaatacatataacagattttaaaatacttttagcatttcttttagacaagtttattgtgtagactgggcttacctctgctggaatcaaaggtgcatgctacaccttttttgcgtatggtgtgtgtgtgtgtgtgtgtgtgtgtgtgtgtgtgtgtgtatgttgcattgcatgtagaggtcagtggacaaccttgggtttgagtcagggctctgttgttgtccgttatctgtaaagcagggtagctggcctgccggcttacaggggctctctcctgtctctacgtcccatttccctgtagaagccttgggattacagctaccatgcctggcttcaaatgggtctggagacttgaactcggctcctcaaactcctcacacttcccgggcaagtgtatcgctccctgcgctgtctcccccagccctctttaagcattggtaatggtccctctctttcacacgttcttttaacacaacggacatttataggcgcctcctccaggccaggagccagaaccttgtagggcatggcacggtgccttcctcctgaagcccccaggctttgtagggaaatcaggctttggagcagttagctgtactctgcagtggggtgcccggtagggcatcctgacaggctaatcagagccgaggtggggcctgggggaaggattccggtttatccaagaatgaggggagcttacaatgcaagagaggcctagggggaaggttggcttggtgagggtgggaactcaggacagaaggctgtcccttcccacaattggcctctagccaaggcccctagaaaggctggcatcttccaaggaggtggagcttcgaggggctcccagtgggggtggggcagtgatggtgacctccttcggtctctgccccttcgcatcgtctccctttcagtgtgtgcctgaggtattgttcctcttttgtaaagagggggatcgggtaacaaagccgggtgggtgggcaggcagcccaaggggcctcttctcttccctccccctgaagcatctgcactgaggggtaggcacacatacacctctggcttcccaggagctggctgttgccatagtgacaggcaggccttgcatcccactggcccctggagttgcccttcccactatggctgccaaagttaggggcccccaactcttttgcatcctggagtgggaggcagggacatacaaaatagaactcctggctagtctctgcctcctagctggctttgaggaaagggacaactttccttaaagagagctccagccactgggacagatgctcaggaagcaaggctaagccttgagatcagaaataagtgctccctcacccgggtgtctggtgtggctgttagtgttctgcaaaaaggaagggaaagatagcagaaggcttataggataggtaaggacactgggggacccaaagcagagcctgcccctgagtctactatgatcgatggaataagagaaaggtcttggggtatttgaaaaaaaaaaaaaaaaaaaaaaccttaaagaatggagaagtgaggacctaggttcataaggtgggggttgggggggggttgaggtagaaccctcagagatcttcttgtctcctctccaggagtgtgatcaacaggtgtgtatcacgccacctggcttcgtttgtgggtgctggggatccgaactcacgacctcatgtttgcccaaaaagcacctatctgcctaagccgtctccccagccccgagtttaggatcgcgaagcaagacccaacctggggactcgcaggggctcagtttggcgtgcagggctggctgcatcttcacaaagcctcttctctccagtcttttcgggggggggggggctgggtgcatgccagtgacacatatgtttttctttgtccctgccgagctgcagctttctgggagccgagagactaggaaatgaccaccccattttctcactgcggccatcagcgctgccctggcttcttcctgaatcccggctctaaatatagcaggagggtattggccaagccgtgtatgtgtgtgtgtgtgtgtgtgtgtgtgtgtgtgtgtgtgtgtgtgtgtgtgtgtgtgtgtgtgtgtgtgtgtgtgtgtgtacgcgtgtgcgcgcatgtaacaggcaacttttagcagggaaacaatgtgcctgccagtcctgacaccgaggaggtgtgtgagcctgagtagtatagctttcccttcagacttgtaccagagactccggctttcctgtagggccacagtagaggctgaaatcatcactgtgaaatacctggctcaggcacttgggaggtggaagtaggagggtgagaagtcctttgatacataaggaatgtgaggccagcttggacaacatgaaatagtctggaaaacaaacaaatggggagtttgagaaatggatcaggaattgagatcactggttgctcctccagaggacctaggttcgattcccagcacccacatggaggttcacaactccagttccaaagccttcttagggcctccaagggtaccaggcacacacgtggtgcacatacagatagacaagcaaagcacattaataagaaaatttaaaaatttaaagcaaagcaaggcaacaacaaaacagacaagtggaggagccggagagatggctcagtataaaggtagtcaccccatcccagtcatgatgacccgagtcagggggcaggtatcccgtgatagaagaagagtactgactccccaagttgtccttgcttgcatgcagtttcgtgcgtgtcacacacacacacacacacacacacacacacatgcacacacacgcacacacagacagacaaacggcaggatgtgtgtgtgtgtgataaatataatgaaaacaaaacaaaatcagcttgggctgggcacgtggcttgtctagcctgggttccatccctagaatgaacagcagaaaaaactcatgtggggggctggcaagatggctcagcgggtaagagcactgactgctcttccaaaggtcctgagttcaaatcccagcaaccacatggtggctcacaaccatccataataagatctgatgccttcttcaggaatgtctgaagacagctacagtgagtgtacttacatataataaattaataaaaaaaaaaccaaaaaaacaaaaaaacaaaaaacaacctcatgtggtggcagcccttatgaggcaggaggatcaggaattcaaggtgagcttgaggccagcctgggttatatgagaccctgtctcaaaaacaacaggatcaacaaaaacacccttaagggaagaagagaggagagggggaacaagcaactccctagcctggagcttggagagcttgggatggtcccctcccacctgggaagaaaagggcgcacttgatgcgagggagtacattgggaggtgcgttcccgcggactgtcgagtctgcaaaggaagggaaagaaatgagcagaagagaagaaaagctgacccacaacgttgcccacacgcctccagcgtggcagagaggcgcggcacctttaaagcgcgacgggggcgtgccctgagggactgccccgcccctgggcgtgtcctcctactgaccacgccctcggggtgccgagccgcggcggctggcggcggagaccacgccggctctggctggagtggcggcggcatcggcggcggcggcgacggcggtggtagcggttgttcctccgaaggcgccacgcgctccgggacacacgtgggcggccgagagatggcgcgggagccgcgacgtggcgcgcagatcccgggacgcgggatggagcggtgcgagtgagcccgagcggccgcgccgcggggcgatggccgtgccaccgctgctccgcggggcgctgctgctgtggcagctgctggcgacgggcggcgcggcgctggagatcggccgcttcgatccggagcgtggccgtggccccgcaccgtgccaagcgatggagatccccatgtgccggggcattggctacaacctgacccgcatgcccaacctactgggccacacgtcgcagggcgaggcggcggcgcagctggccgagttctcgcccctcgtgcagtacggctgccacagccacctgcgcttcttcctctgctcgctctacgccccaatgtgcaccgaccaggtctccactcccatcccagcctgccggcccatgtgcgagcaggctcgcctgcgctgcgcccccatcatggagcaattcaatttcggctggcccgactcactcgactgtgcccggctccccacgcgcaacgacccgcacgcactctgtatggaggcacccgagaacgctacagcaggccccacagaaccccacaagggcctgggcatgctccctgtggcacctcggcccgcgaggccaccgggagattcagccccaggtcccggcagcggtggcacctgcgacaaccccgagaagttccagtacgtggagaagagtcgctcgtgcgctccgcgctgcgggccaggcgtcgaggtgttctggtctcggcgcgataaggacttcgcgctggtttggatggctgtgtggtccgcgttgtgtttcttctccacggccttcaccgtgttcaccttcctgctggagcctcaccggttccagtacccagagcgcccgattatcttcctttctatgtgctacaatgtctactccttggccttcctgatcagagcggtggcaggtgcacagagtgtggcatgcgaccaggaggcaggggctctgtatgtgatccaggagggtctggaaaacacaggctgcaccctggtcttcctgttgctctattatttcgggatggccagctcactttggtgggtggttttgactctaacctggttcctggctgcaggcaaaaaatggggccacgaggccatcgaggctcacggcagctacttccacatggcagcgtggggcctgccagcactcaaaactatcgtggtcctgactctgcgcaaggtggctggcgatgaactgactgggctctgctatgtagccagcatggacccggcagccctcactggctttgtgttggtacccctatcttgctacctggtactgggtaccagtttcctcctgaccggttttgtggctctcttccatatccgcaaaatcatgaagacgggaggcaccaatacggagaagctggagaagctgatggtcaaaatcggagtcttttccatcctttacacagtgccggccacctgcgtcattgtctgctacgtttatgaacgcctcaacatggacttctggcggcttcgggccacagagcaaccatgtactgctgccaccgtgcctggaggccggagagactgctcgctgccagggggctcggtgcccactgtggctgtcttcatgctcaaaatcttcatgtccttggtggtgggcatcaccagtggagtctgggtatggagttccaagacttttcagacttggcagagcctgtgctaccgaaaaatggcagctggccgagcccgggccaaggcctgccgaaccccagggggctatggccggggtacccactgccactacaaagcccccacggtggtcttgcacatgactaagacagacccctctctggagaaccccacacacctctagaacataggctaggctgtgagttatggttgctccctccttgccctcccctccccccttcagagacagctgactaacagctgcccagctgtcaaggtcagacaagtgagacacagggggctgaggactagggtggggacccagtaaagctcagggccttgaccttctgtctcatgcagggagtggtcctagtccacagagggtcccaggataagaaggggcagaagggggcagggtccagtgcagagttatttaatgatgtaatttattgtggcatttctctggaagctgtgactggaataaaccctcgtgtggcactgctgtgttctatctgggctggaaagagggaagacaagacaggagggtgagaaacttcataagcagagctgggggtggggggcggaggccatgagattcatcctctgaccccttgtccaggaggaagttcctctgtgggggcatcggtggattataggagtcctagactgctgtgggtgtgtgcgtgtgcgtggtgtgtgtttctcttctcacctgtctcaagtctgagatctgtgcttctgaagtgcaacaagaacctcctcatgaatacccaggaacccctggctgtgacatggctccttctagtcctaacagtgtcatctagcctgtttagagaaacaggtaagctcccccgcccctacccacccatactttgctttagcaaataaggtccgggctggcaagagagctcagtggagacaggtgcttgccgctaaaactgaggacttgctttcaatcgcaggaactcacatagggctggggaccaactcacagactgtttttacccctacctgtgccctgtggcacaactcctactatacaaatacatacatgtagtaagatgctttttataaagaaagagagggagggaggggaggagggagactgtttctaaggcatcctttcacccaagtctggaggatggtcctcattatctatgaaggttgctgagagctgggatccaagctcagttggcagtgtccttgcctaacgtgcatgaagccctgggttctgtctccagcacggcttaaaagaggcatagtggagcatgtttgtaattcaaatatttgggagatagaagtaggaagatcaggaatttaacataggtatcccctggctacctgaaactctttggataaaaataaaaataaaaaaagagagtgggcaggccaaatggctcagcaggtaaagttgtttactatggagtctaatctgagttcagtcctttgaacccactaggtacgagaaccaacacccacaaatccctgacccccactaaattgatgtaaaaatattttttaaagacttgctcagcaagttagaagccttgtcttcaaaaaacaaaaacagcattaacatcaacaataaaacccttcactaacaacaaaacagaatattcggtagttggagcctcaagctctctctttgtattttgggatggagggggaaagatgggcaggtctatctatgtcttggtaccagtctgggaggtagggagctgttgaattcattgactattgtgtcccttctcacccaccccaaacatcagaacttggggcactgacagcagcttcgagaataaggcaggaccacagggatgtgcacagctgtgctgggacagttgacagtgtgtgggaagctggggaaacactatgtgtacctgtgtgctagggaagcacaggttactgggacatgtcccatccctgtccccgtgagggacgtgtggtcatcccggaggtctgtatcagctgaaattgtatctagactgttgatgccaatcaggccgaagttgcctgtgtgtgcgtgtgtgtatgattgcgtgaatatatgcatacatgggccagggagaacggcaggtgtcctcatcggctcactcatccacacccagccttttctggggatgctggggtttcatctcaggtccttccgttttcacagcatgtgctcctgcccactgtcctagccacaggcaaagattgtggtcagtggccctggatgtattctacacataaccagcatttatgagtgaagtccctcaaagttatttttttttatattttgagacagggtctctctatatagccctggctgtcctggaactcaatagcctcagactcagagaatatttgcatctgagtactgtgattaaaggcactcaccacgtttggctaagaaagtttttcaaaaactgttttatgaaacctcagccttcatttcttgttttttgttatcctgttgaaatcagaggtaggaaatgcaggtagttatctctgggaataacgtgtgtatgtaactgaactatgatatggactagatagatacttggtgcacagaacactgcttttgctttgctggggctggaacccagggccagaagtgtgatagcgacaggcggtctaccactgagccacaccttggactttcctaagaagttctttataaagacaacaccctcattctctgctttgtatggagcattcattcatcctatatctgacccacaaagccagcaaccttgagtctcatacaaggattctcttgcatgagaaagcttttatggcccacactgagtgagaaggtagtgggtacacacgacttgctcaagggcctgtagtacgactttggcagccagataaagggaaaggcagggagggggctgtgctgagatgtgcatttatttaatggcaaccagtacaccttctcttttcccttgccagtcaggaggtaaggaagggatcagtacttggctgtctgtgcaatagaagcaagactggtgttagcttctagagaaactaggaggaagcagagatgagcagcgaaggacagacgtcaggactcatcagggcataccttaggagggcagacaggccatgctggcaaaggctccaggtgcctaggtcctgctctgttttatagcagggatgcatttggaacaagctatggcctctcatggggtaggtagggtgtatgctctaggcaggtgttataaaattcaccgtattattcatgcttgaaatacccggctctcagggctttactgcccagcactgccccaagagaaaaaaggaaacatcaaagctgtctcttctttataaacacaagtacataatgtttatttgaaattccaatttattacaagtctaccctttaccgtggcccttcctcctttaagacaacttaaaaatccaccatgcagacagatgtcactgcagtgggaacaccagctttctgctacaacaccaacatctagggtaggaagcagggaggcagcagtgccagggatcacagcgtgagtgttagcgctaacctcaaccaagcctgcaggagggaacggaaaggaagccttcctcagccactggacacccagagccacagcaaggctatccctcagccctgggaatggtgagcttccggacctggtggacttcttttcctttaaacaagaagagctgagggactcacatttttcaaattcaaaatcgatggaaaagaaaattaaaccctgtcttgtacttttatcaaaatctgtcataaaagggaacgcagactacaaacttttgcctaaatacaacacgaggctagactggctacagagggcagagctggccctccccaccccctccagatgctgacactccgctagaagccctcggaaggagctctaggtctgcagagtgggccctggaggaacaggcacccacaggtaggtagagtgccgccagggcagagatggtgccaacccgagatcctgctgcccgctggcctctttgagggtagtaaagcgaacacatatcatagaaactgtactgtacatgtgccaaagcaagatgacaagtattttacaagatgttctttatacaatatcactgcggaaacaagcaactttaataactacaaaagtcaatttaaaaaattaaacattttaacttcttcctgctctttttctggctccctaagggcttgtctggtttgtgggtgggctgggctccaacacccctctggccagagccattaaagcctaggtcatagcatgattggaagcaggaccccagtctatgggaagtgccttagtttgctttgtcttttatgaggcagtgagctgggtgagggcggggaagggctgcacaatggagagtcctcaggaacagctccagaaaatgtccctctactctgccacgatcaactcagagcccacactgtcccaagatgctggtgaacacggaattctgtatggcactcgctgatactgtcacctgagagggaggaggaggaagagacagtgcggacgtaaagaaataggactgtgtataaatataaattcaaaagatccacacctcacccagcgtggccagatgacgctccttcctactgtggggtacagcaccctctttgaggccagggggcttggcactgctgtaatgaggcaggaggaggagggagaggaggagagcagggcagagctcacagaatccatgcctaggcttctccaactctcagggggagacctacttctgctgcgagcttttctgggcagggctcatcaggctagcatgatgctccccaagagcttgcctttgctggaaaaaggccccatggggaactgcaggagaagcccaagcttggcatgacaggcatttctggatgctccagttacttctcctttaaatcctcccagctttcctgcctcccccacaccccttgagggcttctcctgtccccctcctcagctccctcactagggccctgcctctttacttcttctgtctccgtcccctggactgtccaacagactctgagtcactgtccccttcatcatcagcgagcctatcaggaaacttcctgcgtttcctgcgcacgtaggggtggccggggaggtgtttttgcagcagagccagcagacactgctctgtcttctccatgcaactcagcacgtggctgccgcggcagttatagagctcggcattggcaaacacttgcttcatgtcagtgaggaactcctgcacagatcggtagttcccgcatgagcatttgttctgtatggtctggaagtccatggggtgctcgatcacatcatagtagtcctcagcctcgtctctggtcacaggctccctgtaggaaaacaccaactgagaaacacacccaggccagagcagcactagcccaggatgcatgcagccatgggtcaacatgagccaggagacaagatgctccctccctttctaggggctgtgactccccatcctcttgccaggacctgtctccaaaagaaggggccagagtagccaagaggcagggcactcaccggaagggccagctgaagcggtacttcaccagtttgtgaaggatatcctcacacttttgtagctccagactctgccttctcgagatacgcttggtctgaagtacctagcaccagaggaagcagagcgccagtcattataggacttaaaaagtagaagactaggtagacggtggtggtgcacgcctttaatcccagcacttgggaggcagaggcaggcagatttctgagttccaggccagcctggtctacagagtgagttccaggacagccagggctacacagagaaaccctgtcacaaaaacaacaacaaaaaaaaaaaaaagtagaagactagacagaacacacacagatgcacacatacacaataaaaaaagtaataataataaaaactaaaaaaaattccctatctattaaaacacaaaggaagacagttcatcacttccttgggcatcatggtagggtgatgctcaaggcaggtggttctctctagtcagaatggttaaagcagcagaggggacgcagcaggtgctcatcaacagagagtggtgccaggagatggctagccctgtgagatggatccaggactatggacataaacaagcaatggcagaaagcagctgcagaccccagcaaccagccttgtggaacacatatgcatgtttaggaagaaaagtaagagtgtagcaccagtccttgctggctgcaggaggaggtggttacagagatgggggttgggcacccttacaggcagccacaatcgggtggaaccccagcagtaggaaccccacacaaggcactggcaactttaaagactggtctctccccagtggcttctttcatgtctccaagcccaaactagactgtaaagataagccagctcctgagagcttccttctgttcaagctcaagccagacccaaactactgaagtgatgccgcgatcaacagaggagcaaggcagtgtcctaacaactgtggctaaagcagcagttagtggctctggcattgctggcattcccacagggaggcccacccctctgggcccaccagagacacatggatactattttaaagtctctactgagctgcaggctgctgctaactaggggagactgtctgcaggctaggcaggatgccgggcatagctgctcctagagggcctgctgcctagtctgcccagagcctatccatctgctgcctcagcccccaacccaaggggagggggaagggaggggagtctcccacctgttgccttgtgaattccccattgtggactagaacataaagaatacaaagactctaaatacctaataaaaaaatggaaaaaaaaaaaaagaatacaaagactagaggaggctaagtaactcttaccagatcatcgacctctgggtcatcctttggccgtgaccttctggcaggatgtgacttcttacccggcggtcggcctggtcttgctgcagggatgacactctgcttgcctcgaatggtcttccgaggtctcactaaaatgaaacgtgggctcagagcacagcaaaggggtgggtgaggcatggtgtgtgtatgacaggggaggggcgagaacaccagagcaagcgggcagtgactctctgaggctgcaggaggccaggttccagcacttctagcgtgtccccatttggttcagctatattcaggacaaggtctttgcaggagtcaactgtcaagtaactgaggaggaaacaagtttgccaacagggcaggatggctctcctacagccgagacttagcccaagagaatgcacacactttcatgtacaagggaatctgacattgcctcgtcatttccagttaccctattccttttacccagtgtttccaggggaaagctcactcacacaatgggccacaacattctgccaatccaagtcaggacccactttctcatgtttctgaaaaccaagatggtaggtgaggactcttccctaagagccctgcctggaatctctgaagagaataaacttgaaggcacgtagactactcatgtcactggttggcgacaggtgcttaggacaggcaaaccaacattccttgggatgcccttgggaacattctctgcaaggattagctcaaagctgcttctccactactccattttccgaggcctttcctcactaataccctgagtggggggagataacatttgggcagagaatgtgttcagagaagcagccttgtggagaaccaatgaaccatgcttcccattctatttctggaccatgctaacccttcagtggctattttaaggcttccagctccagacaagtttcatgaggaagagctgaggctcaggtcctaggcctgaaattgcacaagggaaccaacattgatggcctgaaaagctgaaggcaccaagggctctggagtaccaaatatttcctagattcttgggtgataaccctaggagaacagctgcctctgtggagaagaggtgggaagcagtcactagcaagaaaataaacacaatcagcacactgctgcatccagctctcacagatagtgtgcgtccacactacagatcattatgaggaggctcttcatggcaatggctgaccctgaactgctgaagttgtaagtgtgaactaacagtctagtgtggtggcatgtgtctgcaatcccaccaatggagggaggtgttccaggacagcttggaaatctacctttaatcagagcatttagaaggcctagacaggcagctatctataaaatttgaggccagcccaaactacactgcaagttccaggaaagccatggatacatggtgagttccattctcaaaacagagcctgagatgggaaagatgatcattcaattgctgtgcaatatgagggaggaaagtaaattaggacaggcacggaagccagaacacatgggatacaccaccatagtaggaaatggccacactaaacacccgctttcttatcacagcatggataatgcttcagagctgcgaggcctgtgttctgttttctactggcctatgaagaggataccactgaaaggatggctggagccactggcttcatcaaggacaacatgggcattctcagcacccctaggactgaaccacaggaaaaccagccttccttttccaaacatcgaaagctggagatgtgcatactttgggagcattaatcagcatgtgatgagacaatcagaaataactgaaaccaccctgcaccataggccaaagacctctctggccactgtcactatgcatagatggggccagaccagaaatcttgtcataaacatgcttgaatcccaactaaatcttagagcaagtgctctgctgtgggctgatgctctgggaaccactctaccttctccctgacagcttaaaaatagattttatttttaaccatgtttctgtgaggaccagtgtatacgtgtacatatgtgcacatgaatgaaggaaggttccagataagagtctaggtaagggtcctaaatcccttaatttggagttgcaggcagttgtgagctgcctaacatggacactggaaagtgaacattgatgatatggtagagcagtatagattcttaagtggcgatccacctctccaccctgaccatcttgaaagccaatagaaacacacggcagctcatttacccacagccccaagagagaagagtaagacagcaaaatggcaaggctgaatttctcttgccagccaggcctctctggtcagtttgagagaccgaggcaactatgccatactagacactcacgccgcaagccagccacttcataatcctcttcttcttcctcctcctcctcttcttcctcttcctcttcaccgctctcatcaccctcgctgccctcagaggtagactcttcagtgtaattcctggaaggaaaagccaagcagagacatggtttcagttcagtccaggacggcttacggagagctaaagccccttacatctctgcagcatggctattcatggaccagactgagctgacagtaaggggagagacctggaggtcagtcctactatgcttcagcagcatgtgccctgccctagcctacaagggcttaagggacatcaatggaggaaggggaccaagaacaaaatacaacctctacttcctctcacaaacagtataaaccaccattacttttgtctcacaaaagccagataaggaaacattttagacaccacagctgcccgactctggggtgtattgagagggctgagaggctggcaggtgttactgcacaccttgatggctctcttccaggagctgagacagcttgcagatgaccacacaacaaagcaactaatcccggctcagaacagctggtctaaaaaaacactacttcagagcagcacaccgcatgtccctacaagaggacatggtaatggagacagagggagaactaacccagcacggctgctaaggtgtggttggaatcaaacagctctgccctttacaagagacagcctcgtgcccgtaaggatgccctttcacatctcaaatgtcaatgtaagaagtaacgacagttaactggggaaatattaggtgccttcaaggtgctggtttggctgtactgacataggagaaaccatgtccaaatagacagcagggaaggaaactaagcatgggtcgagaaggcaatga

SEQ ID NO: 357 - DNA, 1779 bp, Mus musculus
atggccgtgccaccgctgctccgcggggcgctgctgctgtggcagctgctggcgacgggcggcgcggcgctggagatcggccgcttcgatccggagcgtggccgtggccccgcaccgtgccaagcgatggagatccccatgtgccggggcattggctacaacctgacccgcatgcccaacctactgggccacacgtcgcagggcgaggcggcggcgcagctggccgagttctcgcccctcgtgcagtacggctgccacagccacctgcgcttcttcctctgctcgctctacgccccaatgtgcaccgaccaggtctccactcccatcccagcctgccggcccatgtgcgagcaggctcgcctgcgctgcgcccccatcatggagcaattcaatttcggctggcccgactcactcgactgtgcccggctccccacgcgcaacgacccgcacgcactctgtatggaggcacccgagaacgctacagcaggccccacagaaccccacaagggcctgggcatgctccctgtggcacctcggcccgcgaggccaccgggagattcagccccaggtcccggcagcggtggcacctgcgacaaccccgagaagttccagtacgtggagaagagtcgctcgtgcgctccgcgctgcgggccaggcgtcgaggtgttctggtctcggcgcgataaggacttcgcgctggtttggatggctgtgtggtccgcgttgtgtttcttctccacggccttcaccgtgttcaccttcctgctggagcctcaccggttccagtacccagagcgcccgattatcttcctttctatgtgctacaatgtctactccttggccttcctgatcagagcggtggcaggtgcacagagtgtggcatgcgaccaggaggcaggggctctgtatgtgatccaggagggtctggaaaacacaggctgcaccctggtcttcctgttgctctattatttcgggatggccagctcactttggtgggtggttttgactctaacctggttcctggctgcaggcaaaaaatggggccacgaggccatcgaggctcacggcagctacttccacatggcagcgtggggcctgccagcactcaaaactatcgtggtcctgactctgcgcaaggtggctggcgatgaactgactgggctctgctatgtagccagcatggacccggcagccctcactggctttgtgttggtacccctatcttgctacctggtactgggtaccagtttcctcctgaccggttttgtggctctcttccatatccgcaaaatcatgaagacgggaggcaccaatacggagaagctggagaagctgatggtcaaaatcggagtcttttccatcctttacacagtgccggccacctgcgtcattgtctgctacgtttatgaacgcctcaacatggacttctggcggcttcgggccacagagcaaccatgtactgctgccaccgtgcctggaggccggagagactgctcgctgccagggggctcggtgcccactgtggctgtcttcatgctcaaaatcttcatgtccttggtggtgggcatcaccagtggagtctgggtatggagttccaagacttttcagacttggcagagcctgtgctaccgaaaaatggcagctggccgagcccgggccaaggcctgccgaaccccagggggctatggccggggtacccactgccactacaaagcccccacggtggtcttgcacatgactaagacagacccctctctggagaaccccacacacctctag

SEQ ID NO: 358 - protein, 590 aa, Mus musculus
MAVPPLLRGALLLWQLLATGGAALEIGRFDPERGRGPAPCQAMEIPMCRGIGYNLTRMPNLLGHTSQGEAAAQLAEFSPLVQYGCHSHLRFFLCSLYAPMCTDQVSTPIPACRPMCEQARLRCAPIMEQFNFGWPDSLDCARLPTRNDPHALCMEAPENATAGPTEPHKGLGMLPVAPRPARPPGDSAPGPGSGGTCDNPEKFQYVEKSRSCAPRCGPGVEVFWSRRDKDFALVWMAVWSALCFFSTAFTVFTFLLEPHRFQYPERPIIFLSMCYNVYSLAFLIRAVAGAQSVACDQEAGALYVIQEGLENTGCTLVFLLLYYFGMASSLWWVVLTLTWFLAAGKKWGHEAIEAHGSYFHMAAWGLPALKTIVVLTLRKVAGDELTGLCYVASMDPAALTGFVLVPLSCYLVLGTSFLLTGFVFHIRKIMKTGGTNTEKLEKLMVKIGVFSILYTVPATCVIVCYVYERLNMDFWRLRATEQPCTAATVPGGRRDCSLPGGSVPTVAVFMLKIFMSLVVGITSGVWVWSSKTFQTWQSLCYRKMAAGRARAKACRTPGGYGRGTHCHYKAPTVVLHMTKTDPSLENPTHL

SEQ ID NO: 359 - DNA, 22405 bp, Homo sapiens
tgcggaggctgaaggtcacagccccacctgccccgccgtgctgggctttgcccctcatacctggagaggcgggtgggccgggagccagggtcctgcgttggctgcagtggcccgcctgcggctgggccagccaagcagggtcaagaaagtccccagaacaccttggggaccatctctcccagagcctcccccaggcaggggccgggcacagtgcagcttgctggcctcaggggctggcccaggagtcaggtgacattccctggggacccccctgggaccagcacagcctccgagaaggtgggctcccggcccggcccggggctggggcagggctctgcgcctgcgccgtctgaggcccaggctgcagggagctgggaccccgggtccttccaggttccctggcccctctgtgggccggacaggccggcgggaaggagggtgggggtgggggacgctggggcctctttcctggtcgcccggcggcagctgaggttattttttccccctcgccgctgcagaatttccctccgagttggataaataagcagcagagtccaacgtcaacgaaacaggagctcgctgggccgcacaaaagcggctttcagcagcggcggcgcctccgggcctgtcccgtggccggggctccccgagcagcgcagagagcgggactgcccttggccgacgctgcgatcacggcctcagaggcctccagggctccggcgcttgtccacttctctttttcatttttatttttaatttaaatttttttttaagagatgaggtctcgctctgtctcccaggctggagtgcagtggtacaatcacagctcactgcagcctctacctcccggttcaagcgatcctcccgcctcagcctcccgagtagctgggactacagctgtgagccactgggcttgtgtcctcttctgtcctctcttctggtccccacctgctccctgcagaacccatgcttgccatttgcccccacagcactctgtgcagcccctattaaggactccctcccttaaaacctgtggctccgccaggcgtggtggctcatgcctgaaatcccagcactttgggagacagaggccggcggatcacgaggtcaggagttcgagaccagcctgaccaacatggtgaaactccatctctactaaaaatacaaaaattagccgggcatggtggcgcaatcccagctactccggagtctgaggcaggagaatcacttgaacccaggaggcagaggttgcagtgagctaagatcgtgccattgcagtgagccgagatcgcgctattgcactccagcctgggcaacagagcgagactccgtctaaaaaaccaaaaacaaaacaaaataaaacaaacaagaaaaaccttctaaggctcctcattgcccgagggaagatcctggctttccagacccgcagcatgaagtgggctacttcctgtttctcgccagtgcttttgcagaggctggtccctctgtcaacaacacccttccctctcttctacctggctcccactgggttttgagattcagctcctgcattgtttttgctgactccagcccccacagcttctctctctaatcatgggcatcagctgacaccagagtggtcactgctctgtctgtcactccagctgatcttgagccaccctagggcaggagctgaatctttttttgtttttgagagagatggggtcttgctccatgcccaggctggagtgcagtggcgcgatcatagttcacagtagcctcaacctcctgggcccaagccatcctaccgcctcagcctcccgagtagctgggactccaggcatgtgccaccatgccctgctaatttaaaaaatatatatagagagatagggtctcactatgttgcccaggctagtctcaaactcctggcctcaagtgatcctcccaccttggcctcccaaagcactgggattcaggcatgagccactatgcccggtcccaaatttggctcatcttgtgtcccccgaacccagtctagtctgtgctgtgtgctgcagaggcacaaaagggccattgcctggcatggagtaagtgctcacttaatgtcccctattaaaaagtgacataaaatcaggcagaggttatagtgagccgagatcgcgctactgcactccatcctgggtgacagagcaagactctgtctcaaaaaaaaaaacagtgacataaaatcataacattatattctatataacaaatgcaaactaatctgtcatgacaaaatgtagtgcagtgattggctgcctgactatagatgcaaggaagggagggagggcacaagaaaacttttggggtgataaatatactcgctgtctttttttttttttttttgaggcagagtctcactccgtcgcccagactggagtgtagtggtgcgaccttggctcactgcaacctccgcctcctggcttcaagcaattctcccgcctcagcctctggagtagctgggactacaggcacgtgccaccatgcccagtcattgtcttaaaaaaaaaaatcctggcattatcacttgcccaagttgcttcaattctctctaaatatcaatgtcctcatctaaaaatgagaataaaaaataaccaccagccaggtgcagtgacttatgtccgtaatcccaacactttgggaggccgaggtgggtggatcacttgaggtcaggagaggccaacatggagagaccagcctggccaacatggtgaaactccgtctctactaaaaatacaaaaaatttagctgggcgtagtggcgcattcctgtaatcccagctactcaggaagctgaggcaggagaatcacttgaacctgggagacagaggttgcagtgaactaagatcacgccactgcactccagcctgggtgacaaagcgagactctgtctcaacaaaaataaataaataatcacctcataaggtattgtcaggattaaatgacatacaaattaatatttaataaatggtagttatgattaagctcctttcacactatactgtagtatgtactagttattaatttttttttggacagggtctctgtgcccaggctggagtgcagtggtgattgcaaccatagttcactgcagcctcgacctcctgggcccaagtgatcctcctgcctcagcctcccaagtagctgggactacaggtgtgtgctaccatactcggttaattttttcctttttttgtagacatggggtctcactttgctgcccaggctggagtgcagtggcaagatcacagcttactgcagcctcgacctcccagctcaaccaatcctcctgcctcagactcccgagtagttagggccacagttgcacaccattacacctgcctagtttttaaatttttggtagagatggggtctcgctatgttgcccagtctactctcaaacccccaggctcaaacgatcttcccacatcggcctcccaaagtgctgggattacaggcgtgaaccaccaagactggccagttattaacattttaatgtgctactttccagtaagatatttgcattttaactggaatatgttcattatgtggaccaatcctgatgaagactgcatacatataatccataggtcaaaaatcatcaaattgggacaggtgcaatggctcacacctgtaatcccagcactctgggaggccgtggagggtggatcacctgaagtcaggagttcgagaacagtccgatcaacatggtgaaaccccgtctctattaaaaatacaaaaactagccaggtgtggtggcgcacgcctgtcatcccagctactctggaggctgaggcaggagaatcgcttgaacccaggaggcggaggttgcagtgagccgagatcatgccactgcactccagcctaggcaacagagtgagacttggtctcgaaaaaaaaaaaaaagaaaaaatggaacagacagtctagtatagcccttgatagctcataaagggaaactcagttagaaccagggctcaagctacagaagggaaaatattccctgagccacacccggggtctttccagccccgcccctgtgcacagcctgtgtacctgggcacaggtgcacacacaggagtaaacaggcacctgcatggaccctgtgtgtacacctaacctacacacacagagacacacacacacacacagacgcacacacacacagacacacacacagacagatgcgcacacacagacacacacacagacacagacacatagagacacacacacagagacacacatacagagccacacagacacacacagagacacacacagacacacacacagagacacacacagaaccacacacacaaagacacgcacacacacacagagacacacacatacacacagagacacacacacagacacacagatgcacacacagacacagacacacacagatacacacacatacacacatagagacacacaaagacatacacacacacacagagatacacacagacacacacacagacacacacacagaacacccccacacacagacacacacacacagagacacacatacagagacacacagacacacacacacagagacagacacacacactcagagacacacatacacacacagagacacacacacacacacagagacacacacagagacacagacacacacagagacacacacacagagacacacacagagacacacacacacagacagacacacagccccccacccaacacacacacactaactggcacctgcctccgcaggaacacactggtgctcctgcccatcctgccccagggagcaggtgtgtcgggtggacctgctgggtaccccgagaccacagacagcctctcctgtagggcagcccaggcacctgaaggaggcgcaggatattcccctttctggtccctgcttactcacaccgccacctctctcccccagaatccaatcaataccccttccccagccttaggccccacaagagttcagccattccagaaggatctctgctcctcttctcattctgacattctttagacacaacagatatttatgggggcccactccagggcaggctcccagacgctgcagagcacagccagggccctgacctccccaggctcatggggatgaaggcacaggtgcagcatggtggctgcaaggcacagaggtgggcacgagggtccgcagggcgctgagtgggggtcatcctggaggaggcaggaaaggaaggggagggtgtaccctctaggggttgacatgtgttcggggaggggagggttggggatgcagggacacaggtcaggagggcgtcccttcccacatatgcaggacaactactggccccagccaggggtcccaggagggacggcttctccccagggggaggaggagttaggggggcccctcggcccagggaggggtgccggagatgggcattgatagtgacctccctcctcccggcccctccggtcctccggtcctccgcatagtctccctttcagtgagctccaggagcattgttccacctttgtaaagagggagatcgggtgacaaagccgggtgggtgggcaggaggccagaggcctcttctctcccaggccgcatctgcgtgggggcggagctcatccactcccctcctctggcttcccaggcgcggccgttgccatggtgacaggcctggcatcccacggcccctggggcgccctgcccaccgaagctgccagaggaagggccccccgacgcttctccaccctggcaagatgggggcgggggcccacaaaacctggctcttaggctagccccagcactgggaggtttctagcagcctgaacctcccaagtctgtgggaggggagccccacctcctggcaccctgacagctgggggctcaggagttggggccacacatcactatcatctgtgcacctaggcctccttggggccagatacagagaaataatatggttgtttttttgtgggtttttttgtggagagagggggtcttgctgtgttgcccaggctggtcttgaactctgggctcaagcaatcctcccaccttggcctcccaaagtactaggattgcaggtgtgagtcattgcacccggccaatatgttatttcttgatgttattccatggcccttgaacagtggctggcatggggccgagggagggcacggatgcagaggccacagtgtgctggacagatgggctggcctggaccctggatccacagagcagagcctccagccccagcccagctctgctgggctggccctgggaggtgatgcttcaatctggggtgccagatggaacagaagaggaggaagaccttcagagctggggaaacaagcctggcaaaggcctggaagcatggctttgcagggtgtttctggggaggagtaagagtggggtgtcgggtgtgacaggaaatgaagaggtgaggcggggtctctgcttggaggaacttccactgccatccctgagagcatgcactttattctgggcagctgctgctgaagttttgggaccctccattatcaatgcccaggtgatcaaagctgggtcccttcccttccctgcagtgccctgccctgccctgccctcccttcccccccgctcccctccccctccccctccctccctctaacccctccccctccctccccttcccctcctccccctccatccccttcccctcctccccctccctccccttcccctcctcccccctccccctccccctgcctcccctccccctctccctgtctttctttttattttttttctagagatagggtctcactctgttgcccaggctggagtgcagtggtgtgatcatggctcactgcagcctcccaggctcaagggattctccagcctcagcctcttgagtagctgagactacaggcgcataccaccatccctgacttttttgtttatttttgttttagagatggtggggtcttgctattttgcccaggctggtctcgaactcctgggctcaagtgattctcccaccttggcctcccaaagtgctaggattacaggcttgagccacggtgcctcacctgggtcccccagggtcacaggtaccatactcctgccttacctctttgggaacttcaggacgtctcatggcccacatgtggctgagtactatcctgtgctggacacagggctggctgcgtctccttggtgccccatctcccgatcctcttgaggagcgaggggctgagtgtatgcacgagatggcatgtcccctgcctggtcccctccctgctccagcacagctctaagggtagcagagtactaattacagggatgtgtgggaaatgatggccccattttctcaccattgccaccaccactgctgactccttcccaagtccctaccacaggccaggctctagtgcaggcaggtgtggctgagctgggccggctgggctggtgtcctgcctctggtggtgttaacaggcagcctcttgcaatggaggagcctggatgccaatcttgacccttacgagctgcgtaatcctgggcaaatatttgagtttgctaagcctcaatttctcatctgtatatgggtacgggattccttgtagcactgtgatgagggtgaacaaatgatcactgtaaaatccctggcccagagcccaggaggctcacaacaggtcctcggtcagtttctgtgcctccctgaagttctaggttactcactcattcattcactcaccatccctgggctcagccagggtgcctagccctgtactaagtgctcgtatgaaacagtgctaaatgctcacgtgcaacagtactaagtgctcacgtcaaacagtactaagtgctcatgtgaaacagtgctaagtgctcacgtgaaacagtactaagtgctcacatgaaacgatgctaagtgctcacgtgaaatgatgctaagtgctcacgtgaaacagtactaagtgctcacatgaaacgatgctaagtgctcacatgaaacagtactaagtgctcatgtgaaacattctgagtcctccaggtgtttccaggccaagagaataggaacagttgggtgaaagggggatggccttctctaaagagtcccagatcagggccccttgccccttgtgtggcctgccggtggcacttggatttcacccacagagctacccaggaaccatggcagtttctaagcgggtcccaggagtctcaagggggcagcctagagagaggtgagagggtgatggcgacactccccagaggagcacggtggccttgtgaaatgggtatgggttccggaacagacaatcacaaatggaacacttagtagctctatgcccttgggtatgtcattcctctctgagactcagtttccccacctgggaaataaggataacgtagcattcttggattgctgagaagatacaataagggcaagtatgaagtgtgatcgatcagattcaggtgcccaacacgtgttgttgattttctttttttttttttcttttttttttttttcaggccaggcaccgtggctcatgcctgtaatcccaacactttgggaggccgaggtggatggatcacctgaggtcaggagttcgagaccagcctggccaacatggtgaaacccctgtctctactaaaagtacaaaaattacccgggagtgatggtgggcgcctgtaatcccagctacttggaaggttgaggcaggagaattgcttgaacccgggaggcggaggttgcagtgagccaagatcgcaccattgcactcctgggcgatgagatgagcctgggcgacaagagcgaaactccatctcaaaaaaaaaaaagctatttttttttctttattagagacgaggtctcactatgttgcccaggctgatggggcaagatgggggtgggggtgagccactgcgcctggcagaactgttgattttaacagtaggattatctgcctgcattacagaaaagcaagctgaggctcagagaggagccccaagtcacatacactgaggggagaggcagacgctgtatttgagctgccactgggtacaaggcagacttccacacgtgggaagccttagaaatggtctcccctggccgggcacggtggagcacgcctgtaatcccggcactttgggaggcagaagcgggagcatcccttgagcccaggagttcaagaccagcctgggtaacatagtgagaccctgtctctacaaaaacattttaaaattagccgggagtggtggtgcccacctgtaatcccagctactctggtggctgaggcgggaaggtcgcttgagcccgggagatggaggctgcagtgaactatggtcgttccactggactccagcctgggcgacacagagagaccctgtctctaaaaagaaataacaattaaaaataaaaataaaaagtcttccagctgggcgcggtggctcaagcctctaatcccagcactttgggaggccgaggcaggtgaatcacctgaggtcaggagttcgagaccagcctggccaaaatggtgaaaccccgtctttactaaaaatacaaaaaattagaggggcgtggtggcaggagcctgtaatcccagctactcgggaggctgaggcaggataatcgctggaacccgggaggcggaggttgcagtgagccgatatcgcgccactgcactccagcctgggcgacaagagcaaaactccgtctcaaaaaaaaaaaaaaaaaaaaaaaagtctccctcctagagtaaaatgaggcgacccagtctgagagtgtgggtacggggacttcccgcagcctctcccaggcagcaagggaagggaagaaaccgagtgtaagcggagggcaagcgggcggacacccaccaggcccggccccaccccgtgctccgcgtggccgggagacgcggcgcctttaaagcccagtgggaggcgtgtccctgggcgtgtcctcccggagccccgccccgggggctggtagcctcggccccgggaggttgcgccggctctggctcagcggcggctccggtggcagcggcggtggcggctaggcgggctcggcggctcctgtccctcgggcggctgcccgctcgctgcccagggcgcccggacacacgtgggcggctcagcgatggcccgcgccccgcgacgtggcgggcaggcaccggggcgcgggaccgctgagcccgagtgagccggggccgcgctcccgccttcggcccgggcctcccgggatggccgtggcgcctctgcggggggcgctgctgctgtggcagctgctggcggcgggcggcgcggcactggagatcggccgcttcgacccggagcgcgggcgcggggctgcgccgtgccaggcggtggagatccccatgtgccgcggcatcggctacaacctgacccgcatgcccaacctgctgggccacacgtcgcagggcgaggcggctgccgagctagcggagttcgcgccgctggtgcagtacggctgccacagccacctgcgcttcttcctgtgctcgctctacgcgcccatgtgcaccgaccaggtctcgacgcccattcccgcctgccggcccatgtgcgagcaggcgcgcctgcgctgcgcgcccatcatggagcagttcaacttcggctggccggactcgctcgactgcgcccggctgcccacgcgcaacgacccgcacgcgctgtgcatggaggcgcccgagaacgccacggccggccccgcggagccccacaagggcctgggcatgctgcccgtggcgccgcggcccgcgcgccctcccggagacctgggcccgggcgcgggcggcagtggcacctgcgagaaccccgagaagttccagtacgtggagaagagccgctcgtgcgcaccgcgctgcgggcccggcgtcgaggtgttctggtcccggcgcgacaaggacttcgcgctggtctggatggccgtgtggtcggcgctgtgcttcttctccaccgccttcactgtgctcaccttcttgctggagccccaccgcttccagtaccccgagcgccccatcatcttcctctccatgtgctacaacgtctactcgctggccttcctgatccgtgcggtggccggagcgcagagcgtggcctgtgaccaggaggcgggcgcgctctacgtgatccaggagggcctggagaacacgggctgcacgctggtcttcctactgctctactacttcggcatggccagctcgctctggtgggtggtcctgacgctcacctggttcctggctgccgggaagaaatggggccacgaggccatcgaggcccacggcagctatttccacatggctgcctggggcctgcccgcgctcaagaccatcgtcatcctgaccctgcgcaaggtggcgggtgatgagctgactgggctttgctacgtggccagcacggatgcagcagcgctcacgggcttcgtgctggtgcccctctctggctacctggtgctgggcagtagtttcctcctgaccggcttcgtggccctcttccacatccgcaagatcatgaagacgggcggcaccaacacagagaagctggagaagctcatggtcaagatcggggtcttctccatcctctacacggtgcccgccacctgcgtcatcgtttgctatgtctacgaacgcctcaacatggacttctggcgccttcgggccacagagcagccatgcgcagcggccgcggggcccggaggccggagggactgctcgctgccagggggctcggtgcccaccgtggcggtcttcatgctcaaaattttcatgtcactggtggtggggatcaccagcggcgtctgggtgtggagctccaagactttccagacctggcagagcctgtgctaccgcaagatagcagctggccgggcccgggccaaggcctgccgcgcccccgggagctacggacgtggcacgcactgccactataaggctcccaccgtggtcttgcacatgactaagacggacccctctttggagaaccccacacacctctagccacacaggcctggcgcggggtggctgctgccccctccttgccctccacgccctgccccctgcaccccctagagacagctgactagcagctgcccagctgtcaaggtcaggcaagtgagcaccggggactgaggatcagggcgggaccccgtgaggctcattaggggagatgggggtctcccctaatgcgggggctggaccaggctgagtccccacagggtcctagtggaggatgtggaggggcggggcagaggggtccagccggagtttatttaatgatgtaatttattgttgcgttcctctggaagctgtgactggaataaacccccgcgtggcactgctgagtcctctctggctgggaaggggggaaggtaggagggtgagggccctgcaggagtctttcttgtaagcagagctggcagtgggtgctggcaccccccaatcaggaggaagtccccccggaacagctgtgcattgcaggagtcccagacaccatgtgtgcgtgttttcccctcccgcccgtctctgtgcttccaaatggagacagggacgcctgcggatgttcagggaattccccagggtgacactgccacctctggccccagggagtccagtttgaggctatggatgagttttccttctctgggaacttgctctccttattggcgtggaaagtaaaggtgtcagcctgtgtcaatgttgtcacgaggaccgcctccctggggccttggaaaattgctggtgcgtctgcctggctcctcggggcccccaccagggcagcccccaccagggcagccccagcctgctccctggcgtctccaggtggggtgaagaggttgttctggtctgtgggcctctgggtagcacagacatgcacgtggagctgggaagcccttgagtagagtgggaattgggcccctagctcctaagcttgtcagatttgagttgctaatggcagcggtgggaatgaggcagctcaggtggctgtgcagagctccacactggggcaggtatggggaaaggtcccatgtccatctgtgtgctggggtagcttagggctgctagggcctgtcctgtttctgcggactgggtagctgggcacgtgtggccatctggagacccctattggcttggggtcagaccccagggccccatcttggctgctgtgactccagccaggtgagagtattagttactagtgtccctgggtgcctactatacacggccggcatttggtgtcagtgccaggagatcccagcggtccagccctgctgccagcctcactttagagccacggggaggctccaggaggggagacgctcaggtgctgaggatgaatggtgaggcggagccccaaacctagggcctctcgggctggagccctgtgccctaccccaaccaccaatcctacagggacaagaaaagtccagtgagaatcaaacaggttgggtcacgctcccaggagacaagaccatggcaggctgagggggttaaggggtattcctcaccacaaggcgcagtggtgccccagggaagcttacagcccttgcacctgttcttaggccgtttattgcacggggaacgccctctccatctaaatccttccctttgcgcagagcacacattaagtaagtccccatgtgcctctgaccaacaaagccaagtgaccctacctccttgtaatgctgcacgagggttttttgtttgttttttgtttgtttttgtttttaatttaaggcagagtctcactctgttgcccagactggagtgcagtggcacgatctcagctcactgcaatctctgcctcccaggttcaagcaattctcctgcctcagccgcctgggtggcatccgccaccatgcctggctcatttttgtatttttttgtagagacggggtttcaccatgttacccaggctggtcttgaactcctggcctcaagtgatccacccaccttggcttcccaaagtgctgggattataggcttgagccactgcacctggccatgcgagggtctttgagtgggaaacagaatgagctcgttagaggcagtaaagtgcccacactgggcgtgggaggggcagaggcttcagggagctgggctcacaggcagtggaagggaagatgggaagggcctataccagggcgggggcagctggagcgaatggagaggattccacagacttgggaagagcaaggcaggcggggtgtgggaaaggcagggggaggatgagcatccaagggcacccacctgccccttctttcttccttgctgtcagtgaccatgtcctgctcagcagacaccagcctgctgctggttttcagggcagcccagatgggagcgcagagaggggcagtgcagggtcaggacaggccccgggggctgtgctttgaggccaggacctgggagggagggcagggccctgccagctttctcagacctggaagatgctatggaaataagtcctaggccctggaggaaagggaaaaaggaaacacagccctctcatgtgatctgctcgcctcacgtttcggacgggaagtgtttagattggttggccgctacagcacatagccacgcagtttgaggccaagctgggagttgaacccaagtctgcctccagaacttttgtgcgttccacaccagggatccgattaggtcctggtggggaaaggcagggtgtatgccttggcaagtttatgtccccagaagctgggcaaagcgggtggggaggagacaaacacccctaccactgccagacctctccccacgcccattaaagaaccctccagggccaaacaaaaatacctcggaaacccacacgtgctggcatgtgcatcgcgtgcccaggcccgggccttccccttagtggtcctggtgcccagcatttgggtcttcagagtgcggcaccacacgcccgcaagcctcttgggaggctgagcctgtccctgtgggtttgcgcttgtgtgtggtgagcccaagatcctcctgctcccaggaagttgcccgctcaaggaagcagctcctgaacacagcagtcccaggtgttgaaaagccaggaggcccagggctggggttaggagagcgcagttaatgggaggtgagttcctcagtgtcctccagagacaccctagcccctggccagcaggaagagatgccccctctgagtggctctgttggaatccagatgccacctgttaaccaagtctactgaccatgtcacctccccagagacaaaacttgagaagagtgtgcaggacaaggacaggcctcagctgactcccaggtcatgactcaggcccctgtcctcagagatggagttcccatgcccccatttgcagtcatcaaagtggctgccccacaaggtcacagcctggtaaggcagtggctaagagtgtgctgagaccaggacacgaccagaagtgaccaccccaaggcagtatcctagtgtgtgcctggggaaattactggaggagcaggacttcatagaggaaggctgggagccccaagtgtcactgtcgccatgcagaaaatgtccagaaggagcatggttctcttctccagagctggaggctggagcggatgagcaggaaaattcaatctgctgttggggcaagcccgcttcctccaggcaggacaaaaattccccaagtgttctgtgtaggacctggctcgcccgtgcttaccaaggccgcaaagctgctcagcagcagaacctgcgcccaaggctcaggcctcaaaggctcttcccattacaccagcttcacctcgttcagctggtcaggaattggcagtttaatttctcagtaattgggcccacagcagtggctcagcaaaatctctgtattccattggcgggtggctgcctagcagcaccctacgcatatcagccagtcagactttaaaagataaatgaaggcataaataaaacaagattagacatgtggtagaaccgtcaaagccgagtgcatgggaattcattatacttttccactgtttgtgtgtttgaaattttccttgaggctgggcgcggtggctcacacctgtaatcccagcactttgggaggccaaggcgggtggatcatctgaggtcaggagttcgagaccagcccggacaacatggtgaaaacctggctctactacaaatacaaaaacttagccaggcgtggtggcatgtccctgtaaccccaattactcgggaggctgaggcaggagaattgcttgaacccaggagatggaggttgcagcgagctgagaccacgccactgcattccagcctgggtgatggagtgagactgtccccaccgcccccctccccaaaattttttttccctgagaaaggttttaaaatggcagaatttccccatagtgaaggcttaaaaacctattttcaccgtaattcctagtttcaaatgaagtttttcagggttttagacggagacagggccaggagaggcttggagggagtacttctttctgtggttaagaacactgagaggccctgactctggaggccaagccttcagaggacccggctccaagggtcagtgggaaagcagcactcgggacagcactacccacccccacccaccaagaaagagcacaaacagccaccagagtggtttcttctttataaacacaagtacatgaggtttatttgaaattccaatttattacaagttcaccctttaatggggcccttcctctttgaagacaataaaaaaaaaaaacaacaacaaacaattcaggtgtcactgaagtgggaacacaggattctcactatgaacaagaacagactggatgtaggaggcaggggaagctggcggtggtggggttatgaagctgtgatgtcagtgccaactccatgcctatagaagggacggtaaactacccagcagccctggagcaatcctcgtcgtccttgggcaggaggacggaggaagcagaggccacattccgcagtttaaaattaagaggcttgattctcatgttctaggagctgcagtccccttggtggactttaaataggtacagaagagcttgggtgctcaaaatttccaaattcaaaggtgataaaaaagaaaaaccctgttttgtacttttatcaaaatccatcataaaagggaaagaagactacaaagttttgcctaaatataacaactagagctagatttgttgtgggggaaggggctctcagagcttctctgccgctctctcctcccaccccccaccgacactgaccactggaatcttcaggttcttgaggagttccaaggctgaggtcagaacgggcatgggaggcagcagacacagcactgccctgctccccctccaatgttgctgcttgcctcaatgagcctccaacccaactgctctagaggagagtggatgggctgaaggagaagccagggaagttagagcaaacacattatcatagaaactgtactgtacatgtgctaaagcaagatgtcaggagtatcttacaagatgttctttatacaatatcactgctgaaacaagcaacttttaataactagaaaagtcaatttaaaaaaaaaattaaacatttaaattcttcctgcttttcttctgctcccctaagagcttgactggtatgtgggtgggctgggctccaacacccctctggccagatccatcaaagtaaaggttatatgcatgattataagcaggactccagtctctaagtgaagtgccttagttttgtttttttgttttttgtggtttttttattttttgggggggtgggaggagctgtcacaaagaaggggagattcaggaatggctccaggacacgtccctttactctgccaagatcaactcaaaagaccacaactgtttcatgatgctggtgaatacacaattctgtatggcactcactgatactgtcacctgagaggaagacgggggaagagacagagtatgggcttaaagaaacaagactgtataataaatacagattaaaaaagaaaaatcgccaccatctcccctgttggcctgattaccccgatcctgctatgtaacacagcaatccctcccctggagaccagaggggcttggcactgtggtggaagccagagcgagcaggcccttaggaaagaaggcaggaacaggaactggcttcaccagaaaagctagaccctcggactcctcctggaaactctcagaagggagggttatggccctctttgtcccttcatatttctggacaaagaccaccaacccaatatcaagccccataaagagcttttagaaaaacagcataagcttgggatgacaggcgtttctggactccctgtgatctcttccaggttcttggtcttcctcgctcgcctccctcccaccctccctagctgtccccccacctcagctcccttaccacggccctgcctctctacttcttctgtcttcgtcccctggactgtccaacggcctctggctcactgtccccttcatcttcagcaagcctatcaggaaacttcttgcgcttcctgcggacatatgggtggccaggaaggtgtttatgcaacagagccactagacactgttctgtcttcaccatgcagcttagcacatggctgccacggcagttgtaaacctcagcattggtaaacacttgcttcatgtcagtaagaaactcctgcacagagcggtagctcccacaggaacatttgttctgcactgtctgaaagtccatggggtgcgtgatcacatcatagtagtcctcggcctcatctctggtcacaggctccctgtggagaagaaccaaatggagaatctgcacagccttgacggcagtgcccctgccactgagacacgtcctgaaaagcaagggcttggctgagagcccctcaggggctctggaagcttttagaaccagccaggccactcctctcccctgcacctgagaacacagcactcacctgaagggccagctgaagcggtacttcacgatcttgtggaggatctcttcacacttctgcagctccaggctttgcctccgggagctccgcttggtctgaagcacctggcaggaaagaaagaacaatgttattacagattcaagacaggaggaagaatggacagggcagaaaataagtgtatctgctcaaaaaaggaagagagttcaactatttccttggcgcagaggtgctgaaaccttctgatattcaagtcagggagcaccctcggcccaggtggcaggcatcttcccagtagtccactcactcgcctcccccggggccacggcaatcaaagcagcaaagagcaggcagcgggggccgcctttaccagcagtcctgctggaggtcggctgaagggggctactgtcaacaggacactagctctcagagaacaggtggacctggggttacagtgacaccatggaagggcatcaacaagccactgcagaaagcaaaacatgctatctgggccaacagcagccaattctgtgggggtggggtgcctctggtaagaaaagcaagaggtccaattcccttcctgggctcttccaccgtagacatgtgagggttaagtggctaaagagaaaaggggcggggcctccattccaggtagccataacaaaagctgtgattcacagcagaggccacagagcccaaggctgtggcaaaccgagcatcttctaatgccttatgatctcccaaatggcctgccttaagcccctaactccaatttgatctgtcaaaacaagcaccttttcaagagtttcttttttgttctttaaagctcaagtgagatctaaaaactactaaaattacattggttaaggagcagaggggagggtaatgtccctcccataacaactgtcgactcaacagtaagtgaggctccagcattgctgacattcccacaatgaagacccagcccctctgagcccactggagacacatggatactatttttaaatccttaataagttgcaggctgcccgctaactagtttgcaggctacagcaggggaatgccggacatagctgttcctggaggccttgctgcttctgtctgcgtacaggctcacccatctgcctccccagcctcccaagtttggtaagaaggaggaggggggaggctcccctcccacctgttgcctgatgaattcctaattgctggggtagggaataagaaacagaaaggttagagaagggatgataaataattctcaccagctcatccacctcagcatcatccacaggtggtgccttgggctgagacctcctggtagagtgtggcttcttacccgggcgccggcctgaccttgctgcaggggggatgacgctgtgcttgccccggatggtctttcgaggtctcactgaaagaaaaactatggattcagcagagaacaacggaaggtgaagggaggagcatcttcgaaatgggggaaagggatgcagggagaatccttttcctggacaaggaaagcagtggcctcctttggttttaaggtgctcttgctattttatcttgccttacctaacaggacactaaaaggcagtggcagccgatgaagaatgggtgcctttcatccactgccaaagcccttcagagggctaggtccttcagtacttctgtcctgccccgtcctgcagttactcccagccataaggcccctgcaggaatcaactgtaaactctcactcatgagaagccatttgctaataggtcagcctggatttcccacagcccaagctcagcctgagcgagtggatgtatttacatgtaagatggaactggattgtaaaacaaaccctatgttgtaattcccagagttattctacacttaccatcagaatctttccagagaaaagctggtacttccatgaagggccacaaggctcctcattaaatacaatttagggctagtcccctccataagagccctgcccaggatccccaatgagagaataaagaatataggccgggcgttgtggctcacacatgtaatcccaccactttaggaggctgaggcaggtggatcacctgaggtcgggagttcaagaccagcctgaccaacatggtgaaaccccgtctctactaaaaatacaaaattagcagggcgtggtggcacatgctggtaatcccagctactcaggaggctgaggcaggaaaatcgcttgaacctgggaggcggaggttgcagtgagccgagatcacgccactgcactccagcctgggaaacaagggtgtaactccatctcacaaaagaaaaaaaacacacacacacacacacacaaaggcactgagactacttgtgtctcaggtttacaacaggtgctcaccatcaagccaactggcattcctcagtgagccctgggaaacaatgccatgaggatttagctccaggctctccaccaccttcccttggggagtggggagatgacactggacacagaggtctaggaaggcagtgacacgaataatccagaaacactactttccattctatttctggatcacgataaccctttcttggctactttagcgtctctagctcaagcccaggctagtaagaaagggtaagaatctgatgcttaggtgctagaaccttgagctgcactggggaaccacatctttggtggtctgaaagatagagttgacaaaaagctctgaagtaccaaatacttcccagatccttttggcaagtcgaggccgtaaaaacttagaaaagcaattccttggaaagagagctacaacgtagaagtggaaagcaatcactagcttacaaataaacagaatcagtatactaccatattcaggatctgccctcagagagatcaggcgcagtggctcacacttgtaatcccagcacttcgggaggccaaggcaggaggatcacttgaacccaagagttcaagaccagcctgggaaacatggcaagaccctatctctacaaaaaagccgggcatggtggcacgtgcctgtagtcccagctgctcaggaggctgaggtaaggaggattgcttaagcctgagagatcgaggatacagtgagcagtgatcataccagtgcactctagcctgggcaacagagaaagatacccatcccccgctccgccaaaaaaaatatgttcccaaacaaaggtgtgcccaagtcactgactctgaccaacagaagaggatattcctgaatgcaggactgatgggccatttgttcacttaccctaggatacctgaaaaatcaggcgtagtgaacaaacaaaaagagcccatacgtatgtgagagcttaaggtgtcccacatcacacctctgaagtatgggggggaaagtgggaggacaggagaagacgggcaagcccaaatcattaggttttggcagtctcactacagtaagagactagtcatgccaggcatcc

SEQ ID NO: 360 - DNA, 2405 bp, Homo sapiens
cgggaggttgcgccggctctggctcagcggcggctccggtggcagcggcggtggcggctaggcgggctcggcggctcctgtccctcgggcggctgcccgctcgctgcccagggcgcccggacacacgtgggcggctcagcgatggcccgcgccccgcgacgtggcgggcaggcaccggggcgcgggaccgctgagcccgagtgagccggggccgcgctcccgccttcggcccgggcctcccgggatggccgtggcgcctctgcggggggcgctgctgctgtggcagctgctggcggcgggcggcgcggcactggagatcggccgcttcgacccggagcgcgggcgcggggctgcgccgtgccaggcggtggagatccccatgtgccgcggcatcggctacaacctgacccgcatgcccaacctgctgggccacacgtcgcagggcgaggcggctgccgagctagcggagttcgcgccgctggtgcagtacggctgccacagccacctgcgcttcttcctgtgctcgctctacgcgcccatgtgcaccgaccaggtctcgacgcccattcccgcctgccggcccatgtgcgagcaggcgcgcctgcgctgcgcgcccatcatggagcagttcaacttcggctggccggactcgctcgactgcgcccggctgcccacgcgcaacgacccgcacgcgctgtgcatggaggcgcccgagaacgccacggccggccccgcggagccccacaagggcctgggcatgctgcccgtggcgccgcggcccgcgcgccctcccggagacctgggcccgggcgcgggcggcagtggcacctgcgagaaccccgagaagttccagtacgtggagaagagccgctcgtgcgcaccgcgctgcgggcccggcgtcgaggtgttctggtcccggcgcgacaaggacttcgcgctggtctggatggccgtgtggtcggcgctgtgcttcttctccaccgccttcactgtgctcaccttcttgctggagccccaccgcttccagtaccccgagcgccccatcatcttcctctccatgtgctacaacgtctactcgctggccttcctgatccgtgcggtggccggagcgcagagcgtggcctgtgaccaggaggcgggcgcgctctacgtgatccaggagggcctggagaacacgggctgcacgctggtcttcctactgctctactacttcggcatggccagctcgctctggtgggtggtcctgacgctcacctggttcctggctgccgggaagaaatggggccacgaggccatcgaggcccacggcagctatttccacatggctgcctggggcctgcccgcgctcaagaccatcgtcatcctgaccctgcgcaaggtggcgggtgatgagctgactgggctttgctacgtggccagcacggatgcagcagcgctcacgggcttcgtgctggtgcccctctctggctacctggtgctgggcagtagtttcctcctgaccggcttcgtggccctcttccacatccgcaagatcatgaagacgggcggcaccaacacagagaagctggagaagctcatggtcaagatcggggtcttctccatcctctacacggtgcccgccacctgcgtcatcgtttgctatgtctacgaacgcctcaacatggacttctggcgccttcgggccacagagcagccatgcgcagcggccgcggggcccggaggccggagggactgctcgctgccagggggctcggtgcccaccgtggcggtcttcatgctcaaaattttcatgtcactggtggtggggatcaccagcggcgtctgggtgtggagctccaagactttccagacctggcagagcctgtgctaccgcaagatagcagctggccgggcccgggccaaggcctgccgcgcccccgggagctacggacgtggcacgcactgccactataaggctcccaccgtggtcttgcacatgactaagacggacccctctttggagaaccccacacacctctagccacacaggcctggcgcggggtggctgctgccccctccttgccctccacgccctgccccctgcaccccctagagacagctgactagcagctgcccagctgtcaaggtcaggcaagtgagcaccggggactgaggatcagggcgggaccccgtgaggctcattaggggagatgggggtctcccctaatgcgggggctggaccaggctgagtccccacagggtcctagtggaggatgtggaggggcggggcagaggggtccagccggagtttatttaatgatgtaatttattgttgcgttcctctggaagctgtgactggaataaacccccgcgtggcactgctgagtcctctctggctgggaaggggggaaggtaggagggtgagg

SEQ ID NO: 361 - protein, 589 aa, Homo sapiens
MAVAPLRGALLLWQLLAAGGAALEIGRFDPERGRGAAPCQAVEIPMCRGIGYNLTRMPNLLGHTSQGEAAAELAEFAPLVQYGCHSHLRFFLCSLYAPMCTDQVSTPIPACRPMCEQARLRCAPIMEQFNFGWPDSLDCARLPTRNDPHALCMEAPENATAGPAEPHKGLGMLPVAPRPARPPGDLGPGAGGSGTCENPEKFQYVEKSRSCAPRCGPGVEVFWSRRDKDFALVWMAVWSALCFFSTAFTVLTFLLEPHRFQYPERPIIFLSMCYNVYSLAFLIRAVAGAQSVACDQEAGALYVIQEGLENTGCTLVFLLLYYFGMASSLWWVVLTLTWFLAAGKKWGHEAIEAHGSYFHMAAWGLPALKTIVILTLRKVAGDELTGLCYVASTDAAALTGFVLVPLSGYLVLGSSFLLTGFVFHIRKIMKTGGTNTEKLEKLMVKIGVFSILYTVPATCVIVCYVYERLNMDFWRLRATEQPCAAAAGPGGRRDCSLPGGSVPTVAVFMLKIFMSLVVGITSGVWVWSSKTFQTWQSLCYRKIAAGRARAKACRAPGSYGRGTHCHYKAPTVVLHMTKTDPSLENPTHL

SEQ ID NO: 362 - DNA, 49349 bp, Mus musculus
  misc_feature (1)...(49349): n = A,T,C or G
gtggctactaaataagccaaccttccactctgaagaactagaaccaagggagacagagagcacactttgcagttaagagcacttattcttcttgcagaggacctgggttcaattcccagcaactgcatggcagcttacaagcatcagtgactccagtccaggggctctgatgtcctcttctggtctccatgggcacatgacacaaacatggggcacagatatatgtgcaggcaaaacacacacacactaatgaaaaataaatatatacaaaatatctagaactggaagttcttctgtagaatcagagataatagaggtaagagatcaggcagagtcaagatgtatagggaccagcagttatctatgtgatagaatgtttaatcatggatttctatgacaaaggtgattgattctctatactggctggttttgtgtgtcaacttgacacagctggaattatgacagagaaaggagcttcagttggggaaatgcctccatgaggtccagctgtggggcattttctccattagtgatcaagtggggagggccccttgtgggtgggaccatctctgggctggtagtcttgggttctataagagagcaggctgagcaagccaggggaagcaagccagtaagtaacatccctccatggcctctgcatcagctcctgcttttctgacctgcttgagttccagtcctgacttcctttggtgatgaacagcaacatggaagtgtaagctgaataaaccctttcctccccaacttatttcttggtcatgttgtttgtgcaggaatagaaaccctgactaagacattccctagatttctaattactattcctatgtttgtatgatccttataactaggtggttgtggcacatgcctttgattctagcccctgggaagcacagttgggcaggtttctgagtatgagaacagtttggtctacactgtgagttttagggcagccatggctacacagaaaagccctgtcttgaaaagaacaaaacaacctcaaaattaaaaaacaaaaaacaaaaaacaaaaaaaaaccacaacaaaacccagaccatgtgaccctcgtaacattccatagaacagtttttcatgttctaagaacaaggcagtatgactaacatgcttgtgacacacatgaacacggtatgagcacattatctgtggtgacaagtgagagagttcctttcctaactctcacagacctcgtcagaggcagatccaaattatgctacaagcactctccatcctcaccgtcagaggcaggtcagatttaacagttaactctccatctctgagactcgaatgcaatcaacccaacccatctgacacagaacatggacagctgatcaaaggcaaattcactctctccttgtgtatgttagttatctataaggtctcaggcgttacgttgggtgttgcaatcatagacacaagttccatgtacagctcagatgcaccatatgaaaccctgaacaatggggccagggaaatggcttagctgctaaaggctcttactatcaggtttgatgagctgagttcagtgtctgaaatccacatggtagaagagaaccaactgctgaaagctgtcctctgaatgcttgtgggtgtagtagtttgatcaaacatagcagggggggggggctggagagatgagatggctcagtggtcctgagttcaaatttgagcaaactgcgtggtggctcacaaccatctgtaataagatctgatgccctcttctggagtatctgaagacagccacagtgtacttacatataataaataaataaatcttaaaaaaacaaggggctggagagatggctcagtggttaagagcgccgactgctcttccagaggtcctgagttcaaatcccagcacccacatggtggctcacaaccatctgtaatgagatctgatgcccttctggtgtgtctgaagacagctacagtgtacatatagtaataaatgtttaaaaaacaaaacaaaacaaaaacaaaaaacaagagagagagaagtccaaaatttgtcttgcctacaagatgtggagggataaagatggagcaagacagagggaatagctgaccagtgactcatcccatgtgagagagccaaccactgaccctattaatgagcctgtgctattgcagacaggaacctagcttaactgtctccttagaggcttcatccatcaaggcatgaaggcagatgcagagacccacggataaacattaggtggagctccaggagtcttgtggaagggggggatagaagtgagcagtcctagggctcaaggacaccataaggcctatggagtcacagagcctggtccaccaaccagggagcaccaggacgtggacctagacccctacacatttgtagcaagtgttcagattggccttcatgtgggtctcctaacaagtgtgtgtggggggggggcctgtctccgtccctgttccctgcctggacctccccgttgccattgggtcaccttccccttacctccactgcctagttgggactcagtgggagaggatatgcctaggactagatatcccaggatggggtggtacccaatggggactccccttctctgaggacaaggggaggggcaatgggggaagggatttgtaagtgtgggactgggaggagaggagggaggggggctgtgatcccaatgtaaaatgactaacaaaaaaattaattgttagggaaaaaaaaagttagagaaaatttagagttcccaataaacacagttctcatgacctaagtggtagattctctttggcattcaaatttttctgacagaacttttctactcacatacagtttatcagtcatggtgaggtttgtgtcaatatactgtttaaccaagcgaaaacacagggcaggattaactcatagctcctcagtgccttgatcactggtatgtggaatggcctaacaagatggccaggattcataacgaccaagttcagtgtaattattgtttgaatgcacatgtgataggattttaaggtgataacgatgttttggagttgttatatatctcttaatgacttcttttcttcatttttcttttattttctgtgagcgcctgactcgccagcaaagcagatgccacaacaggatccttctgcaacacatttactgggagagcattttactgtgtaggcaagaagatcccgagcccagaactggtgctgcttatataggcctaggagaggcgtgtctcacactcggattggttatgcattctacctcatttgcatgttcttcatctgattggttattctttctcagtaccttgccaagcctcattatcatgcctgggccaggcagtgactttgtgaaaaactttactgtttatatacacattggttgtttacccagacttcatggtggccagtggtatccagcaccaccttgtaatggcatatgtggcttcccacattttccttgcagacagtatcttaatatataacacagtttggcctgcaactctccgtaaatatccaaagttggcctccaacttgagatcctcctgttttagctttccagatactgggcttgctggtgtatcttaagagagaggaggcactgaggaaagggaaagggagataaagaaaacacgtctcaaaatatgagtgagtcatcacacagcctgatgggacagctcagtggctaagagcccttgctactctccttcaggacccaggttcattttctagcacccacatggcagcttacaactgtctataacttcagttctgggggaatctcggctggcctccaaggacatcaggtacacatgtatcatgcatgcataaacatacacacacagtccatgtgggtaaaacccagacacataaaataaaaacaaataagcctttaaaaacatgcatgagtcatcactgcttggacccagaattaccacaggtccttatttaccgtggatggagtcataactgcttacaataaaacgtgagtctaacattcagcttgactttttaacactactcattctgagagctctgtcggactctttgataggatgtggagaagtgagctcttagggcaggagtctgtcttaatggaacagcactgtacaacatccttggttcagctggtccagtaatcccaggactggagaagctggggcaggaggatcaccacaagttctaggctggttaggttgcacagtgtgttccaggatagccgggggtgtgggggcatggggggtggggtggggcacagagtgtaacccacagggggtgggggtggggacaaaaagagacaagacaccattggattcctcagcaccaaaacagtaaaaaaaaaaaaaaaaacctttattcatttcacaacactgagttctgtggtgagcctacaaggtggaaatgaaggtgtgaaaccactttctcctgtctccaccggagtgcagactgatcaagaaagcactatctagccagacactctacacacccacgtgaccccagctactgttcaggctgaggaaaggctgcaagttcaaggcagggctggttaactttgggagagtttatcttttttttttttcccccgagacagggtttttctgtgtagccctggctgtcctggaactcactttgtagaccaggctggcctcgaactcagaaatccgcctgcctctgcctcccaagtgctgggattaaaggcgtgcgccaccatgccgggcgggagagtttatcttatgaaagagaaggaggaggaggaggaagaggaggaggnnnnnnnnnnnnnnnnnnnnnnnnnnnnnnnnnnnnnnnnnnnnnnnnnnnnnnnnnnnnnnnnnnnnnnnnnnnnnnnnnnnnnnnnnnnnnnnnnnnnnnnnnnnnnnnnnnnnnnnnnnnnnnnnnnnnnnnnnnnnnnnnnnnnnnnnnnnnnnnnnnnnnnnnnnnnnnnnnnnnnnnnnnnnnnnnnnnnnnnnnnnnnnnnnnnnnnnnnnnnnnnnnnnnnnnnnnnnnnnnnnnnnnnnnnnnnnnnnnnnnnnnnnnnnnnnnnnnnnnnnnnnnnnnnnnnaaactctggatctggttttaaaccttgaaggaagctgcattggtttgcgttagtgtttttgtctgtatagagattgagcctagaaccctgtacagtctaggcactctacctcagggacattttcccagtcctggttttgcattttatgttgactcagtgtttcacaaagttgctcagactggtcttgaactccttctgtggcccaggcaggctttgaacagcaatcctccagtctcctgctcttatctgttttggtctgccagcctgtgatactaggtctggatgaagctacagtgtttttgttttcttgagaaataggcatacatcgctattcttggcctagaactgctgtccattgcaacaaatgcccttaagggtaagttcaaagagcagcacctgtttcaggactaaaggctccaaggtggctatgtctaatagaaataagacacacaaacaatttgcttcttaatagccacttttttttaaaacaaagtaaaagtaaaaagaaacacatgaaatgtcattgtagcacgtagtaaatataaaatgtatcagttgttgctgttgctgttgctgagacaaggtctcagtatgtaaccctggctggcctggaactagctatctagatagacctgtctggcctcaaattacagcccccctggcttctgcctcaagggtcccaggattacagatgactcaccatacccagtttcaagactttcacatttcctttttcattctgatttcttgaaatctagtatactctatgtttacagtccatcttaatttggatcagcacagttcactgctccacagcctgcatgctgttcaacaggaacaggtatttttctaacgcagcgggcaggtagccttgaaaggctatgagagtaagacccaatgctacttgagatgtcgttgtgtacttctcaccagcacacgattttaaaggttcctagggaaagtttaaatggcctacacctaacgctaaacttgttatttagagaggcccttatttgtgacggggcttcacacaatccaacctggccttgggctgatcttcctgcctccacctccgaactgctgggacaacaggtgtgcgccactatgatcagcttcctaggtgactttacagaatgctattttctgtgtacctacttgtagttcaatctatgagttcaatatatgatggagctctgggcaataaaatacaaaggggtgtctgcgaagtcatagtgggaagcaactgtccttacgagagtgacttcaagaggaatgctgtaagctactcacactccttacctttacagatgttaaagattaagtagcacaggctggctcctgtctcagcctcttgagtgctaggattataggcatatgttaccctgcccggatgtctctttccttctgtttggaacatttcatatggagaacacgtttaggggggcgtggcaattgccttgggataatgacaaaagatttttaacacagtaagataacagaagggttcttttcttatcagaggtgtacatttatgaagccaaccatgcaaacaaagggcaaagggaggcagggacagagttcagtggactcttcctaaatagtaacaacccaaacctacccttcttcctgctgcagcttcttttgcggaaggctctgtccatcattactacttcttcttcatttatttatttatttatttatttatttatttatttatttatagacaagggtctatgtagtcttagctatgcatatgtagaccaggctggtttcatactcactgagctagctcttcctgcctctgcctctggagtgctgagattaaaggtgcatgtgtcaccacacccagctcacgtcattccttcttaaagcataacaagggccttgtatgtccgaaagcatagaactcaaagtgacagcaaggattttaaaaagaaaaaaaagttgcccaccctgcccccaccagaaataccaagaacttgtgtgtattttgtcaatacatagacacaaatgacagcagactttttagtactttatgaggtcatggcaatcacaggcaaatctgcctaaaaagttggctgcagaaatgacactgtcagttttttcagttactgactgtaaaatctttgctaggtatattttctgagttacacgggagactaagtgggtgaccattactctggtttgattcttcaccaaaggattccttttcaatgaagaaagacattttgtttgatcacttaccaggcctacactaatttttatcacatgtaggcaagttagaaactcaaggcttcactttcttttaaatccaaatgtcttacatttagtgtttgagtgtaaagacactacagcccacatgtagaggccagaggacaatctttaagagtaggttatccccttccactgtgttcatccaggggatcaaattcaggtcatctgcacttggtggcaaatgcatatactcactgagtagtagtgacagcccagcaaccttttaattgtctttttgtgttttctgttgttatccattgccaggttgtttgagacaatgttttgctgcactccttaggctggctttgaacacctgaaactcctaagcctcccagaaactagctttgaagatgaaggtcagacttttatctcttgaagaaaaaaaaaaaagacaaaaaaattgtttgctgtgtgcatttacatgcatcacgtgtggttcccacgctggccaggaaagggtattggatcccctggagttggagttctcagagtttatgagctgccatgtgggcagtaggaattggactccagttgtcttcaagagcagcgactgcttttcatcgctgagccatctctgcagccctgatggactcttcatctaactcccatacagactttccattagagccagattatactgttcaatgcaatcctttagggtggctaaggtggcgtacctctgtagtccccgcacttgggagaatgagacaagaggattccaaatttgaagccattctccattacatagcaagaccctctctcaaaaaacaaccaaccactacaatctgcagtgatagcttctttgaggacagatgtcagtcttaacaaaggaagccctttttgagttagtctagtcataaatatgaacaagaaattcattcaccctctctgtattttctctcttatgaaggaaatgtcaggtcaatatacgtgtggaaaactggttatcattctacctcaagtaagctattgttcttatctataatagagaacctgtttctttgtttaaaacagcgtttcatgtagcccaggctggtttatgactacgtaggtggggattgccctgaacttctgatcctgcctctataggtctaccaccaagtcccattttactcagttctgcataaatccgtggcttttaggcaaggagcctaccaactgatctacaaaccccattttttttcttcttcaatgtaccaccatacccagattgtataggaaaaaaaatgttcaaagtatgctaaattttactattatattgaacataaaaaaaaaaaatccgaggtgagatgatagcttctcttgagacaaatgttggaagcatgacaagtcttcaagttctgacctcttctgttcacatacatacatttcccccttcttactggttaaaaatctcactttttctggtagaaaaatgttacaaatctaaagacttcaatctcaccggtcaaaaaatagggtctaataaaattgccaaataaattccattgttttgaaaactagaaaaatgctcaggcttagctaagttgccagttattaattttttttgaacgtactggaatgtatcaatagaaattccttcacaaatcagtttgcctctacttgcaaatggataaccatatctacaataatctatgcttatcagataatattttatgtgcactgtctgagtctatttagagcggactttgaagggacattcagactcttatgaactaactggcttctgctttaaagggctactgcttctagtgtcagctctttctagtttcaaaatttgcatggccgcctttctgagtcgccttcaagaacagtcttagcccagtcaggaattgctcgaactccggcggccttagggtcaggcttatttgcatctttgctaaacaaagtccatcctttgaggcgtcagcgccgccggtcttcgctctcacgctccgctgctcacttcagcgacggtggcgtgcacagcacctgggtcatctgtgctcacgatcctgccgcgacaccgactctgggcgttgtggttctcatttcagggctccgagattcccacggcacactccgctactcgctccctagtcccgggactaggaggcgcggttttcccggagaaatccacgtcagccgcgcaggcgcaggcgcaggatctgggcggagggaaggggcctgcgctcggcccgcggtaaacaagcactgcgcaggcgccgtgcgccaaggtgattttttttttttttttttttttttttgctttttggtttgcatagcatcataaaaaagggggaaggccaaagcaaaccctagcatcttaagacgatcgacggtgtggcttctgctactctcactctgaggcaccggctgcgcgaccatggcagccataactcttccacagagctgccggccttgagctctttcgctcactgtctacactgaggctgagaggacagagaaaaaaagaagaaagaaagaagatttaaaggagaggtggtgggcggttcccacaacgccaccgtaaagacctcagcgccgctctttccccagacaacgcgagatcctgtgccaggccgggactccgcccccgccccgcccgtggctgtgtgcgcatgcgccgggctttttggcgcgcaaaccgttcagaacttcctgcttggtcacaggtggccccgtcggcccccgagggatgtcagtcaggtcggagccggtgattcacgcccactgcggcacgtccttagggatttttcggtcaaaattccacttgactgtaactcgcccccccattcttctgttctcgtatgggtcatgaggtctccgcgaatccaagagtcagagtgggaagagagcccctcgcggtttttaaaagatgttgcgatttcgttgtgtggcacgcgagctaactggcataaaaggataaatctggggaacgaacgggacttccccccccacccccgaagattctgagaggctgtgaatgtggaccgggctaacacagtgatatgaagatgagaagttttaaaaatggaaggagccaatgaaggcttgagagatgaggctaggaggaattagagcagtagaggaagtttagcttaaaatatttacgcatatttataagcaagtaggcagcagtgccgcatatttagtctacgatagcgaagtgaaatggggatgtctttgagtgcaacagaaacattttttaaagttgtcgcaggcaagagctgaggttggggcggggtaaaacagataatctggagtcttaggatgttgcaagtgtggaccgctctgactgatttggcctcttttctctctcaggggacgtggaacacctgcacaaactggatttttgccctatcacgactctgaggtaccatccggcaactgaagtgtcctctttccaatagaatgcctggcctctcccaccaacttcacggttcagccggaatgaaatttggctaacaagtcactcagatgagtcactggctcattacaagattatagatttctaatcaatagccttccagttgtgtagatcttaggattcactctaatattgggagcagtgctatatagtacagacagtattgtcatttttactgtccctggagatggtttgcaggaccttgcacaagtcccgcaatgcatgatgctcaagtcccctgcgtaatgaggtatactatttgcatatgacccttgtacatctttctgtaaagtttaaacaatctctagattatttgtgatatgtacatcgatgtaaatgctatgtaaatagctcctgtactatattgtatagggagtaatggcaagaaaagcattcagtacagatgcaaatttttcttctctatttttatatctgcttttggctgaatgtgaggatgtgaaacccatggatgtgggggggttgactcttctctctctctctctctctctctctctctctctctctctgcctgtgtgaaagagttacctcactgtattgatcagatacgcctaaatggactaaaaaaaatctagtctcttatctcaactttctgaatagctgacactcccaagtgtgtgttgggtacagttctggatatattttgatcctttgtgtgctttataaagaaaatgcaggaagattgacgggatatataatttgactagtcctaacaacagagtagcaatatagcttcctttgtaagaaaacaaagaatggaaggtcttaggattaaagctggcagtgatggagaaggctctaattattaatgtttagaggaaagcccttggaaaccaggtataggatcatacacctatagccctagctacccagggatgagccaggaggactgcttgaacctatctgggacatagcctggggaggggatggagagaggaaggaacgagggaagacagaaccagaccctctcagacagttccctgtaaagcactgtattttggctgattgtattctgttgtgtgggttgtttgtgctgaatccacaggaaaatgaaggggaaacatgggtacaatataataggacttctgggttgacatctaaatatttggtttgggggattggggtcatccgtcatctaagtgtaatgtcataggtactgtttagaactggggatcagagccctgaggtgtgacctttggatctgccggttacaccttatgacatctcatttcttcatttataagtaaggattacagtaaaaggagaatgaggatgagggtatctttttaacagtgacttcattttaccttggtggtattcttgcctgcatcatatgtttgtgcaccacttgtgttcttggtgctctgagaggccagaagaggacgtggaatctcctgagttacagatgtcggtgaaccttcctgtgggtgctaggacagaattcagcctcttgggcttgctttctggagcagaaagagcctttatctgttgagccatctctttggcccatcaggtttttttgtttccttgtttttttgagacagggtctctcttaagtagaccaggctgaccaagaactcacagagtcacagagattttcttgtcagcacacagacctgcatctgtgtcatctctgcagctctagacactatctttcagtgggtcccattttgtagggaaccaagcatacatgtgaacgagtcctcgtgggacaggcagggatgcatgagacattggtctctgtcctagttgttctgtctttacactttattattgatgtgtctgtgctgaaattaaaggtgtgcactaccatgcccaccctccatcagtctttttaagctactattactactattgctacagttgagaactcctgcttaaagagtttctgaagaaaatgagaagaagctagagctaaggcttaagcccctctgctctgcacagttatctatttgaagggattctgaggactaaagcaatggcttgagatgagcaggcgagtcgggcacagtgacatagattctggaggggaagcgctgaaataagcatactaacttgggagcagttagtgtcgtcattactgtggatgccaggaacacactgaattggctgtatagcagactttgaacctcccaaactggccctttgatctagctcaggtaacaaaaagatgtcttgctttctttgccacctggagctcttctgctcctctgcctggggaaggcatgattaaagtgtttgcacatgggtggtctctcctgggagggcaggtgggaatgcttttttttttcttttttaaagcaggcattgattatgaaggcttcccgaagcctgtcaaaggtatgagattcatctgaccacactgatggttttgttgttactgacatatgggaaaagtagggtttaagcctactttcatagcctttcaatgaaaacaacatcacttgggagtagggaatgtctgggagagaaatttttctttttttcttctcttgtgtgattttggacacaagatcccacgtgtcctaggctagcctctgagcaactgtctcacctgccttcacgccctaagtgttagaatcatagatatgtgctgtcacacaaagtttgtcatgttctggagatcaaacctagtgttttgtacatacgtcctacctaggtaagtaggtaggtactgttcaaagcaagctacatgcctccgccccagggactttaccttcttacacacaaactgtttgataggaccacaactctgacttgtagtcacagttgaaaacaccattgttggacactatgactaaaatgtagtagttatggccaagaatatcttttgccacagattgcattcttaaaaactttttaattatgtgtttgtgtgtgtgtgtgtgtgtgtctgtctctgtgcatgtgagtgcaggtaccctcaaagatcccaagtgttgggttcccctggatttggaattacaggcacttgtgagctgcctggtttgggtgttaagaactaaactccgttcctctggaagagtagcaagtgatctcgacctgtgtcatctctgcagctctagacactatctttcagtgggtcccgttttgtagggaaccaagcatacatgtgaaagattgtccttgtgggacaggcaggaatgcatgagacattggtctctgtcttaggttgttctgtctttaaacttgaattattattaatgtgtctgtgtgtgtgtgtgtgggggggatcaggacaactgtctggagtcacttttctccttcccctttgtgtaggttttagagatccaactcaggttgtcaggcttgcgaggcaagcattcttcttaggcagcacttactgcccttcacaggtgacttttatgagttggaatgagccaaagacaaataacacttgaggttcatgactgatttttcatccgctggagaccaccagtgctgtcgaattggggacaagagaaggggggggggatgtaggaggaatggggttatagcttagtagtaaaacacatgcttagtatttggaaagccctgcgttccaccacctgcactcccaattaacaaaaattggtaggtttgtgttttctttgtagatgtgaaacaatgtcttttggacttttttcagtttcatactataccaatatgaagttctggtcattcatataagggtgtccagtccatctgtctgcttctttagggcgtgtagaggaattttaatccagcaacatggctactctggctagggatcatgtccaaagaccttctaggtctatatgatctagctggaatgcagacatgccctgggttacagtatgatctggatggaatacagacatgctcttagtatacaccttaatacactttaatccctaacaatgaaggaaaaggtagtttgtataaggaagcagccatgtttgaaagtgacatttaatagaagggcagagtgatgaatcaaagaaagatttgacagaatgagtcagagatcatatacatccagctcacatgataacagcacaagaaagagaggctacttaagagcagagagagaaggagaggtgaggagatggcagttttatgtctggacagttttgcagaggcaagctgtgaaagaacaagctagacacaggtgaagacagacgagccagagaatgagaaggagccagaagattagaacagattgccaagttagaatgtggccaagcagacaattcagccagaagccagagaaactggattgaattggtcatcttggaaggttagactgtacagaggctagaagctcctaggcttagggttagaacagaaaaagagacactctgggctcagcctcaactgtgtatttgcatagcgtgtgtacagcttgcatctcatcccatcatctgaggaaataaagagacatttatgaggagggggatgttagaattaggattctagggctgggtgatggtagcacatgccagcacttgggaggtagaggcaagcagatttctatgattctatgagtttgagggcagcccggtccacagagcaagttctaggagacccaagggtacacagagaaaccctgtttaaattccactcccccctcaccccctcaaaaaaaaaaaaggagaaagaaagacaagaaaaagagctctaatgagtactttccttggtgcagtggactttttttttttttgtaatgtgttatgtttttttctacagaaagcatttgggtgttggcactataaagattgaggttattttgtatttgctgttattggagttgcagcttcctataccaaatgcagtgtcatcctgggggtctggcagctaatgacctatggacaaaagacaccctctaaccacagttggctcagctgaaagtagaagatatcagtctgtgataatccagtaagtgtagcatcagggacccccagcactccagactaagaacaaaagggaacggtcttcagaacaaaaggaggttgctaaagtgggtataggggaaagacagaggctttactgtgtctcactgggataagaggcagagtccacagccgagtaggactagaactgtgaagttctgaagaacatagtctgcagagttgggtagaaagataggagaactggggtaaagaaagaagcaggttgaaagtcacaggaaccttagagggggctggaatgatgtagtcaactggcagagtgtgagattagcatgcatgaagccatggggttagtccctgtcattgatgatgcatatgtcattccaggcttacatagagagccctcaagtctagcctgggctacatgagaccctgtgtcaaaaaccaaatcaaaacctagacaaaatactctaactagtaatatgttataagtaaaaatatccaggaagattaatgggactactcacattttagttcaggaataaaagaatcaacatatacaagatgtttttaaaggaacaatgaagaataaaaatttgcttcatgggaatacccaaattcacatttttgataaggttattgataaggtcattgagcacctagttagctttgaatttttttttaattttgtggcagttggagagatgactcaacaattaagagcacccagattagatccccactgcctacaccgtggtccacaaccatctgtaattccagtgccaaaggacctgacaccctcttttggcctccttcagtctgcacattgtgtgcagacaaaaatgctcataaaagaaatttcaagaacatcttaattaattatttttttttaatcttgaagatgtgaagattggttgggtgaggatcctccctacagatctgtgaacaagacgtaatacatgacaaccagggcggctcatgcctcgttctagcccgtgggcagcagagcaggaggatcagcagttccaggtcacctgaagtgactcaaacaagctctaagccattctgggccatatgagacactgtctcaaaaaatagcagtaatagcaacaacccttctaaccaaaagattgaaatgcaataaactcagcagtagaagtactatgtgtgcaaattaaagtagtacagagtgaaaagggagatgtggctgggggtgtaacttactataaatgaatgcttagcgcgcccttcagctgggtcagccctcagcctcaaagataaaagagcaaggacatgagtaacctgatttggagggcgctgtatgacttacctttctgttgctgtgaccgaatacctgacaagaagtactttgaagaaggaagggtttactctggcccggatttgaagggatgtagtttagcctggagagaactgcatgagcgtgagcttgagggagtcacatttcatctacactcagaaagcagagaggcgagtgttggtgctcagcctgtgtatgtgtgtgtgtgtggggggtggcctatgcacttattggaagctcaccttgttctttgagatagtctctcactgaatctgtagcttacccagctagctgggccggccggccagtgaggtccagggatctgggatcctgcctttccagcactagaattacagattcttgcccagtgtcttacgggagtgatggggatctgaactctggccctcgtgatggtagggctgcttcttcatccaaggagacaccgccccagttctgagaggtcccctggtccagtcaaactgctacttaaccaagatagggggaagtgaatgagacacagcagcgggaagattatctgaaaaaacaacagattgagagaccagtctggttttagaatggacaagacagaaacttttaagcctaaagcatgaaggcttgagagagagaagttaaaaaagaaagaagaggattttaatgtatttcccagggacacttggatagtggttttctctcaggtaatgtttgaaacaatggggaaggtcctttttatttttaaatctaaaattgattgtgttgactgtgtgtatctttgagtacacatattacatacaagggtgtgtgtgtgtggtgtgtgtgtgtgtgtggtggtcagaggactacttgtagtcagttctgtcctgccacatgggtcctagggctcaaacccaggcagtctggcttggtaacaagcacctttacaagcaagccatcctgttcctgtcactagaaggatttagttacccagttatttaaaccattcacttcttttgtttggtcatcaattgggcttataagtgataatgagtttgaggacagtgtaacccaaacaaaactaaacaagtagataatatttattcagcttatggtaatttcctaaacgtggcaaatgttaaaattaagagctgaatttctaacggggtgtgggcatatacctgtaaaccccaaactgggagacaagagcagaaggatcactaactggaagctagcctgggctacatagcaagactgagtcttatattaaaagtacttcacctgacccctttcataaactaagagtagatactgcagggttggtgaggtgacttggtcagcacaggtgcgtgagcgcgagtttggatctgtagcactcaaggcgaaagctggagctggnnnnnnnnnnnnnnnnnnnntggccttgaactcagaaatccgcctgcctctgcctcccgagtgctgggattaaaggcgtgcgccaccacgcccggcccttagttacccagttatttaaaccattcacttcttttgtttggtcctcaatgggcttataagtgataatgagtttgaggacagtgaaacccaaacaaaactaaacaagtagataatacttattcagcttatgctaatttcctaaatgtggcaaatgttaaaattaagagctgaatttctaactgggtgtgggcatatacctgtaaaccccaaactgggagacaagagtagaaggatcactaactggaagctagcctgggctacatagcaagactgagtcttatattaaaagtacttcacctgacccctttcataaactaagagtagatactgcagggttggtgaggtgaattggtcagcacaggtgcgtgagcgcgagtttggatctgtagcactcaaggcgaaagctggagctggctagctggccggctagcaaatcagtgagttccgggtttggtgaggaagtgaccatctcagaaaacaaagattgcagagaaggtgcatcatcagcctctggcaactttctggagttgcttctgcatgtccatcccaggagtgaacttgaattgtcaggccttccctgacaattcaacacactgaaataagccactttaaattcctgatttggggtaatccaaatgccctccaattattatctgaatttatgtttaaaaaataaatttagcggtctgtagacaaatgtatttttatttttcttataaaatggcaaaacattttcaactggttcttgtggtcaacatttagttgtgtttcttcgatatctctgcaatatgctattaggagttgcatgaatggcttccagactgccgacatctagtctcaaagagaaatgcctttcctgtgttctttccactgccctgtggaagcagtccgcacatgctctatcttcagttcagtccaaatagatttttaaggagagaagcaaggggggatgggaggacttcctgtcttagtgtaattgtgggtttctagaatcctggcagtgtgcagggccacagcagtccagtcaggaagaagtctgcaaggtaggtctggttctgcaaatgctagctgaaagcctctgcaacaattcggttcttttcccttttctttagtcagcagggtcccatggtgaccggttttgaaagcaatagtccccttcagcagttacctagcaccatggcaaccaggacgtcagcaaagcaggagagacccacacaaaacagctgcaactcggcttctatcctgcttccaactcagctctgcctgagaggcccactgatggagctaaaaccatctaggcttgttcaccccagcattcctgtgtgctgagggggttttcccataagcacaggtgtaggagcctatagtaaactatgtcttgaacccccacccctgtaaaaagaaaaacataagagtatatttaaggggtaacagtaagttgtaggataggctagaaagcaggtatgaatttagtaatataaaaacctgatttgtcctcctaagtgaagtaagataacagtagagacagttagagccctagctatatggggtggtttatatttagatacaagatcagggggaaactttaacaaatatctttatttacctgaaatagacaaatggctttacggactgcaatgctgtccgtggtgctgaacagttcatcgaccagatgtgctataagggtaccccccaaaatagagtaaggaacacaatggcatatccagatgctgataatagaaagaggttgaggaattgggaaggaggcttgattttcttcccgtatgaagcaactctgaaagcgcagggtaaaatggccagattgaaaggagaaagtgaggaaagccagaggcctgtgtgcccgagtctttccttttcatatggagatttttcagatcagagccaatcaggtcagagatttctgctgctttgctcctgaagagaggagtgggggaagggagagagaagatggccacatttcccccccaagccacatgatccgtttcccatgtgacacattccagagccttggaaaggagaagggaggggcactgagagagtggggctgggggtgggaagatggtttagcagtgaaccttcacagcgtcatcttctctctctaccaggaagcaggctgagggctgagggaaggcaaaggggagatatgaatgtgttccgaaggtttcccggtggctcatggcatcctccaaagtcctgcctgcgagctgttcctgaccaagaaaacccgcggagcctgactctgaaatccagtcccgatgaaggtatgtgttcaagctcctctatcaccgctgaaatgtggctcagagggacaataccgtctcttcctattttttttttccaggaaatttggagatttttgtcccggcttagatgtttgtcaggggtgttaaatttgttacaggttcagaaaagatgtctagctagttctgtaaaataaatacttctccagagtaagctcctataggggaaaacaaaatcggttgaaaatcgtgtatagtaattggtaataaaaccagaaactccctggtggggggatttctccctgtctaatcctagaagaggaggaagcgttactcagaagagctagatttcattgtcactaagaaaaccctgcctcatccctttgagctgctgctctgtgtctgtgttcccagaggttactgcctgtagcttaggagcctgagtgggcagtcctgccattcctttgtgctgttagctcacccttctcctgatgtccccaataccaagagcaccaacgattgttcccaagctctgctgtagacactagactgccacagaaccccacacggtatgggaaggaagccttagggagctctcacaggaatctgccaaatgtaatacagtctgtcgtacactcctctgggtttctttgagtatttctcctcaggtcaaagagaagagctagcaaattcacgtttaatttcatttaataggtacttggaaaagttcttggtctgtgcaagcaatcatcccaagcatgtaagtaatcatacagattgtaatctagacataaactcgggcacagaggagttcagccctatgctagggtaacttagggagcacgtaatagaacaagaattgaatcccaagactctgaaccgtaaagtccttgttcttagtcatgaactgtattgcttggctgctgtgttatctcaaatgatgtcagtagtctgctgggctacaaatgttgttcagctgacgctactagaagattgagtcagcttgcctggctaaaacagatcccaagcgaaatctatatttaattttgaattatcccaatagtcatgttctgtaccccaaataacccagtaagtaattgcctgttctttccctctcgtgctacatagatatctagtagtaaaacacggcgttactatggtggtcactgctgtctaaaggaaaaagataaacctggaagtatgttatggtggactttttaaatcagacctagaaatattctctcattcttggaacctagaaacaagcctaccttaggcttctgattcccaaaagaagttaatatatcagaacaggtgtcatggctcttgcctgtaatcctggcccctgggaaggaagagtgccacatgattaaaacctgcctgggcttcagagtcagtctcaaaaagagacttaaaaagtatgcatcttaactacgatgcctgactgagtttgttgttttaaagtaatatgcttttaaaacaaagatctctttgcaaaatattttagggttttttttttttttttttttttttttgggcagtttctctgtatagccctgactcttctggaactctctatagaccaggctgcccttaaactcagagacccacttgcctttgtctcctgagtgctgggattaaaggtctctacagacaggccttatttttggtttttaagggtaaaaaaaatgtactaatacttttaaataaagttagggatttctggggcttgggagatggctcagtgtataaagtgtttggcaggtgagaggatctgagtttggatagtcaccactgaaatttaaaacaattgagtgtggctatctcagcgctggtaggcagaggtgggagggtctcttgggctcaccctaagctttacctctggcctgcacaggcatgaatgcacacatgtacacatgccacacacataggagactgagataaaaggatttccttgccatgaatggtagaacagtgcctgcaatcccaggtgaggactgagttgttgaagtagaaggaccaccaagagttcaagggtagcctgggtgagtttccgtctggcctttgttggtagaagatgcccaatttcatccctacaggctgtggagaattgaaagaggtgctaggtctaaaatataaagtggaaagatttgcaaactttttcttccaaaacattccatttcctctggtagttcatctcagagcactttgagcagtggttgtgccctcggtgacatacacgtttctctggagcagctaacctgaagtgtggtaagctctcaggactcatgtggggagtgtaccatgggaaggttcaagactcttagcagaattctactggagccggttttggggcctatgtctgttttgtttttctggttagtttgtttttgagacagggtttcatgtagcctcggttgactttaaacttgccgtgtagttggtgctggccttgaactgatgctcttggtctcccctccccaatcctgagttacaggcatctatcagcatgcccagctctgagtctatcttagttacatatgttttagtgaaacagcaaacctgcagtaagaacttggcagccgtcaaatctatgcttggagttatgtatgttggctaggcccatggtgaaccagagctcagtgttatctataatctcttccctgggcctcgctgcttctcctcataggctcattcgtacctaagatgaagtcctcctggtattttgtggagaggtaaactgggacaacccagcagtctttcccttcttcccccagatgtttgtctaacccttcctgccatgaaacagctcacatcagcttgagattgagcatccccagtgctctgctccacgcagtcttttctctagtctgccacccacttcccaccacactgatcaaagagtctcggaactgaatagacctttccctggggacccttgagatcctaagtgtcaactcaagcttgagcccaaaatatggcagttaggagccaaacgagaaactgtctcaaagcatttcccctctgcaaccttgtgctcaaacccagcctcatgtgtgctagcaagctgcattcccagacctgccaggacacttttgaaagtttgcttagtacttgaattcaagtttgcaagctagctgtgattacactagtcacccccacaatcagatacataagacagcctttatttttctacctaattaaatcattaaagacaaaaagacaaagtttaagagtaaagtgaccacagagcctcctcccctccggtgtcacctgctaggtttggcacatagcagaaactgcagcctgttggaagggcagttgcacagcttgtagattgcacatatacagggcagcccagctctgggacccagcggggctttctatctgctctcttgaatctgagatgggtaacccactgaactttctgaacagaagacagaagagaaaggagagtcgttgccttgaggagaacccctgacagtgcggttttgacgtgaagggcaggtatggaagatctgtgaggaagtggacagcaaacctgggtgcagaatctgaaacgcgaatagctaggtctcctctgtagtgtggagttgcatttctccctagggtgtttatatcaaaagggcagggaatagagcagagggccaaacgtgggcggtgtatccttcatccactatggcaaaaggtgggttgaaatggaggtgtgttttctgaggggacaggttcagagtagatggagagttactgtcatgatgttatttcctgtttgtagtcactttccgctgacagaaactctaaagaggcatctcctgtagccttcatgccaaagaagacacctggcaactgtcataacaactctgacagacattctcagccctggtctccaatgaggaaactacagctcagagacatctgtctaaaatcacaactagtagccagcattaaactagttcccttggatactagtatattgccagtaatgttctttcttccctgctttaaaaagaatgtacttatgtattagactagtaaaaacatagttctcaaaaattggaaaactagggactggagacatggcttggtggttgagagcactacctgctcttctacaggacccaggttcaattcccagcattcttgtggttcacaaccatctgtaactccagtttcacgagatatgatgcccttttctggactttgagagcaactaggcatgaaagtaatgcacaggcatacatgctggcaaaattccatcattttttttttaaagtaaactgagaaaaagtagagtactgttaaaatcctgatgtatttcttgctctttttcaatgtgtatcactaaaagcagatatttgttgagatcttgctttaagtgtttgtgtgtgcatgcgtgtgcatgcttgccattggaagccagaagagggtgatgaataatccggagctagagatgtactccgtgtcctcctgtctctacctcccaagtgctggaataacaggcatgcagcacacacctggcttagccctttttcatatacttcattctgacgacagaacaggtagttactgtcattttagtgatgagaacaataagcacaaagataattaacttgccagaagccacatggattgtgagttgaaacccagataggctacctctggagcagtttctcaccacagctagcgtttggggcagacaattctttgatgcttattgtagaatgtttagcaacatccttggatattgcttttcagataccagtaacatttgaacccagtgtctgtagacactgccatatgtcttctgggactaaagtttccacctaagaaccactggtcttgagccccagcactcaacccctggcctctatagcctcttcctatctaaaatgcacatagtgtccccatgaggtggctctctgggcccctcacagtggaaggaaaaaacagagtcttgtaaaagccagccttgggtgcacacttgtcatctcagcatttgagaggtagaggcagaaggattaggaggttagggtcattcatgactacatttcaaatttgaggccagcatgggctattaactcttctcctgataaacaagatacaaaaacttaaaaaaaaaataaaagcaaggagcttgggggtctcagtcaaataaagcacttgctttgcgagcaggcaggcctgagttactccctagcacccgtgtaatgctggccatggtgagaacgctgggtgtcgtggatggaatgcaagcatggggaggtggaggctcaaggggcttgctggccagtcattttagcttcattaatgagtgatgagcactgtcacaaaggagctagacagcattcctgaggaggacacttgagattgtcctgcctccatatatacatgcaaccgtgtacatttacacgtatacacatgcctccgcatccacatgcaaacatgtacacactgtccacatacatacacatatacacatgcctccacatacacatgcaaacatgtacacatgtgttcataaacatatacacacatgctttcatatacacatgcaaacatgtacactgtccacatacatatacacatatacacatgcctccacatacacatgcaaatgtgtccacacacatatacaaatatacacatgcttccatatacacatacaaacgtgtacacatgtgtccatatacacatatacacatgcctccatatatacatgtaaacgtgtccacgtatccacatacatatatacatgcctccatatgcacatgtaaacatgtacacatgtgttcatatacatatacacatatgcctccatatacacatgcttccatatacatatgcaaacatgtacacactctccacatacatatacacatatatacatgcctccatatacacatgcaaacatgtacacatatgtgtccacataagagttaaaaaaggatgtacaacaacaaaggaaaacgggaaacaggagaggaaagccagttttggagccccttctttctgggtgtgtcagatggatgggggcaggggcagggcaggtgaagtgtgctagtgttgcctgtggtggacaaggatcagagtcctccagagctgtctccactttagtgctttcctttggtacacctcaggggtctttgttgccatagttagctttgtatgggcaggtgttgtcactctctcaagagtctcctgtggtggctctagctggcaagtgtaggggaggcaaccacagccctgagatctgtgcaggcagaccttgtctccatactcgaaaggcatcaaacatccatcaccctccggtaggggtatagctgtgcacatgatgataccggagctgcagggctcccagactctgcagcagtgatcctcatggcagatagtcagtccctaaatggacccacaaactgagcttggactcaggtcctcccaactacaaagtgattcttgactgatgaggtcagcacctagccattcaggggcgctacctccccttgtagggccccctgcccaagcatgtctttgtgtgtcccagctgcccacttcttcacatttgcaccccttggatgtctcctgtgggggaagtggcaggttgattcgtgcttcctaccttgattgccaggcctcaggtccttgggcagctctgttctttttgctgagtttctcttattctctgaactgttcggctgcccttcacaccctcagtgaactcccatcctttgcagtcagtttttaccctgactcttctgcacacaccacagtgcagcttctagtcctctgcctgccttccctacaagtctagcagagccttgtaatttcaagggctctcatgtttttcttttcttttttctttaaagattattttatttttatttctgtctatatttgtatgtgtttgcacaaacgggtagacagaagagggcgtctgatttcctgtagctagagttacaggtaattatgaactgccagatgtgggtactgagaagagaactctggtgtgcaagaacagcaggtgtgtagcagcgttctttaactgtggggccatctatttctccagtctaattttgcctttttttttgtattgttagcaccccgtctttcctggttaactttttgttgttgtgataaaacctgctcaaaagtagtttaggggaggacagggtttaattcaaattacaggttagagtctgtcacagagggaaatccagggcaggagcccaagcaagaacttgaatgagaaggactggttactgctagcttgcagacgcatgcttattagccagcattctcatacagcccaggacgtcctgaccaaggaataatgcttcccacagtgggctgggccccccacctcaataatcaagacagtcccacagtcatgcccacaggccaatctgatctggccattctcctcaattgaaactcccttctgaggttgtgtcaactttccagagttaacttggatgccatccagaagttcttgccagtcccagaatcctcaggcttccctggttccttcaagaagcttagtttcagctccagcattcaagcttccatccattttgagttgctttgtatacctggcaagaaatgggaatttcatttcatcctttttcttgcagataattctgtctttccagtaccacttattgaaaagacagttccttctctgatatgtgtcctgagcacctttgtgaaaactcagctgggtttagttgtatagttgacttgcaggcatgtgtgtttaatgctttatttaagttttgtattacactcctttgggggtgttgctttgcatgccatggcaagaatgtggaaggactctgtcagttctctccttctactctgtgggttccggggatggaactcgggttatcaggcgtggccctgctccccgtgtgtgtgtgtgtgtgtgtgtgtgtgataatgccaatgccatgctgacttgattaatacaacttggctgtggctgcgtggggacttttgtgatttggcatatatacattctgtctcttcctgactatgaagcgtatcactggtattgtggtggaggctgtgctgactctgtagctctctttgagcgttctggacttctaacaatactgattcttctatctgtgaacacaaagtatacttcttttccttctccccttcccctttctttacctcctccgatccctccctccttctgtccttccctttgtgcttcctagtctccttctattgctttgaccagtattttacagttttcagtgtagcaactttcacatcttcgattacatttattcgtagctatttgttttgcagcccttataactgagtttgctttcttgagttctagtttagctgatttgctagtggtgtatataaagtgactgggcttttctgtgtgagccctctagctttgcggaattggctgcattggctcactggttccaatagttttcagggaaacttagtttttcttcaagtgagagcatagtatcagccagccgacaggtgacttgatcttcgctgccttggtgtgtccttgttcctttcttctgcttgggactttcagtatctcactaaataaaagtgatggaaatgggcaccttaccttgctgtaggttttagagaacaggtttcagcctttctcacacacttcagtggttattgctggctcatggtgcttggctttcattgtgttgtgaagtattttctcagttcctaatttgttgagagtttttaactaatgaagtaagattcaactttgttactatagtcaattattcaattattcttactatagtctttatattctgtttattttatttagtgtcttcttacactgtagcctaggctatcctataactcactatgtagcctaggctggcctgtaactcactattgttactcacaactcacaatgtagctcaggctaacctgtaactcaccttgttgactagagtggcctgcaactcaccatgttgtctagactggcctgtaattcactatatagctgttgctgctctcagatctatagtcctcctaactcatttttttcccagtactaagaggcaacacctagcatcctagcacttggggggtggaggcaggaggattagaagctcaggaatatatgagatcctgtctaaaacaaacagacagacaaacagaagaaggaaagaaaattaaacaattcttccttgatccattagtagttcaagaataagttaatatttatatatttgtatagtttacaaagttgtttgttattgatttctagttttactacagtatatttttaaaatatactcaatatgatttcaggtttgtctgtccgtcacttgttgagactgtttcgtggcttatcgcatgtctgtacaggagagtctcagtctttctctctccctgctttctgcccccttgtgttcccttgctctatcttactctctccatatgcatttatttatttatttatttatttatttatttatttaggcagagtctcactctgcagcccaggagagtctcagtctttctctctccctgctttctgcccccttgtgttcccttgctctatcttactctctccatatgcatttatttatttatttatttatttatttatttaggcagagtctcactctgcagccctgcctggcctggcctagaactcactgtgtagacctggatggcctccagtttatggagctccatctgcttctgactcccaagtgctgggactgaaggcatgcccattttatatgctaaactggaaaaaatgtgcctaagatccctagttctacaaaagagaattagtcaattaactctccatctgagaatgctcacaaactactctatggttagtttccggggccctcttctgaccatgagcgaatcatggttccttgagtattttctcctcttccctagactcttgagtatgctaagaaaaccctgcatagctgctatatcatcagccaagtttgtttttttttttattttttaaagctgtatgtatgtatgtatgtatgtatgtttgtatgtatgtatgtgagtacactgtagctgtacagatggttgtaagccttcaagtggttgttgggaattgaatttcaggacctctgtttgctccagtcggccctgctcactcagtccctcctagctccggcccaaagatttatttattattatacataagtacagtgtagctaacttcagacacaccagaagttcagatctcattacgggtggttgtgagccaccatgtggttgctgggatttgaactcaggaccttcagaaaagcagtcagtactcttacccactgagccatctcaccagccccaatcagccaagttctttgttgttgttgtttcctaaaagttctgcttaaccatttttatttattattgttctagaggaggtgatattcatgtgtcctggctcactcgtgaagcagagggcttcttggagttggttcttccctttcccctttattcagttctggcaatggaactcaagtgtccaggctttcaggtaaaacacttgaacctgctaagccaaattgctgcaccccctgcccctgttcctgtgagtgggctgcacatggaaaggttagctatctgtcctcgtcttcatgctctggcatggtttgtactgtcattatagctcgacaggcctgtgtgccagtggatactgccatttcagcactagatggccggcctgagtctgggtctactcaagtccatggtcttgtacattgccacggttttagcactagagggcgatccaaggccagatcttcctgaaatacacagctggtgtatccttcatcatgagacacctataaaggatggtccttccttccctcagtgtttggggctgaggggatgtctatacgcctcatgctcagccctggcttgtggtccaacactgtggagtttgcctgagctctgggcaaaaccactgtcacggtgctatcctcaggctcctgtgatcactaacgctgcagcactgcccagccttccaagaccagtgtgtctcagaatccacccacactccttttcactaaaacatggactttggtgctgagaccctagagatcagaactgttagaaaaacaaaaaacaaacaaacaaacaaaaaaaaccctgttctttaaaaaggagttagattttagccaggtggtgatggtggcagtggctcacacctttaattccagcactcgggagacaggtagatggatacctaagtgtgaggccagcctggtctacaggatagccagagttccaggataaccagagctgcacagagaaaccccatctcaaaaaaacctaaacagggctggtgagatggctcagttggtaagagtacccgactgctcttctgaaggtctggagttcaaatcccagcaaccacatggtggctcacaaccgtccgtaacgagatctgacgccctcttctggagtgtctgaagacagctacagtgtactttacatataataaataaataaatctttaaaaaaaaaccctaaacaaacaaaaacataaattttaacaaagtatttatatctttaaactttaaagatgtttcttattgtatgatgtatgggagtgtgtattccctaatgtgcatgtggaagtcagaggacacctctcaggagctgtttctcccttcacatgagctctgagaccctaacgcagcttctcaggtttacattgctatgtagaccaggctggccttcaactcacagcggtcctcctaagtgctaggattacaaatttgtggcaccacacctatgggagaccttgactaaagaagaatgatgtagttatgagagagcctggagggatggaagctttcctggcctcctaaaatcatttcaaacatgcagaccctgtctgatattttagtgtaggtggtggttagttttgattatcacaagtgattaaaaaaacaaatattgtccaatcatacgtccttaaaaccatatcatgtatcatgtactatagtggccacattaacattagtcctatagtttggacttgttaaggattaatggctttaaaaaaaagatttatttatttatttatttattataaatacactgtagctgtcttcagacactccagaaaaaggacatcagatctcattacagatggttgtgaaccaccatgtggttgctgggatttgaactcaggacctctggaagagcagttagtgctcttaacggctgagccatctctccagcccagataaatggcttttgtgaagggtattgagtaccactttttttttttaattaaataactcacagagtccagtttgtgttgcccgtatatgcatggttgttgggccctccattagagcatggttatcctaccagggatcacaccccagagaaaactggctgcctcccttgtccaccatcaactgtcagtagctcctcacctagggatgaatagatcacacatttcaattaaacatatgcctctgtggataaacaagcagctatggggaatgactttatattcctagttctggatgaggagtccagaaagacccccaagtacagcctgtatggccctctggattcagatcaggccccctgtggtctgtctccctgggcacaaagcttacctagtttggagtgaaactctgaggtgatcaccatttccactgtaagacctagggtatataactccaggatcttttcacttggtaggcaggctcgtgatcccatctggctgataggattgcacatgggccgtccttgattacaggagccatgaactgtagggatgtatgctgccacagccctactgtaattgaattactgctgtcttctcaaataactgtaggtgccgcagtctatgttactattagacagaaaacattttaaactaaagtacataaaaactagcattttgaaaactctaagccaagattggagtttctttttaaaagaaacttaaatggttttggaggcagagtctcagtgtgtcattcaggctggcgtcaagatctttgcttcagcctcccaatgttgggctataggcgtgcactaccactagattaaatttttaaataaatctcagatataagaatgggtattctgccgggcgtggtggcgcacgcctttaatcccagcacttgggaggcagaggcaggcggatatttgagttcgaggccagcctggtctacaaactaagttccaggacagccagggctatacagagaaaccctgtctcaaaaaacaaaacaaaacaaaaaagaatgggtaccctatggtgagaatattttgtaataaaattgtttatgtttgtgaatatttgtaataaaattggtgggtatttcagtaggaaaattcagaattattgggaattttttatatgtgtgtgaatgtatggcatgtgtatgtgtgtgttgcgtgtgtgcacgtgtaccgtgtgtatgtgtgcagagaccagaggatgacattaggtgtctccctttgctcactctttaccttacttactgagacagggtttctcactgaagcagagtgtgctggtttggttaatccagctgaccagtttgtctggggattaggacaaaggcaagggctgggatgataggcaggcaggcccctgtgcccaccgagctctatgtgcgctctggagatccacaactcctgtgtggtaccaacgtggccagcacttcatccacggagcatttttctgtagcacccgtactaaagttgtcaaacctgtaggtgtcatgttgcatgcaaatagaaactaactagccattgcccagcttggctggggtcatccctccataggacacaacgtttatcaagtgtgcccctctggtattttgtttttcttttgacaaggtctaactatgcagctcgggttggccttgatctcatagagatccacttgcctctgcctacccagtgctgaggttaaagacttgcactatcatgtccaacaacccctctattctttgtggttcttttctttcatctcattagcgtccagtcttttctctccactacagatgagcttcaaaaagttagatgtgtaatttacacagacatgatgaacatgaaagaaagaattattcacttacgattgaaggagacatcgagataagggtgcttccaagagcatttgaaggaacacagatctagagacattaaaaaaaaaagatagggggctggagtgatggatcagaatttttattagtttaagaggaattctaagtgtcctttctcttaaattttatttttatgcgtgtatgtacaagagcacatgtgcatgcgtgtctgcaggccaggggacaaccctagttgtcatctccagggacactgtccacctcctttaggtcaggcttgctcaggctggagagagggctcagcagttaagagcgctgcctactcttccagaggtcctgagttcaattcctagcaatgccatatggtggctcataaccatctataatgagatctggtgccctcttctggcccacaggtatacatgcaggcagaatgctgtatacataataaataaatcttaaaaaaaaaaaaagttagcacttaaacagtgtcaactggatagacacagaaccggttaatctcctacaaggcagcaggtgcctccctaacctttggggttatttgctgagctagacaggaatattcaagttaacatataacttcacagtgttctattgagtagtctggcactgctcaatggtaaacagcaaaatcaagtatgggtttgctttgttttccagaaactttatcctttggaaagcccagataaggatgcctcagggtaggtagctcagtgtagggcatttatttgcccagtgtatactagggcctaggttcaatccccagcatgggaatggagaacgtcctagcagaacaacaaagagacggtgtacctttttgtatctgtcacttctaaaattactgtgtataggtgactctagacgtacttattaatttaacagccatttttatttcagaagccttccctgaaagacatttatttccaggctaacagaagctgttgagaacttctactctgggactccagatcgaaaagttagcaggctttcccctggtgctgggtagccgtgtctgaggactcttaaggttcctttctgccttagggtagcagtggaactgagtgatttcagtgtccccttgtcctctcacttgtcttcccctctattcctacatctccagtgtcccagcctcttgaggacacacagcgatcttctgcccacccccactgaagtctagcagggccacgggcaggaggaatttaagttctctctctttatagtctgacttagttaatatttaataagcagttattaattcagagtacctcagctacatgaggcatggagaaaagactagcacctcctccagaacccataattcagtggggaagacagaagcatgcaaagccacctgacgttctctttcttaattgtggctgagcattagggtcacctggggaactctttttttttttttccccttcccttctcccccttgctccagccccgctcgctccagcccataggtttgtttgtttcatttgtttctcattataggtggttgtgagccaccatgtggttgttgggctttgaactcatgacctccgtaagagcagtcagtgctcttaaccactgagccatctcaccagcccccacctggggaaactcatgagacaccctgatgccctctgtgttccagactctttaaactagaatcccagagctgggggataggacccaggcatctgtttatttagaggtctctgtgaaattctagtgtattgctaaactagagcaaaacaaacttggaaaacttacacgaggattacttcagggcaccaccgccatcctggacaggctaatgcactatcgagtcacatttcagcccacgagtgcggaaactatgacctttcattgtaagtatgagaaagtcttaggtcagtttgactgcagaactcttagaaaacgtacactttgggagcctgggaggtggctcagtcagtaaagtactaacatgcaagcatgacaacctaacttggtctcctagaagccatttaaaagtggacactgctgaatggtccagttttctccatggtgcagagtagagacaggagggcccttaggagatgctagctagccagtctgagaccctgtgtcaaaaatacagtggaagggctgaagaggtggctcagtggttagaagcatttgttgctcatgaagctgccccagctttggttcccagcacccacatcatggaagggaaaatagtcatgtacataaaatatatgtttttaaaaaaaaaaggaagtgcagcttatgtagcttccttcaacccatacctccgaaagtattctccgtgtgtgtctgtgtgtgacgtgcatctgtctgtgtgcagacatcagagctgtcttcctcaccctcctctgttttactttttaaataaatgtgggtatggtaagaaagcataactactgagctgcgtggagaatctgcaagttccaggccagccaaggtgacagtcaaaaaagttatgttttcttaccagtgcacaagtcctaacattgacaagggccaccaagctcagtgtcaaataaggtgggtagtgtttttaccgctcctggtgatacacccaaaggactctgtctgtcacagagatgcctgcacactcatgcttactgcagaacaactcaccacagccaagataggaaatcagcctagatgtctgtcaacagaagaataaggacagtgcaatacgcacgcacaggagagtctcacacagccataggaatgaaatgatagccacttacaagaaagtgaatggaagcagagatctagtaacaaaacaactcaggcagacaattatcacttgatttctctctcatctttggatcctagatttcgaatagctacataaaatcattgatatatgtgtgtaggtgtgtatacatatgtgtaggtgtgtgagagacacatgaagcaaaagcaagacttgctgggaggaggcagattcgcaggagaggagagagagggatgctctgggggtgagtgtggtagagcatatggtagagaatggctctgtggagcccagccctatacatagtgctgtgtgcccggtctgtgccatagtggggattctaacgagggctgtcctgttaggaggcagctcacactgacaccaccttaacaggaggcctcgttcttcttgtcttatctagaactaagtggaaaagagtgactatggtttttgctcacagaatggataacgaccagccgcctgtggtgactgccaccctgctggtgccccttcagaacggcagctgcgcggaagcagctgaggccctgctgccccatggcctgatgggattgcatgaggagcacagctggatgagcaacaggacagagcttcagtacgagctgaaccctggagaggtggccaccgccagcatcttctttggcgctttgtggttgttctccatctttggcaattccctggtatgtctggtcatccaccggagccggaggactcagtccaccaccaactacttcgtggtgtccatggcgtgtgctgaccttctcatcagcgtggccagcacgccgtttgtcgtgctgcagttcaccaccgggaggtggaccctgggtagcgccatgtgcaaggtggtccgctacttccagtacctcacccccggcgtgcagatctacgtgctgctctccatctgcatcgaccgcttctataccatcgtctacccgctgagcttcaaggtgtcccgagagaaggccaagaaaatgattgcagcctcctggatcttggacgcggccttcgtgacgcctgtcttctttttctacggctctaactgggatagtcactgtaactacttcctccctccctcctgggagggaactgcctataccgtcatccacttcttggtgggcttcgtgattccctccatcctcataatcctgttttaccagaaggtcataaagtatatctggagaataggcacggacgggcggacgctgagaaggacgatgaacattgtccccaggacaaaggtgaaaacggtcaagatgttcctgctcttgaacctagtgttcctgttctcctggctacctttccatgtggctcagctctggcatccccatgagcaagactacaagaagagctcccttgtcttcacggcagtcacgtgggtatctttcagctcttcagcctcgaaacccactctgtactctatttataatgccaattttcggagagggatgaaagagacattctgcatgtcctcgatgaaatgctaccgcagcaatgcctacaccatcacgaccagctcgcggatggccaaaagaaactatgtgggcatttcggaaatccctcccgtgagcaggaccataaccaaagactccatctatgactcatttgaccgggaggccagggagaagaagctcgcctggcccatcaactcaaaccctccaaacacttttgtctgatttctaagaagtctttcactgttatgtgccagagattaaaaagctttcactataaagtgagaattgatttacttagttttcactaaacttccgttttgtaaaacatgttcactattgattatggttcctgtggattttgttctggttgctttttgctggtcagtagtgctcccactattagagcctataaaaattctttcctgggccggagaggtggctaattggctaagagcacaggttggtcttccaaggactccagcacccacagggcagctcacagccatctgtatttccagttttagggaatccagtgacctcttccggcctctcggaacactacacacttgtggtgcacagacattcacacaaatgaaacattcacacacataaaatttttaaagattttaaatattttttgtttgtttcaaagttttgtttgttttttcgtctgagcaggtaagttggcctaagaacttgagtccaatccctgtaagtcacacgtgaaggagagaaccacttgtaagttgtctctgatttccacacaagtgttgtggcatgcaagcacacgagtgtgcacacacactgacactaaatgtacaagaaaaattgcaaacactttgctattctcgttctgtcactgggtcattacacacaagtcttctatttttttgttctgtcttgctatactatattttgttttaattttcttttccctattgaatttttcttctttttctttttttaaaaaattttcttcctttttttttttttttttttttttttttttttttgagacagggttctctgtgtaaccctagatgtcttggaactcactctgtagatcaggctggccttgaactcacagaaatctgcttgtctctacctcccgagcactgagattaaagacgtgtgccaccactgcctggcagcctgctgaacttttctatggcctactaattcactgacgtcccatacgcattacatttcaagaacttaacttttcccagcctggcgacacagtatgcatttgcatattaccttctggaaaggagtggagaccatacaccagagcccagaagaactggttgggaagctggctgggacgagtttaatcattctttgggagcgagtgcccagtcatctacagtctttgccttttctggtttccatcctaatccaagcagctggggaagccttcaacattcttttatttaaattcatgttatttattggtagtggtggcggtaggctgcacttgaagagatcagagggcagctgcaggcatcaggtctcactgtccaccatggtgtaggttccagggcttgactacaggcaccttctcccactgatccgtcttactggactaagccttgaaagcactctgtgctatttcccacatacatgctgtgacccatccatacgtaccctaggacacgtgtcaccttctctgagtcatacacaagtaaagcagcaagtggcagtgctaggcttgccaaagagaggaatgacatttttctgggctctgcgatcacagacaccctcaactatggctctactgtgacccacaaggacaccaagggcaagatttgacattttctataaattcagacaggaggccttttattgtaatcacatttttttccttacttatgtgaatgtgtgttggggtgcccccagaggccagaaaaaggcactgcatcctgaggttggaattaaggctattgtgagctactgaacacaggtgctgggtgacaaacttgggtcctctataagcacagtatgtgtacctgaaaggtgagctatccattccggcccatgaagttcatctctgccagacaaccccttctctttctagattgaagctcaacttgtcttccaaactcacactctccattgtctgtgtgactcagagcttggttccttggttcccagttgtttaagtttagaaatgaaccagtatattagagaatatttttcattactgggtatggtaacacacactcctaatcccagccctctggagatggaggcagaagaatcaggagttcaaggtcattgttggctacacaacaagttggagtccagcttgggctgagactttgtctcaaaagcaaaacaacacaagacaaaaggaatttagtttaatgaaataagggcttacagacaagcctggtttgcattgccatgggctagttaacacgagctgcagataataagtcattgtttagcagtctacgtgtattggctcatcctttccacaattccacgatgtatttatgggttttgctcttctgtttttgattgggtttatagcccaggctggctacatactcaaagtgattttttttttttttaagatttatctatttttattatatataagtacactgtagctgtcttcagacactccagaagagggagtcagatctcattttggatggttgtgagccaccatgtggttgctgggacttgaacttcggacctttggaagagcagtcgggtgctcttacccactgagccatctcaccagcccctcaaggtgatcttgcttcagcctcacctgcgatgagtttatgatcatctctattcaccagatcatgagactggaacttctccatgaggcagcttgtcagcttggagtctgacagctggtattctgactcgggcgctcctacaaccctgtggcttgttcctcaccatatcagctgtctccttagagaacatgagtggtcccacccagacatgccctgtaggcctgatcacaacctcagtagaacagtacagtcggaaataagccgtcgttctgatggcatcaagatggagtgtaatgagctggctcacacttttctcttggccatagattggctcctcgacctctggtaccgaatggtctgagatccagaaggtagtctgttcttggtgacagagcatcagtgcaggccaggtgtcggggcacacacttcaaatcccagcactcaggaggcaaaacaggcagatctgtgtttaagccattctggtctacatagcaaggttcaggacagccagggctatgtagttagagccaatctcaaaggccaaggaaacccccaaacagagccgttagattttgatctacaatcatccacagaagctgacaggctggcacaccctcattatcagcactcagaaggcagaggcaggaggatctggaatttcaagggttagcctggtctacacaacgtaagctcccggccagcaagagaaaggacaacaaaatataccttcaggcaagcttttaggttgagatgcttccttcaaaggaccaatacaaaggctaataaaaactcattttttcctttcttccttctcctcacacgcttggctaatgtgtctggaatgaaatgagtcagacacctgtctcactgagccctgcattttatggctcagatttcagtggaaaagacccttctggttgtttggctgcttgactgattgattggttttctgttttattttgtttttcttctgcttttcaagacaatgtttctctgtagtcctggctgtcctcaggaccaggctggccttgaactaaaaaatctgcctgcctctgcccacctgcaggcacttatttattttaaagatttattgtatttttatttgtatgtgtgtgtgtgtgtgtgtgtgtgtgtgtgtgtatgtatacacagtcagtgtgtgtattgtagatgtgtgcaggtgcctgtggaggccagaagaggacatcagatcctctggagctgcagttagttgtgagcagctgagtgggtgctgggaattgaacctgggtcttctgggagaccagccaatgctcttaattgttgagctatttcttcagaccctatttaacttaatgtgtgtgtgtgtgtgtgtgtgtgtgtgtgtgtgtgtgtgtgtgtgtgtgtatacatattcatgccaagctcactcagcaagcacaatggctatcttagcttgcttctgttcctgtggtaaacaccatgaccaaaggctagttagggaggaaagggtttattttgcctcacatgtccctatcacagtctatcacgaagggacgtcaaggcagaagcctggagtcagaaactgaagcacagaccagggaataatgctactcactggcttgctcaacttgcttatttacacagcacaggacaaccaacccagtggtctaggctttcccatatccatcatctgtcaggagaatactccaacaggtgtgcttccaggccagcctgatggagatgtcttctccattcgggttcctctttccagatgactctaaataatcggcacagctgcccagctttccttatttgtggatttttgtttctgatacagtctcaagtagcctaaactggtttagaactttatataaagacaaagttagccttgaactcctgactctcctgtttttaccttccaaatactggggtgacaccagtttgcagcaccacatctagctttgttattttatgttttttttagaaacttaatcttttttttttttttggagggggttatttgtcactatggagaccaggcaagactcagactcatatagatctgcctacctttgcctccagagtgctgggattaaagtcatatgccaacatgccccgagtcttaaaattaaaaaggaggaggaggaagaggaggaggaggaggaaggtatagccaaatggcaaagtggtggtctaatatgtaagaattagggttagtccccaacattcccccaacccacacagacttaaaaatcagaaagatgtaggcaggtttggtggttcgtgctttagctcttaggaggttgaagactgtcctaagttggaggtcggcctggactatcatagttgagttccaggccagcctaggctacaaagtaagactatgtctcataaaaagtaaataaataaaagtattaatttagaaggcttggagaaatggctcagtggttaagagcactgactgctcttttagaggtcctgagttcaattcccagcacccaccgggcagctcacaactgcctaattccagttccaggggatctgacgccctcacacagacatatatacaggcagaacaccaatgcacataaaataaaaataaattttaaaaatattaatctaggggctggtgagatggctcagtgggtaagagcacccgactgctcttccgaaggtctggagttcaaatcccagcaaccacatggtggctcacaaccatctgtaacaagatctgactccctcttctggagtgtctgaagacagccacagtgcacttacatataatcaataaaaaaaatctttagaaaatattaatctaaattacatttttttcccagagcagaggaagcctcttaccttttacaagactgaaatcaagccaataagtaaagttaagggtgatctaccattcctggcaaactaagtgggtgagatggttcagctggtaaaggtgcttaccaccaatttgactgagttctgtccctgaacggaaagagccagctctacaaagtttttctttcaccacacacctgctatatggttcttctgctatatggttccccccgccccgaccccaatatattttatttaatatttacttttaatttggtacccagttctgtgtcactcctgcttactgcgacacaattcgtgtgttggagaaaaaaaaaacgtcctccctgcgcgcagaccttgaaaggatgcacacacagcccgcctttgttcaaattcaccaggaagggaagactgaagaatccggacgcagttctgagagacgccgcttggcggcgctgtggctagcgggcagagttttcacccagctactcattggaattcagagaaatcttggtctcttagcaaccacacagccaagcttgcagagcacccagactcagctgtgggttcatcaatcagtgtgctccaaacgcaaagcttctaaacatcagaggaaattccccagcaaataatacccgttacgggcgcgaaatcgctactcaaaatattgttttaaactattttacaaatgtgatcatgctcaaaaggccccaacagaccgccaaatccacagcacttaccgtggcctctccgttttctgttccttttttttttttctttgtaagtcagcttctcatgtatcctgggctggctctgaactccccgatcctcctgcctgtacgtccccagtcctgggattacaggcacgcgtgaccacactagatttttttcattgctggcagcaaccccatctgttgcttggacttggtgcacgctcggtgagctctgtacagaccgagctcctgcctgcccctcggctgctttcataattaggttcagaggacatgcagatgtctccatggcaatacacgctttcccctgagtgggtgcgcatgtgcagggttaaacagacaatttgacttggtgtggaaggaattcactgcaggccagtctcactgacctcaggcctctcagaccctctttaatttttttgagctgctacaatctggtaggttctggacttttcccaagtgtggacatgtcaagaagtgctatctattctttcgcagaagcctcttttaagagggtttttggagtccagtgagatgattcagtgtttaagggtgcttgacaccgagcctggctcctgagtttggtcccttaaacccacaaggtggaaggagaaaacagattcccatcgtgtgtgtgtgtgtgtatgtgtgtgtctattataacccttatctaaacccatgtctataaccccagcatgtggaggtacagacaagagagttaggaattcaaggccaggattggctacaggagtgtgtgggaaaacaaaaaccaaaccaaaccaagtcaaaacaaaggtattgctttagtgactgactccatcagctctgagttatacagtagacgttacagagtttggattgccttcatacttgaaggacgtgggattttagctccccagggtgaccaaatgcaggctgaggaggcagacctggaggtccgaggacatcatgtggtttggagcatgcaacagtcgacatggccttccagcactttactaaccaaagcgtagatgcagaagactgatgctcctttagggaaaggttccagagacgctgcagtaaggtggatactcttcttttatgtagtcatggcaacctggctctggttcccatctctaaacccagcaccggataggtggccacaggagatccctggaacctgatggcgggaaaccagtgatttccaggctcattgagaaaagaaagtgcagaagattgacaagggtctgatgacagccttccctgctctgtgcttcaagttggcctgtacccaccccctgtttaatgaattcctgtctcatttgttaggttcgctctctccctcctcttgagaagagtctatcacagtccctcgaaccctgctcagggtgactttgaacttctgatctgccacctcctgcgtgctgggattgcaggtgttcacaccctgtctgtgtggtgccggggacttttgagctggtgtctgccagacaagcactctacccgtcgagttcagcgcctggcccgttcccgcatttgtcctcaagacgctcccatgatgtcccgctccgggaggctttagagttttcaaagacttttttttttttccatactaggcagagttcctgatctctctggttgaaaagctcatgttctcatggttttgtcctttttggccgggaatactaaatgacgagggtcactctaacaaggcccggggcattctccacttgcatctcctcccaggcctcacagaagagcaatgatgtgaagggatgtttgctgtgtctttctgatattcctttctcttcccgtggctcttgggtttggctgctccagcttgaacagcacgtttgtatcagtattttttctcttctttgttttgtttggttattttaagacaagatctctctatagccctgtctggtccagaactatgtattgatcttcttgtgttttttgagttggcatctcatatagacctggttggccccaaacttgtgatgttgctaagaatgaaccttctaccttcagctaaaagtgggtgggacaagtttaatgaggatcatttcctgtttgttgctgtagtcccagtaggggtgctctggctgtggacctgggtggtctgtcctggccttcagactcagttcagagtcattggtcccagagtcttgaaagtgcttgccaggaagaggttgctgagggactggactgggcttttcccgttcagatctttatccaacagaatagtctgctaggcacagctcactgcctaactccagcccagcccagcccagtccagcccagcccagcccagcccagccatgcttgggaccctgtaacaagcaagtagtagattagttgagtttgtggtgaccccaggattaagaattcaactgaaggctgggtatagtagcatagcccttaaatcccagcactcaaagagacaaggcatgtcgatctcagttccaggacagcctggtttacaaatcgagctccaggccagccagagctgcatagtgaaaccctgtttaaataaagatagaaaagaaaaataaacacagctgatcttctgcctcatggttcctagagtgggacagggctgcaacagtttcagtcacagctacaatgtgtcctgtgccataatctgactttctggacagctccatgctgtttacagtctgagttcctccagccagttcttcaccctctatactctgtgtctcagatgtactgttctgagctgtattgacccccattttggccatttccaggggtgcatcggagcctgactgtccatggtctgtagcattcacctatatccacagagtacacacacctatacccctgctgaataactaccaaactgatgtcactgaacagggagaagaggcacacttacttgggttaaagcaagctgtaaaatgccattattttgcatacttttcacacaggcacccctagtgagttgaggaatataaaaaggtgtgccgattgagtaagttctaggcaggcctaggcaacgggaatggttcaatgagcagatggtaggaggttttcttccatgagggcttattaagggggaactggatctggagatcaggcccatcagacactttaactgagtgactttgtgcagtgcacactcagcaaaactttacatgacagtccagacagattaatgaccacttgtaatcaagtaagacagagagtaaataagtggttcttaaaatgaacctaactaattgaaggctattattgccacaaagagcctccaattataccaactcaaaggataagtataacaatatatagaaaccacctgggaatatcctaacactgcattttgatatgagctcattaaatctttttttaagatttatttattatatgtaagtacactgtagctgtcttcagacacttcagaagagggtgttagatctcattacagatggttgcaagccaccatgtggttcctaggacttgaactcaggaccttcggaagagccgtctgcgctcttaaccactgagccatctcaccagccccaaacacttctatttttgataacttaaatccttacatactgtgaatatttttattttcagatttatttagtttgtctatgggtgtggtcaaaagacagtttgggggagggggctttcccttctgctgtatgtgtgggttctagggatcaactcaggttgtcagtgtggtggcaagcgcctttacctgctgaccatcttgccaagccaatcccgtgttatttaacaggcaggttttcatacccctgtgactcagaaaatggactaaggacccgccccatacatttaaataagaaaggatcatgtgtctgtgtgcttgccttagtgaacgcctatgcaacacctatgtgcaggggctcatgggatctcctgcaactgtagttagttacctgggtgctgggaactgagcctgggtcttctacaagagcagtaagcagtcttcagcacacttgaccgtggaagcagaggttagcccaccactccagttctccccgttctaccatgtggggcctgaagt

SEQ ID NO: 363 - DNA, 1624 bp, Mus musculus
gccggtgattcacgcccactgcggcacgtccttagggatttttcggtcaaaattccacttgactgggacgtggaacacctgcacaaactggatttttgccctatcacgactctgaggaagcaggctgagggctgagggaaggcaaaggggagatatgaatgtgttccgaaggtttcccggtggctcatggcatcctccaaagtcctgcctgcgagctgttcctgaccaagaaaacccgcggagcctgactctgaaatccagtcccgatgaagaatggataacgaccagccgcctgtggtgactgccaccctgctggtgccccttcagaacggcagctgcgcggaagcagctgaggccctgctgccccatggcctgatgggattgcatgaggagcacagctggatgagcaacaggacagagcttcagtacgagctgaaccctggagaggtggccaccgccagcatcttctttggcgctttgtggttgttctccatctttggcaattccctggtatgtctggtcatccaccggagccggaggactcagtccaccaccaactacttcgtggtgtccatggcgtgtgctgaccttctcatcagcgtggccagcacgccgtttgtcgtgctgcagttcaccaccgggaggtggaccctgggtagcgccatgtgcaaggtggtccgctacttccagtacctcacccccggcgtgcagatctacgtgctgctctccatctgcatcgaccgcttctataccatcgtctacccgctgagcttcaaggtgtcccgagagaaggccaagaaaatgattgcagcctcctggatcttggacgcggccttcgtgacgcctgtcttctttttctacggctctaactgggatagtcactgtaactacttcctccctccctcctgggagggaactgcctataccgtcatccacttcttggtgggcttcgtgattccctccatcctcataatcctgttttaccagaaggtcataaagtatatctggagaataggcacggacgggcggacgctgagaaggacgatgaacattgtccccaggacaaaggtgaaaacggtcaagatgttcctgctcttgaacctagtgttcctgttctcctggctacctttccatgtggctcagctctggcatccccatgagcaagactacaagaagagctcccttgtcttcacggcagtcacgtgggtatctttcagctcttcagcctcgaaacccactctgtactctatttataatgccaattttcggagagggatgaaagagacattctgcatgtcctcgatgaaatgctaccgcagcaatgcctacaccatcacgaccagctcgcggatggccaaaagaaactatgtgggcatttcggaaatccctcccgtgagcaggaccataaccaaagactccatctatgactcatttgaccgggaggccagggagaagaagctcgcctggcccatcaactcaaaccctccaaacacttttgtctgatttctaagaagtctttcactgttatgtgccagagattaaaaagctttcactataaagtgagaattgatttacttagttttcactaaacttccgttttgtaaaacatgttcactattgatta

SEQ ID NO: 364 - protein, 405 aa, Mus musculus
MDNDQPPVVTATLLVPLQNGSCAEAAEALLPHGLMGLHEEHSWMSNRTELQYELNPGEVATASIFFGALWLFSIFGNSLVCLVIHRSRRTQSTTNYFVVSMACADLLISVASTPFVVLQFTTGRWTLGSAMCKVVRYFQYLTPGVQIYVLLSICIDRFYTIVYPLSFKVSREKAKKMIAASWILDAAFVTPVFFFYGSNWDSHCNYFLPPSWEGTAYTVIHFLVGFVIPSILIILFYQKVIKYIWRIGTDGRTLRRTMNIVPRTKVKTVKMFLLLNLVFLFSWLPFHVAQLWHFQDYKKSSLVFTAVTWVSFSSSASKPTKIYNANFRRGMKETFCMSSMKCYRSNAYTITTSSRMAKRNYVGISEIPPVSRTITKDSIYDSFDREAREKKLAWPINSNPPNTFV

SEQ ID NO: 365 - DNA, 1635 bp, Mus musculus
aggtggccccgtcggcccccgagggatgtcagtcaggggacgtggaacacctgcacaaactggatttttgccctatcacgactctgaggaagcaggctgagggctgagggaaggcaaaggggagatatgaatgtgttccgaaggtttcccggtggctcatggcatcctccaaagtcctgcctgcgagctgttcctgaccaagaaaacccgcggagcctgactctgaaatccagtcccgatgaagaactaagtggaaaagagtgactatggtttttgctcacagaatggataacgaccagccgcctgtggtgactgccaccctgctggtgccccttcagaacggcagctgcgcggaagcagctgaggccctgctgccccatggcctgatgggattgcatgaggagcacagctggatgagcaacaggacagagcttcagtacgagctgaaccctggagaggtggccaccgccagcatcttctttggcgctttgtggttgttctccatctttggcaattccctggtatgtctggtcatccaccggagccggaggactcagtccaccaccaactacttcgtggtgtccatggcgtgtgctgaccttctcatcagcgtggccagcacgccgtttgtcgtgctgcagttcaccaccgggaggtggaccctgggtagcgccatgtgcaaggtggtccgctacttccagtacctcacccccggcgtgcagatctacgtgctgctctccatctgcatcgaccgcttctataccatcgtctacccgctgagcttcaaggtgtcccgagagaaggccaagaaaatgattgcagcctcctggatcttggacgcggccttcgtgacgcctgtcttctttttctacggctctaactgggatagtcactgtaactacttcctccctccctcctgggagggaactgcctataccgtcatccacttcttggtgggcttcgtgattccctccatcctcataatcctgttttaccagaaggtcataaagtatatctggagaataggcacggacgggcggacgctgagaaggacgatgaacattgtccccaggacaaaggtgaaaacggtcaagatgttcctgctcttgaacctagtgttcctgttctcctggctacctttccatgtggctcagctctggcatccccatgagcaagactacaagaagagctcccttgtcttcacggcagtcacgtgggtatctttcagctcttcagcctcgaaacccactctgtactctatttataatgccaattttcggagagggatgaaagagacattctgcatgtcctcgatgaaatgctaccgcagcaatgcctacaccatcacgaccagctcgcggatggccaaaagaaactatgtgggcatttcggaaatccctcccgtgagcaggaccataaccaaagactccatctatgactcatttgaccgggaggccagggagaagaagctcgcctggcccatcaactcaaaccctccaaacacttttgtctgatttctaagaagtctttcactgttatgtgccagagattaaaaagctttcactataaagtgagaattgatttacttagttttcactaaacttccgttttgtaaaacatgttcactattgatta

SEQ ID NO: 366 - protein, 405 aa, Mus musculus; identical to SEQ ID NO: 364

SEQ ID NO: 367 - DNA, 55086 bp, Homo sapiens
aaagatgtgaaagcctgactggtgtgagttaaaaagagaaagtcatgttatgcatgctgtgtacccacatgaataaattatgcacacacactcctagtctaagcagagggtagatgggttctgatcaggaaaccagtctggcaacaggccaggctgtggccaggggtgagggctggctgacggggaagcaagcatattaaaatggtgccatatattgactgcctttctctactctttcattgcctggttttacactgtttccttcaatatcttttcttaactgtcataaaaaaattatcatactggccaggcttggtggctcatgtttctaatcccagcaatttgggaggtggaggctgaagaatcacttgagcccaggagttcaagaccagcctgggcaacatagtgaaaccctgtgtctacaaaaaacacaaaaatcagctgggtgtgtggtggtgtatgcctgtagtcccagctactggggaggctgaggtgagaggatctcttgaacccaggagttcaaggctgcagtgagctgtaaacatgccactgcacttttcagcctgggcaacagagcgagatcctgtctcaaaaaaaaaaaaattgccatgctgacaaatgaccttatctttaaaagtaaccatttttgcaggatatgctaagagaattagcaaataattagctttgcttgtgagtctctcatttcaactggcaaatgttctgcttagaaaatcactgtagaacagcatcttctgttcccaccattatagactatcttattaaccagataaacagtgtatggctttattataaattctcagcaattttttttttctgagatggagtttcgctcttgttgaccaggctggagtgcaatagcacgatctcagctcactgtaacctccgcctcccaagttcaagtgattctcctgcctcaacctcccgagtagctgggattacaggcatgggccaagatcgcaccactgcactccagcctgggttagagagcaagactccgtctcaaaaaaaaaaaaaaaagatgcatttctatttattcttgacaaaaagcctttcccaatgctgtaatgatggtgtttttctccaaacctcgataatctgctcggatcttctatattggtgtatcaattatatctccaatgtcaaatgcaatttgcaattagttgcctttttccataactcaggataagattgtttgacctagaatgtttccaagtagttttccttcccttcctttactgaagaaacagaaacatccaaaatagttaggcgctctgtggccacaggaggacagaagaggattagtaatgagatagactaccctcccccaattcggaacattcatgaagcaggaatgtaattgacctgctgtgctgtttaaacagcacaggagggcagcacaaggccagaactgtcagccctaatcctgcaactattccaaaccacaactgtatttataatctgcttttctaaatgcatacacaagagttttaatccccaccaaatttaattgaactctaaatttgcatagattctacctattcaacatttttatatcattttcatacactactcacacaataatctgaatttaacaattattttatgatagtattttttgtttttatttttctgagacagagtctcgctctgttgcccaggctggagtgcagtggcacgatctcggctcactgtaacctctgcctcttgggttcaagcgattctactgcctcagcctcctgagtagctgggattacagacctgtactaccacacccagctagcttttgtatttttagtagaggcagggtttcacaatgttggccaggctggcctcaaactcctgaccacaagtgatccgcccatctcagcctcccaaagtgctgggattacaggtgtgagccacagcgcctggccttatgatagtgttttaacagttgtctatacagtcaagttaagtattacaacccttaacaagtgaagtagaacaaaagatcaaaggtgacttctctatagtcacacacgattggttgcaaagtcaagataacaacctaaacttgatccttttccactacacatagctctttcagaaagtgcttcccccgccacatacacaccaacacatacactgtctctatgacttactcactttgacttcagatataaatctatttagtctttaatcttttttgtatcctccaatgaagctaatctaatgctctaaacaaaataaccgcaaagtaggtaattagcacccagtagatatgattggcaagtacacctggttctagtgaagatcccagagatggctcccagtgcacggtattaggaatcctagacatggcagtcatgcaacttatacagtctatagccccttccaagagaaaagtactccaactccaagccactggcttgggctcctaactcagcactatggtttatgatggggcctggtacagactgctctacccaaaagaaagaaaatggttattagctaagccaagaactagaactaggaagtacagtaagaactaggaagtacagtaagaagaaaacagacaggtgcattgagaagacatgtagggaccagcagaatcactatgtgctagagcgaggggccataggcttctatggcaaagatgtctagaattcacagaccttgggaatctttgattaccatttacctgcgaacctttcaaggtcccatagtttggcttttcatgtcctatggctaagattcctgttacacacacgaacacgcactcacgcatactccatatactacttgtggtaaaaagtgagactgtgtctcacaatcaatagaccttacccaaccaccaatgccacagacatagaggcaagttgaaattaggtaatagatcctttccacgtccaatataagggtaatctaacctcagccaagctcatttggaacatgtgatacttgaccccaggtgtacttcattcactcaatatgtatcctttattacctacaatgtgtcaggcattgtgctgagtgctagagttacagagacaaacaagcaccagaaacaaataagacaaagtctctatttttgtggggctcctagctctgtgggaaaagctggaacatcatacaaaaaaaggaaataaattatagaaaatttaaggaaactgtatactgattgcctaaacggtagattctcttttgcacttaagtcatcctaacagctcttctatccaagttcagtttatcagtcatgatgagattcatgtcagtatacggtacatccaagtgaaaagaccagaacaaaattaaatcatcattttttaacacctttatcactggggtgtagaatagtgtaattagagggccaggattaataagttcattatgaccattatttaacaggaatgctgcgttctcaggactttaaatgtgactatgatgttttagatttaagttgaacatcccttactggtttgttttgagtgattatcaaagcagagaaataatgaaaactggtttaaaatagagaaaaaaaacgagaaggcactgagtaaaaggagaatggagatccagaaaactagggtcttttaaaatgagtcatcaccgtaaggatctagatttatcacaggtctatatttaccatggatttaatcataattactgaaactaattttttaaaaaacccaccagtacatactctaacatgtttagcctgactttgtaacactattttacagagtattctgttgcacttttttaaagcactagagatgtgagtcaaataccaacttgtatttagaattttagaaatattctatctaatctgttattctattcctaatagaataagattctattaatattttagaaatattatattatttattctattctattctattagtattctattattttaggatacagcacaattaaattcaacaaatatttagttgtgcctaatttgtacaaaccataaggctagtcatcagaggaattttgaaaagtgaataaaatacaatcactgtcttcagtgggaggagctttattctacatatgcaaattaaaaatattattctacatataaaaatcagacaataacataaacataaggccaaatatgtgttctataaaaagatgatgcaagcaaaatgcttataggagagatcaggaaaagatttactgaagagacagcctttgtccattctttttttttttttttttttgagacagggtctcactctgtcaccaggctggagtgcaatgccatgattatgccatgacctcttcaggctcaagcaattctgccacctcaggctcccaagcagctaggatgacaggcacgcaccaccacacccagctaaagttttcgtattttgtagagccaggatttcgccatgttgctcaggctgctctcaaactcctggagtcaagcaaacctcctgccttggcctcccacagtgctggaattacaggcatgagccacctggcctggcctttgaaatggttctttagaactcaatggattttagctgggagaaaggggtaattgagtaaatcaaatggggcgattaactaaatgttaacttggtgaatagaaaggacactgtccaaaatatcccataattgggtaccaactctttgaaattataggattaggattttctctcccttttgtctactggcagtcctatctcccacaataaaagctttatatgccagatatagtcattattagctaatgggcaagcaacaaatggggagataatgttaatataattcagaaattacattgcttcattcattatttttcccagcacactaacattttggggcaagcagggacaagcttctcacaattaaagagaaaaccttagcaacatataaagatgttaagaaaaaaagcagaaaattctgcaagaatgccttcctttggtgcaaacagaggcttgtttggtggcttcaagagttttttacaacattaagttctgtggtaaactgcaaagtgtaaatgaaggtgcaaaaccattttaccccattgggggaaaactgattgataaaaaagacaaaatcctcgatcggatttttaattttgatgaaactgctcttaattggaattaataccctcaagggcatatacatccaaggaagaatcatgtgccccaggattcaagaaactaaagcagcactgtccaacagaaacattcgacaatttaggttttctgggagccacatttttaaaaagtaaaagtaaaaagaaatgttgaagtgacatttcaacatgtaatcaatataaaatttattgagatttttacattattttttatactaaattcttaaaatcttatgtgtatattttatacttaacagcccttctcaatttggactatcacatctaagtgttcaataaacacagatggctagttactactgtattggacagcatggccctaaaggatgactgtgatattgagtacaagtgtcagagggaatttaattgtgtattttttattagcatagtaatttttatagccctcaactaacaaagttgcaaaggttttgagtgacctgcttctaaccctatatttcccacaagtcctgttatttttagtgcaccattaaaaaaacatgcttgttttctctgtacatacttccctaagcctcccttgaagctaaaggtagtcatatgacatagttctgggcagtaagaaataaagggaagtctgcaacatcatatgggaaacattttttgcccttatgagagagtctaacaaaacaacaacaacaaatagccaggtgtggtggtgcatgcctgtggttccagcttcttgggaggctgaggtggaagaatcacttgggcccaagaagtcaaggctgcattgagccataatcatgccattgcactccaacctgggcaacagagtgagactctgtctcaaaaaaaataaaaaataaaaaataaagggacagagagagagagagagaaagaaagagagagaaaaaagaagagagaggcctcaaggagaaagcttttggccaggtgcagtggctcatacctgtaatctcagcactttggaaagccgatgtgggaggatcgcttgaggccaggtgttcaagaccagcaggagcaacatgaggagaccccatctttacaaaaaaaaaaaaaagaaagaaagctttttttggctcatactctcttttctatttgaaacatttcatatgagaacatgatgtttggaactgcggcagctatcttgtgactatgataatagactctttaatacattgaagataacagaccataaaggtatctctccttatcagagatgtaaatggaatgaagtcagccatgcaaacatgccagtagatggaggcaagggcagagttccctagcaggaagtagagtgcatctgcttcctgtcctcagtgggcattatttgaccagtcacaaaccacatttgcccttctttctcccttttcccctctcgtgctgaagattctcttccctctgattgaaacactgttttagtgatgggatcttgctatattgtccaggctggacttgaactcttgggctcaagggatattcctgcctcagcctcctgggtagctgggactataggcatgggcctgtgccagcagaaacatcctttctttaggtatgacaagagtactgaattacccccaatacttaagacctgagtgcagagctaaaagtaagcaaaatttatttggcttattagggattcatacacaaaccctgcaatttggccctaatatgtatgttttcaatttttttttcttgagacagagtcttgctctgttgcccaggctggagtgctgtggcacgatctcggctcactgcaacctccacctcccaggttcaagtgattctcctgcctcagcctcccgagtagctgggattacaggtgtgcaccaccacgcccggctaattttttgtatttttagtagagacagggtttcaccatgttggccaggctggtctcaaactcctgacctcatgatccacccactgcaacctcccaaagtgctgagattacaggcgtgagccactgtgcctggccaaattcattctttcttttccctggagattaagctaatttcaatgctcatactgactgtgataaaccaaatttttcatcttccctattccctatctcccaaactgttccctatgtattagttaggagtgactgtagaatgctatataaaatgggctgggcacagtggctcatgcctgtaatcccagcactttgggaggccaaagctggtggatcacgaggtcaggaatttgagactagcctggccaacatggtgaaaccccgtctgtactaaaaatacaaaaaattagccgggcgtggtggcacgcacctgtaatcccagctactcgggaggctgaggcaagagaatcgcttgaacccgggaggtggaggtcacagtgagccgagatcaagccatggcactctagactgggtgacagagcaagaccgtcttgagaaaaaaaaaaatgctttaagttatcgatcatgaaaaaaatgtcctatcattcagttaataaggttaaattgtgttgctttaaccaagtttgagtaattggggatgcatatcagattcattatttggcaatttctttcatttgtcctggggtcacaataattcgagaactcagattcacataaatatgtggatacagatggcatcaggtttttcattactttacagtatcagagtaatcacaggggagtatgcccagaatactggctaaagaaatggcatgattaactttttcagctactgacagtggaaattttggtaagtatattttctgagtcacggggcagactaaattaccaatccatcagtcagtttctgttactcaccaaagattttttttcagtgaagaaaaatgttttatttgacaacttactattcttacactataattttcatcacatgtaaatgaactaggagtctcaaagaagtcactgttctttatcagctcttccactcccatacttaattttcattcaagccttctcattatgtgcaatgagagtattcagtttgtttaatactggttgtttgccttgacaaagtaagccagctttctgagttagtcttaatcattaaagtgaacaagatacccattcactttatctgcattttttttttcttcatgatgaaaatgccagttcaatactggcttggaaaaccgattttcaccttaccttaaccaagtcagagtacctctagataatggagcggaattttaaagttacttctcattttggtacaaatttgtgttaaaaggtattcaagctgctggatttactgagttttatcatattgaacgtgagaaaatccagaggctagtttcttgagataaaaggattttctgtgaccgatgctggacacatgcaaagctttcaaaatttggttccatctgttcacatgtccatacatattctctgcttaatttcatatctcttgaaaatcccactttccttttagaaaatttcttgttacaagttgaagtcttcaaattcaccattcaaaaacataacagagtccaataaaattgccaaattgttaacatttatgctcttatccagctctaagataataatgatccaggtttggctgaatctaccagttatttaaggttgttttttgagcacattaaaatgtatcattagaaatccttccataaaaatactttttaaaaagtcactttgcctgcctttttttttgttttcaaacgaatccagtcatatctgtaaaacaagtttccatcagatctcattttataagcaacatcctcttctaagccacctgaaactgactttgaagagctcttcaaaccatttcaaaaatttgtttgttggcttgtgctttcttgggttaatgcttctagagtcgtctccaagtttcaaattttgcatggctgcttttttttttttttttttttttttacttcgcttcaagagtcagtcttaaatcatgtaggttttgcttgaggtttgctcgagcaagaggaccttaggtttggtcttatttgcatttttaccataactaggcctacattctaaataagtaactaaatgccacctatgagtttcattaactgtggctgcttgccactttttagttctggttagggtggtgctattgttttcctcaggttcattagaaacatcttccgtgacagctctgacgcggcaccgatttctgagcgtccagtgttttccctaccattattttctttggtctgaagttgacacttaaactgtccagttttaaacctccgatccgtgttcccaaatgaaaacatgactttcattacgaattacacgtcaagggagcaaaccaaggcgctcggggcggcgagaaccgcgacacagcgcttcgcctggactggtaaacaaaccgccgcgcaggcgcaatggcaacaggacggtaacctgggtagccgccaatgggctttttcgtagagtgaaaagcggaaaagccaaacaaaacgctggttccaaggtgataaactggctgacttcctctatttttacttttttaaaaaattttgtttctgaagaagtagttgtgcggccttctgggcctcgcagagatcttcttcgtggaattcctcggccccagagaaatgccgctagcctgtcggctagttatattagcctaattttttgtcttgatctttttcatttgactgcagcactaatcctaatccactggggcagcaaaaaaaaaaaaaaaaaaaaaaaaaaaaagggcgggtgggatctcaacgccacggaaaaccttcatactagccggccatcaccaaaccacgcgagatctgcctgaggagaagcgccaccccgggagtgcacgtttgcgcatgcgtctggctcatcatttttagcgcgcaaaagtttcaaaactttccgcctagtgagaggcggtccgatttggcccttggggagtgtccgtcgcgttgatctgatggattcacgtacacaacaccacattctatgagattttgcaggcaaaagtccacaagctcgtatggtcatcccttctttccgtttttatattggccgtgaactctgtgaggggaggtttcagcgactgaagtagtaaaggagtgggagcgggagagccgattaatgaggttgtagaataagagagaaatctgaagggacaaaggagttttatttattttttggctggtgaccaagaggatgtgagtgtgagctaaggtaatacagtgggaaggagaagatgggaagatttgagagataaatgaaggcagtagctctgtagcctacctgggaggccagactagaaagaagttgacagtagaggacatttttcttaaaagagtgtgaacttatgcatgtttgtaaacaggcagaaatggcatgcatttagtacatggtgtatataaggtggaaatcgggacgcccctaatggaatggaatgaggaagattctaaaagccacagtcctgaacacaggccgaggtggaattgcgaagaacagtcgcggtaacagaagtcaggaatttgggaactgtctcgagggatctgaccaatctgacctctttttgtctctcaggatatatgggacacctgcaccggcattggatttggccccgcaacatcttaaaggtaccacccaacacctgaagtgtctgcctccttccgatggagcctcctggcccctcccacctctcaccagctttaccctttagccagaatgaaatgtggatttcatggaatgaaatggtggcatttagctaccacattactcagatgtgtcactgacaccttacagaagtacatacttctagcctctagcctcccagttcactagatattagagtccatcttgatatcggcagcaattctatgccacttagctactataatttgattctttgtatactatctggagtacaaggcagaagaatgctgatggaatacgtaattttactccaacaaaggaatggctgataggtaaagagtatcacttcatctgtaagaaaaactaaatatggaaagccacaggattgaagctagcagtgatggagaaggatcccagtgtgaatatatagaatggaagtacttcagtaaagagccaggcatggtaatcacttaccaagaaagtgacttcatttcattttggcagcctaaagtatatcctggcagctgcgctgtatgtgtgaagtgcataggaaaatgctgcaggaaaaatccatggaggcaatggaataggatttcagggttgaagcctgggtgtcttgttttagggagtgggatcatccagctctgagaggcatgacatctcgatatgatgtcatataaagtgtgtacaattgggaatcagacctgggctttgactttagggtctgccagtcactctgtgtgtcctgtctgaatctcagtttctcaatttataaaataaggataatagtgcctgtgccataggattattgtaatgacaaaatgaggtagcatagaacttagtgtaaagtacatgccacctatcagttgaattgtggatgctctgtgcatcgtaggtccgtctgtatttagggagctttaagacaggtactctaccgggtcgggcgcggtagctcacgcctgtaatctcagcactttgggaggctgaggcggtcggatcacaacgtcaggagatcgagaccatcctggcaaatacggtgaaaccccgtctctactaaaaaaaaaaaaatacaaaaaattagccgggcgtggtggtgggcacctgtagacccagctactccagaggctgaggcaggagaatggcgtgaacccgggaggcagagcttgcagtgaaccgagatcacgccactgcactccagcctgggcgacagagcgagactccgtctcaaaaaaaaaaaaaaaaaaaaaaaaaagacaggtactctaccatgcccacacattagaatcaccttgggagcttaaaaaaatcctaatgccctggcttttctctataccaattaaatcagaatctctgcgagtggagcccagacatcagtactttcttaaaaccctccattttgcaacaaaggttgagagccactgctttaagagttccctctagggccaggcacggtggctcacgtctgtaatcccagcactttgggaggccgaggcggggggatcacgaggtcaggagcttgagaccagcctggccaacatggtgaaaccccatctctactaaaaatacaaaaattagctgggtgtggtggcacgcgcttgtaatcccaactactccggaggctgaggcaggagaattgcttaaacccaggaggcagaggttgcggtcagccgagatcgtgccactgcactccagcctaggtgatagagcaagactccgttttggaaaacacgtttggaggaatgaagtttagagcttgagacaggcagataagtagggcatcatgagctctattcaggaggaaggccactgtgataagaatggggttaacgtactaatttgggaaaggtcattgataaagccattagtataattgccaggatacacaggcttagctgtagagatagaagagtgtcagtctcccaagctggtcttttgatctagcacaggcaacacagataatgatgtctttattgcattacacatggtgaatcttgggccatcagcagggctgatggcagtagtgggttggggcggatctttacaacctgcaatacctcattggttggggagggcatcaaggcatgattgaaatgtgtgttcttttccaatgagaggctgctgtacatgggaatgcatgtgcagcagggcattgataatgaagtgttttccggtagcctatcagggttgatgtggcagctctgaccacacaagtggttttgttattattaacagatgagaaaggtgaggttcaagcctgtctttgtagcctttcagggaacacagaatcacttggaatacaagtggcatggtcagcaatttcagcttctaagagacaagttacttgctagtaggacaattctggtttctaggtttataaataactcagaagttgaaatcaccatactactttagttattgaatataagacaaaaaaggtagtgataatggccaagaatatcttttgccacatgaagttacctgtctttaattgggttccttttcttgaaaagcaggcacacatgagtgacagagaatcttcctgggaccgataggaatgctagacagattggtctctgtctttaaaggtttttatgggttagagtgagccaggactagagccaaagacaagtaatgcttcagtttcttaagggctttttcagctgctggaggccagtagtacttttgctcagaaagcaaaggagaaaggggcttaagcccagttggagaaaaaaaaaaacaaaaaaaacaactataattaggtcttttgtgctttgtggatatcaaatacctgttggacctttttcagaaactttcatattgtaccagtatggggttctggttctataaatgagggtatccagtccgtctttctttctgcctctttttggggtacaagaaattaaatttgagtcaggcgcagtagctcacgcctgtaatcctagcactttgggagaccaaagcagaaggatcgcttaagcccaggagttcaagaccggtctgggcaacatggcaaaaccccgccattaacctggctaatattacaaaaaaaaaagacaagagaagccagcagcgagtcatcactggacctgaccaagatgaccactcaaagagaggaatagacttcagcagggaaaagctaaaggtctttctggagttagataagtggccagctggtcaaaggagctatagttgaaaaattcatagaagtagagttttgtccccctaaacccacgtaagtgcccattgagataaggaatcagtctttaatacctgtgaggtacagggaaactgatggcagctcatgttagtaccaacaaagtaagacgtattgctcatcctcctctcaaaccctggagggatcagaaactaggaggggcaagatctaaggaaacaagtcaggaaaaaagagaagtggccacactgttttgttaaatctactacagaaggcacaaactgggaggagggagaaatgcctaaactaagtcaggtgccaacttttgattgttatataggactggatattttagttattaacatctcttaactaaaaatgaccagaaaaagtaatgggaccacccaagttttaattcagggataagagaagaaccagccttgcaaccagacacccttgaagggtgttttcaaagggacagtggaaaatgaaaattaggtggttttaggttaatctcaaaagtcatgcttattcagtgtgctggtacactgtcgctgagcacctactttgctgttttagatcctagaggtataaagatgaattggatgacatccaccttacaagaatctatgaagtcaatgcaatatgacatatgcaatcgtataagtagtatatatgaaaattaaagtactatggtgaaaaggaaaatgtgactaacttattttggaaggatacagagtgggagagaaatagaactacagataagataaaacccagcagggtttgaaaagaggagtagatgttcacaaagaggacaaggcagagaaactgtcaagtctaagccacggaggcaatacaagcagtgtgaagggcatgcttgttcagcaggtgactcaaatggaggtgaaatggaggtcacaggggttgagtttagaccagagctattggcaggctcattctggaaagttaacggaattttagaaacagatgcaccaagagaccagtcatttcatctatcagtcattcctccctctgtttgactttgccttttataaaattgaccaacagccctttttatttttttattttttattttattttattttatattttttagtttgggatatgacctttattgagcttatccaccagcgtggaaataatgtctgtacaaaaccaaatgtttgttactataacttctgcatcacaattaaaatccaaagagttatttaaaaacagtcaactcaatcaaaacccactacttcagaatccatattttctttgaagccacagtaacacttatatatggttaagactcgaatgcagaaatttggttgattggaaagctaattaaacttccaacttgctcaaatagaattacaaaaaggcaaaattgccaacagccctttttagagagtgctgagaagatagtatgggaactcttctccatcctgttctcccagctgtttggatctggctctgtatctgagttaggctgggtcaaacagactctgcctcctaagaatttagagtcagaacattgagagactgggtcactctgacagaagcattgaatttataaggacatgtgaatttcagatccaaggccaccatttaggggcagccattttggggccagtaatacaataagggacaagcagaactagttgatctcaagagaagctggtgaatgcagctaatgaagaaacagagagaattggaggcagtagaccatgtggtctcctagagaaagagagtcagtagctaccttgggtctgaccactttcaggacccttgtctaatctaacgtctggctgccactttttgttcttgatttccctgcacttcctctgagtcataataaatccatctcaacctaaggggattcatttttctccttagacaacagtgttatgtgcctaattatgttctccccttcttaatgttttttgtcctaataaaaccatgtatcttccacattaggaatacacatatatagcaaagacacttatttaactcgctacagatatctcatgaaaatgtaggtcctttattttgtctagagttttcacctattagtcatctattaccgcataacaaaattccctacagtttaatatcttggaagaataatatcaagttcaacagagcttaaaaaagaaaacaaacaaacaaaaacattatgtcatagtttctgtggatcaggaatttgggaacagcttaactaggccatctggcttcgggtctctcacaaagctgtagttgagatgttagctaggggtatggtcactgactagggctggagaatctccttccaaggcagctcactcacaaggttggctagttggtgctggttggtgagaagcctcggtttgctatgtgtgggcctcttcacaaggcagcttgagtttccttatgacgtggtagctggcttgcccagagtaagtaatccaagaaggtgagagccaggtagaaactgtcacagaatcacttctgtcacattctatttattagaaagaagtaactaagtctagcccacattcagggggaggtggattaggtttcacatctaaaatctaatgtggcagccagaccttagatgcattctttgaaggcatatcaaagaatttgtggatgtattttaaaaccaccacaacctgttaggttacaggaaaaaaaaaaagtgtctaatcctgtttcaaatatagttcaattcattcagttcctttagatagtattagtatcctatggatgaaatgtttcatctttcataatacctcccaaagaggtcctgtcacttttttctgtagatgactttcatttgtttggggggaagtgggggtataattacatatccttgtggcactgatgagagagagggtacctcctggcttcattctggacctagagtatgcactgaggtactttcaagtttccaggatgacaccctcatgcagtttgaatatatgtccctgccaaatatcatgttgaattgtaatacccggtattggacgtggggcctggtgggaggtgtttgggtcgtgggacagatccctcatgtcttggtgctgttcttactatagtgagtgaattctcttaagatctgctgtattaagtgtgtggcaccacccccaactctctctcttggtcctgctttcgccatgtgacatgcaagcttctgttttactttctgccataagtaaaagctccctgaggcctacccagaagctgagcagatgtgggcaccatgcctcctgtacagcctgcaaatgtgtacaattaaacctcttttctttataaattacccagtctcaggtatttcttcattgcaatgcaggaacaacctaatacataccccttgtctgcctgatccctggggaacatgctgtcctgtgatgctgaagcctgcagctggtgaactcatggtgaactcgtggcccacctttggattcagacaaatctcccagggagtattggccacctcccctggcagactcagtacccctggcccctgctgtggggttaccttgtcttggttgtggcaggcctactggctgttagttcagcatcatccttcaagagaacagaaaggcttagaataattgattgtcatatctgtgtctgaccatgctattgtggacttggcctgaacagccatagaaatgcaaggaatgaggtttgagggacttgggcagttgtctcaaaaagggagtcaaggcagaaatcccttaccctgagcactgctctcaacatggaggtaactcactgtggtaggcagccttttatttcatgatttgactttttgatgagtccatgctagttctcttgtagaatattatgcattcttgatttggccaattatttcctcataatatcttataacttgtttctccaacccttgcctttttattaaaaaaaaaaactcgacattatatgtacagatttgattatattcgggttaaacatttttagaaagaatacttcagtaacattgagtaggttacatcatttcatgttaggcacataatttcagcttgtctcactattagtaacgctaaatttggtcacttggttaagatgatgaccccccctcccactctcttcactgaaaaaggacacacatccctttgcactttataagtaatctacaaataacccgttcaacaacttttcatcttatactttgaacaccttttgtgatcttttcctgagtcaattatttcactgggggttgcaaaaatggtgttctaactatagtagtctgtatttattaactagcatttttctgtaaagaagaactttctttttttaagagacggagtctagctctgtctcccagattagagtgcagtggcactatcagagctcactgaagcctcaacctcctgggtgcaagcgattctcccacctcagccttctgtgttgctgggaccacaggcacatgccaccgtgcctggtaagagcgttgttttaagaaaaccattttaatgaatttctcagtggaccactgggtagtggtttgtttccaattttgttgaaagcacttggaaagctcttgatttttaaaaggatttgttacctaattattggagctattcactttctcagtactatccccaatattttcagttattcctgtgtttggtccccaggaggtttttaaattcagacaacgcaggatttgaggtaaaggtggaagagagattcagcaatctgtgtaagatggaagaaaagctaagtggaaaccaagaaccagcatgacatctcgactgcaccagttctcagaaaagcagttttagaatgcatacttgtagaagttgaggatctagaaattagttcccataaaactctgcatgctttgggaccccttggaaagtttttacctgaagccagaggtctatagtacagaacactgagcaaagtcttccaggtttggttgatgacaagctaagggcagaaataaaggaatttagagactggctttcaaaacaatagcctggatttcaagcctattgtcttgtttctattttgaatttcagaagccaaatattaatttctttttttccattccttttgtaacatctaaacagtgccaaaacactatctccaaggcaaatggattccccaggcagatgagaagatcacattactcatgttcaaaatattaccccagttgcacaagtattgtggaattttgtgcatttggatggaagacaactgtttctttatcttcttccaatgtcaaaagtaaatttggtgattataactttggcaatatattttaagcagaattagtatattatgtaacatgttttatgaccatccttaataaaattttgggttatgactccttacaagatgattttaaatatcattaagccataatatatacatgcagtcatcctggaaggaataaatatgttggtcattttttttgtctcaaataatttaaagcaatctttgtgatttcttatgtcaaggggccatagtagtaagtcacaacacattaaattgaccagttattttaatctagtctactatgcatgatgcagaatagcatagtacactatgcctgctctggaggctgagtcagtggttccaaatcctagctcccacactatgcagctttgggcacattacttattcccccaagcctccatttcttcatcggtaaaacagaaatgccagtaatagtactcatcttgttgggttgataggattaaatgacataatgtatgtaaacacctggcacatgttaaatattagttgttcttattgttgtaattattcttgactaagagaggagatgatatccaagtcaccaacctgctgactcaaagaatttcttcaatatctaacttttttgataaatgaattttcttaaaatgtcaagtgttaaaattaacagttgaatttctctgagtcttacatagaaaaactagaattaacctcactcctcctaaaataaaagtagaaaatacgatgaggatgttgatccaggaaggaccttcagtttcttgaaaattatactccagcttccttgtgccacctctttgcttacaaagttttcatttctacacattgcaagtcagcattcgtctttcaaaaaataaatattctgaattgctttggttaggattctgagttagaaacaacaagttatatgccagtgttatgagacaaatgtatagccagtttgtatttctgacttggagtaatccaaatgctatccaagtattaataaaatttgtatttatttaaaataatttgacaactcacatttaaaaaattgtcttttcttccatagtgttataaagaatccacacattgttcctagcatcgacagtcaggtgtggctctaaagtatctcccaattaaggctgttaggacttagataatggcttcccaaaagtcagatattctaacctgaggagaaattgatttcttgagttctttccaccaccctgtgatggcatttcagggtcaatctgtgaagctggaattttcattcagttgcacctaactagatttttaaggaaagaagcagtggaggatggggagagtaactattgcagtgtccatactaattcctagattcctttcaagatttaggaccgacagcaatccaatttggctctgagaatactgtttaaatccctcctcagcaattcagtccttttccctcttcctttctttagtcagcaggctcccatggcgaccggttttaaaagaaatcatcctcttcagcagttacctagcaccatggcaactaggacgtcagcaaagcaggatagaccctgcacaaaacagctccaagcaggctccctccctgcctctccagttcagccctgcctgaggcctagggatggggctaatgacatctagacttgtacaccccagaattcctatgtgtttctgtggttttccccataagcatagatatttgggcatgcagtaaactatgttacaggaatctccctcccccccaccaaaaaaaaaaaaaaagaccatatttaaagagtgaggatgggtgatgggatggggacagggaggtaggtatgggatggtcttttgggtttaaggaaatttgaaaattatgtttgtgtttataaggtaacagtaagctgatagtaggggaagtcagagccctaaacatatggtgtggtttatgtttaggcacaggacctcagggaaattttaaaaaatatttttatttacttgagagtgaaatagacaaatggctttaacaagcacttgaagagggtgtaatgctgtccgtggtgctgaacgctccattgtcccagatgtgtgctaagggggatccagaggggaggttaaggaacaccttgccaggtcaggatactgactgtaagaaagaaagagaggggttgaggttaagaaagcatcatttatctcccatactgagcaactctgaatggtcaggataaatcttcagatagaaaaaaaagaaaatagagaaggaaggaggtttgggtgattgaatcttccccttttcatatggagatttttggtctgagccaatcaagacagagatttctgctgctttgctcctgaaaggaaaagtgggggaagggagggagaagatggccacattctccccttcagccacatgatccatttcccatgtgacacattccagagccttggaaaggagaagggaggggcaacaagagagtggggctgggggcgggaagatggtttaacagtctaccctgcacagcgtcatcttgtctccctaacaggaagcaggctgtgagccaaggggaaggcagaggacagaaatgaatgtgtttccaggctttcctggtggtttatggcattctccaaactcctatgcaagggctattcctgaccaagaagatctaaagagaacgtctctgaaatcaagtccggatgaaggtatgtgatagggatcccttggtattgcgactgaaatttggctcagaggacataatgccttctttttttccaggcaatttggagattttgtcctgccttagatgctggttagaggctttaggtttgttaccagtccagaaaagatgcctaggtagttctgtaaaatgaaaattcatcagagtatgtgtcagttgaaaaattggatggaaattgtgtatagtgataattaatgaaacaaagcactcattgatgaaaaggattttttccccttgaagcctggaaagaggggaaaaaattaccgaaaccaactaggtttcatcatcactgtaataaaagctgtttcatcctttttcagctgcttattctatgcccatgttcccagaggttattggcagtggcttggggagctgaagtgggcaggcgtgctgttcctttgtgctgtgcgatcatcttccttctgatgttcctggaaccaggggtgcttgtgattgttcccagctctgatttaggacagtagactgccacagaatttcacatcttgtagaaatgctagcaacaagaccctggggaagttctcaaaggaatctaccaaagttacaggctaaaataatcagccgtgaactcaaattttcatgtctttgactattttcagcacaaagagaggagcccctttaaattttattttgtctttatttaacaaatacttaagaaagttctttctaatgtgcaaggcactgttctaagcacaaacagtcattgaatccttataacaaccctttgaggaaggttttattacccacattttagagatgaagaaacagaggcacagagaagttagggaactttcccaaggtcacacagctagcaaacagtagaagcagaatttggacctacgaaacttgaccccaaagcctgtgctcttaaccactgagctatgctgcttgcctgctcatattatttcaaatgatgtcagcagtcaatttggcttcaaattttgttcagctgacgctactagaagattgaatcagcttgctttgctaaaacagatccccaaagaaatctatatttaatcttaaattatccctgtagtcacattctgtacccccaagtaacccagtaagtaattgccgttctgtttcccttgtgctgtatagatctctgtagtaaaacgctatgttactatggtgaccaattgatatctcaagaaaaaagaaatctagaattatatcatgggttttttaaaaaatcgaacgtagaaacactcttccatcctagaacctagcaaggccagcctaagcatattttctttaaaagcacctacctagttctcaaaataaaatagattaaaaacttctaaaactatgtatataaattataatatcaaactgactggatttattttttaaaatgatattatacctaaaataagggaataggtatcttttgcaaattattttaggtttttaagggtaaaagaggagatttgctaataactttttttaactgctagaaatttctgaggtataaagatttcctttttttgatctgtgtagatttccttctggcctttgataataaaagatgactgatctgattcctataagctatggaaaaactaagaaaagttactagttcccttcagggtttcattgcgcagtactttaagacgtaattgtgtcccctacaatattgaactttagtcttttagcttaagcatttgatccctgctgaaatctacatttttctggaacaagtaacactttgatgctattatagtcacatgaagtgagcttcttgagggatggtatcctttcctctttggatttctagcacttatcaccaggcctggtttatggtgaactctcaatatactcttgtgaatgaagactgagaagactcaaaacaatgacatattctgctggtgccaatttgggagtccatgcctgttttattttgcatgtatttatagagaggacagtgaggagacacatgtgtagtaagaacttggcaacagtcaaaattatgcctgaagtttatatagttaggctggccctggagcagctacaaattacagtttagaaagtatacataaattatttcctggagatcaccaatccccctgacatttttatttatatttagaatgaagttctcctgatattttcattcatatctaaatggaagcacccctaacagtcttattttcctctgatgttttgggtggttccatctcccagcgttgaaacagtttaattcagtttgagagtgaatgtcttgagaagtcaactcctgcctcaggcaattctctcctaatccagtctgactcccagtccttagaactctgtatagaaagctcacaggactgcaggactatttcctagggaactctgggatcttgagtatcagtgtgggttagggtcagactacctttcccaaaccatggcatgattgaagaagattgtcctgaatgaagaagattgtcctggggcattttgaaagcttggtcaggatttaaattcaagttagcaagatagtaaggcttaaagtagtcaccctcctgataatatacacaaacataatctatgatttttccatctaattaaatcattaaggggttgtggataaagtgtgtgtccttgaattctaccagctcatgctgctcacctcaaacattacctgctgagcgagctgcacaaaacagacaacagccctgacggaagcacaaaccagctggcaagtgctacatgccccccacacatgcagggcttctcagataagcagggctagcacacacatgaggcatggatctggaagcctagctgggcttcctacacatccctctggagtctaaaagggggcaacctactcaaccagctaaatgggaggatagaacagagggagagaaagtggagaggcttccccttgaggagaggccttgccaagtatgatttcaacctagaggtgaggggtgaaagcagaaataagaagagggacaatgagcatgggtaaagactatgagaaagtgatacctgggtcctgcctttcggacacaacagcttgcctgcaagtaaaccctgccaaatgagtcagggcctgccaggggaatgatcagatcccttcctagggtgtatgtagggaggggagaggagagagaaggaccagagtgtggacgtagtttcttctccatcagccaaggcaaaaaattggatgacatgggagttgtgctgagaggatggcttaaaaagaaaaagggaggctgagtgccataactcacgcctgtaatcccagcactttgggaggctaaggcgggaggattgcttgagcccaggaatttgagaccagcctaaacatagggagaccttaggccaggcatggttgctcacgcctgtaatcccagctgtttgggaggctgaggggggcagaatacttaaggtccggagttctaggccagcctggccaacatgctgaaaccccatctctactaaaaatacaaaaattagctgggtatggtggcaggtgcctgtaatcccagctacttgggaggctgaggcaggagaatcgcttgaacccggtaggtggaggttgcagtgagctgagatggtgccactgctctccagcctgggtgacagagcaagactctgtctcaaaaaaaaaaaagtcatagggagatctacaaaaatagctgggtgtggtggcacacacctgcggtcccaggtcctcgggagacggaggtaggaagattgcatgggcctgggaggttgagggtgcagtgagcggtgatcgctccactgcactccagcctgggtgacaaagcaagaccctatctcaaaaaacaaaaaataaaaggcaaaagggcagttaccatcatgaatatgtttccctgtttgtggagtcattttcccttggccaaacctttaaagcagtcatctcctggagcctttcctttggtatactctcccagacactgcatgtctgtcatgtttaattctcatagcaactctctatgatatgcattattagccccaattttagctgaggaaactgaagctcaaagagattaacttacctattcaatgtccacagacggcaggtagagtcaggatctgaatccaggtctttttaattctgtgctctttttactatatcacaaataaagttcttttatctgcattcttttaaaacatgtttttggatattagagtaatacaaatatcattctagaaaatttggaaaatataaagcagtataaaaggataatgaaaataaaaatcagttgtgaacttgccacctagaaacaatcactgttaaaatgttggtgtatttcttctcaattttttttcaatgcatataatgaaagcaaaagcaaatatttgttgagcacttgctttgttccagacattgtccttagctcctttcttgtgtaatttattttattatcatagaaaatcaataaagtgagtattgttattatttattctaattttattgttgaagacacccaataagcacaaacatgtaaaataatttaccaacagctacacagattataagcgacttgaaccccaggcaggctgactctagagcaggctttctcaaccttagcactattggcatttggggccagataattctttgtcgtggtgggggtcggggaatgtccttgtcattgtagtgttttgggcttttttttttttttccagagacaaggtctcactctgtcacccaacctcgagtgcagtagtacactcatggctcactgcagcctgaaactcctaggttcaaactcctagggcctaacataccctatcttgtgcttgttagttttttccctttaggtctatgatagtcccacctcaaccttccaaggagctgggactgtaagcatgcaccaccatgcccggctaattttttttttttttttttgatagagacagggactcactatgttgcccaggcttgtcttaaacttctggcttcaagtgatgctcccaccccagcctccgaaagtgctgggattacaagcatgagccactgtgcccaaaccattgtagaatgtttagcagcatccttggcttccacctaccagatgtcagtaacacttccctctctcagacatgacaactaaaaatgtctctagacatttccaaatgttcactgtgaggcagaattatctctgattgagaaccactagtctagaacctgtgctctcagccaccatactatatagcctcttcatattaaaaatgcacataaagagccagacacggtggttcatgtctataatcccagtactttgggaggctgaggtgggcagatcactcgaggtcaggagtttgagaacagccagggcaacatggcgaaaccccatctctacaaaaaatacaaaaattagctgggcgtggtggcgtgcacctgtaattccagttacacatgaagctgacgcacaagaatctctccaacccaggaggcagaggctgtagtgagttgggatgacaccactgcactccagccttggtaacagagtgcgactctgtctcaaaataaaatattaggctggtgcgaaagtaattgcagtttttgccattacttttcatgggaaaactgcaatttgttttgcaccaacccaataaagtaaaataaagtgaaataaaatgtacataaagttattttgttctatatccaaagagagaaataaatcttcaaattgggggcaggccatgaaactttgctggaatgtcaatagtgactttatggatcaagaaaagtgctcattagtagattcttattaaatgcttattagtagactcggagaactagttataagctcacagttgcccagcagagagaataagtgcacttttctctcttattacctttctctggttctctgtgccaagcaccttagccttcaagaatttagatttcatgttatacttgtggcatatcaggaccgtgcatatcaacaaaggtgtcaaaatatattgctatgtcctaaacagagcatgttgcaaataactgcttactaataaataatcattggtttttttaaattaattggaataaatttaagggtatatacataacaatatttttttcagtatgatttcttagatggagattaaagggttggaattacaggtcgagctcctagaattgcacataattctggatatatgggggtatatcacacatatgaacacatttgtgatgtgtctctgaagaagaaaggttgaaaattgcttcataggtgatttttttttttttttttttttttttttgagacagagtctcgttctgtcacccaggctggaatgcagtggcacgatctcagctcaccgcaacctccgcctcccaggttcaagtaattctcctgcctctgcctcctgagtagttgggattacaggcgcccaccaccacgcccagctaatttttatatttttagtagagatggggtttcaccatgttggtcaggctggtttcgaattcctgacctcaggtgatccactcgccttggcctcccaaagtgctgggattacaggcgtgagccaccctgcctagccagcataggtgatttgagtcaacgattactgaaatgcagagaggattgaattaagaagcactgagaaatgatcatttataaactgtctaatatactgaatatatatattatccatgtgaaatatatgaaaatacatgttcagccatgttttcatatagtcacataatttgtccatgaaaaaatacatgttaatgcgatattaaatttaacatctgtggccaggcgcagtggctcatgcctgtaatcccagcactttgggagcccaaggcgggtggatcacttgaggccaggagttcaagaccaacctggccaacatggtgtaacgcagaattgaaaattctcaaataatagagcaaatatacaaatataagtggaaagactttcatttttcattttccatgtctactaaaaatacaaaaattagctgcacgtggtgcacatgcctgtaatcccagctattcgggaggctgaggcatgagaatcgcttcaacctaggaggcagaggttgcagtgagccaagatcgcactactgcactccagcctgggagacagaacgagactctgtctcaaaaaaaaaaaaaaaaaaaattaacatctgcttcataaacttgaaggttgctttctagaaaaccctgactgaggacagtggtacagatcaaaatttacccggaatgttgatgtgaataagatgtgagacagaaggtgaatgctcctgagaaataatgcttagtaacttcctgctcagtgcttatactcgcttcttaacaagtccttcacctccttttcaaatagctgtaaatctcaactacttcgttgttctttgctttgactttagtaagtctagtctttgcctcttgatactgaagtcagaacttagaaatgaaaccaaacatttacctccaaaacaactggttcccactaactcaatgagcacacagcaggtgttcaaaaaatgtttgctgtagtgaattgaatttagtgaggtgcaaattccttggccaaattgttttcttcagaatttgaaagacctcatactgggaagaaacgtgtagaaactgacagaggacactcgggggttctagaaatgtgtctcttctctgagaggtttggtattagatagaatggaaagcaaacacaggtggcaggtcctctttgaccagaccacttcttgcaaggaatcttcagtaagaagttgttgacacatctaggataattactgtggaaagctgggctggaccctaggtaaaattcatctttcctttggagacccatgctactgatccttgatatcaaaaactctcagtgctgggccccagcagcccaaaacaacttccctctcctcccatcaaaatgcactctcaggatgagctctctgccagatgaaagtggtgggttataaattaaattagctcatctcagataacaatgtccacctgtcactttttgctcatagagctgaaatgaccttagaaatcatctaggccaactcatgcatattgtagatatggaaacagaggttcaaggaggttgatttacttaaggtccttatgctgaaataaaaaataagaccggggtctcttgacttgttcagtgcttataatcagaattagaacccaggtttcttagcccccagcccaatgtgtaaggtgaagtagaaagcactatactctttaagatttttggttttctaatatttcaggtgctagtagggtagtagaaggtgatagaatgactggtatgaattttagtactcaaattaaattatataagaaatgctacattgaattagtttctattgctgctgtaacaagttaacacaaatttagtggcttaagataacactgtttattatctcacagttctgtacatcagaagtctgggtgggtttggctgagttctctgcttagagtctcccagggctaaaatcaagatcttagcaggactgtgatcctttttagaggctctgaggttgactgcccttccaggctcagtcaggttgttggcagaatccggtgccttgtggttgtaagactaagatcctatttccttgatggctatcaggtgggagccatcatacctcctagaggcctcatcctggtccctctatgtgggcccctgcatctcagagcctgcaatagcatgtcaattctttctcatgcttggagtctctctgacttctcctgctgctgccagagaaagttccctgcatttaagggctcatgtgcttagattgggcctacctggataatccaggatagtctccccactttaaggttcataaccttaattattatgcagaatcccttttgctatataacataacacattcacaggttccagggattagggcatggatatctttggggaaccattctgcctactactcacattatttcctttaaataacggcaaggctctatcctaccaggctgatgggaacatcaatggcaaacattactgagactctcttccccttcctaggtcctggggttcttacacagaacaaaatctatggggatactttgttcctctcggctccacttatccctctttctctctaacctgctccccacgtgatgatttaggttcttttgtctataaaaaaacctctgaattgcttccaggacaacagactatcacaacagtcctaagtccaggcctcaaggagcctagaacgttgttaaggacctggaacacggctgggacccaaggcggcatgttggctagactctcttgtcatctgtcagcagcaggggtcctggagggtctaccttagatgagccattcttcatcatctctgctgctgcttccattgcctccctgaccccagcccaggggagggtcctcaccatgctctcttatagcagcctactcttctttcattggacttactacaacttaatacattcatttcttcttatctgtttactactctctacccctctacaactaattatactagatcttcatgagggtagggatacagtttggtttaccattgtatatctaattattaacatagtacattctggagtgtagtatgatcttagtgtatatttatggagtgatgaatgaattgattcaaatgggcacaggttttcaaaagagatttttccaaatgtacatattcaatagccaactgatatctctacgtggatatctagtgggaattgaacttgtgtatagtagtattactgatttcaagctccctaaactttttctctcttgctctcaggctctcaaaactaggggtcatccccattccctaaccccatcacatataaactaatcttgttggctctgtctccataatattttcaatattcatctacttttctccacctacactgccatcaccctggtctaagccaccatcatcagcagtggtgtgatcacagcatcacagcttactgcagcctcaacctcctaggctcaagcagttctcctgcctcagcctcccaagtagctgggagcctcccaccacaaccagcaaatttttacttttttttttttttttttggtagagatagggtctgactatgttgcccaggctgtaatagcctttttttttttttttttttttgagacaaagtctggctgtcgcccaggttggagtgcagtggtacaatctcggctcactgcaacctccgcctcccaggttcaagtgattctcctgcctcagcctttcgagtagctgggattacaggcactcaccaccatgctgggctaatttttatatatttagtacagacaggattttgccatgttggccaggctggtctcgaactcctgacctcaagtgatccacctgcctcggcctcccaaagtgctgggtgtaatagcctgttaactattctccctgcttctatgcttggccacctacacagcaactaaagttgtatttttaaaacataaatgtgagtgagggggttaaaaaaaatggcatattcatttcactcctttgcctgaaacctgcgatgaattttccttcaatagactaaaaccatgccctacaatgccctgtgtcatcctacctttgcccacctttccggttatatcaggtatcattttctttggtattcatatgctgtagccacataacaagctcattcctacaccagggtctttgcactcatcatttcttctgcctgaatgttatggcggacttcctgtcgttggggtttcagctgccatataacctcttcagagaacctttctctaaccactccatctaaaaccagaccctgtttcagccagggtgctttcagagatgagtaacaaaactcaaagtggcttaagccataaagacattgtttgcttacttagtaagtctggaggtgagtgtcctagcagcaccacagtgtcagggcactatgtcccggtgagtctcaggacttcccctgacctcagaagataccacccagtgccctgacatcttcatgtgacagtttacagtggcaagaagcagagaggcagtcaggcccatgagaatactcactacacacctctttccttttatcaaggaagaaacatttttccaagaacctcccaacaccctgccaggagactttctcttgtcactggccagaagaagattatattgatgtgaccacacctaactgaaagggatggtggggaaattattatcttacctttttagcctcttaagaggcaggagagggaggagttgggaatggtcattgggtaaccagctaaccagccatctgccattccatttcccgtcaattcttggtccctcattctgttttctttttctacatagcactaatcatttctgaattattgacatttttatttgtttagctgtttattatttgtttcccatgttagaagtaagctccataaaaacagggatcttgtctgtctagttattataatgtctgtgtccccagcaatgaacacaactctggccacactaagtgatctttttaaaaaatggataaatgttatgattgaagactattttgcatatgccatcataacaaaatggtcatttcttagggtgaattttttttttttctttttgagatggagtcttgttctgttacccaggctggagtgcagtagtacaatcttggctcactgcaacctccgcctccggggttcaagcaattctcctgcctcagcctcccaaataactgggattacaggcacccaccatcacgtctggctaatttgtgtatttttagtagagatgagttttcaccatgttggccaggctggtctcaaactcctaacctcaagtgattcacccacttcggcttcccaaagtgctgggattataggcatgagtcaccacacccagccagggtgaaatttttttgcacttgttttttttacattgtatcttacttttcagattttgtgtgaatgtagggaggtagggaagttcagtattaaacctgcagctgtgtcctgtatacacggaactctactaagctactaagcagcagttgggaagagaaatattagatagtattctttatacatccgtgggggtggtcacccccaaagagatgccaacacgacctaacatttttgtcatgcaacattgtttacaaggaattaggggaggactgcagcctgtggtcaacttaaaccttcatgtggggtaaagctcaggctcctttctgttttattcctttgggtagggtagctaccagtggttatccattccttcacaaaactgtcaaggaggtgaagtttatcttcttcaacttcacctttcacccttcacccggcccttctcataatgacaccccatcttaattctctcagttactgatggtcctcacggcttttgcttttggcatctcttctgttttcattttcactaatcgtagatttcagagatagaatgaataggtctcagaaatcactactgataaaatataaaactgaaaaaaatgtacaactggtctttaagaaacatttatattttaatagggatcttcactttaaaggatgatgctgtaattgtgagagaggttgattttttgaattcatgtgaagggtaaagaaagaggcaaatgtgataggagagtaatagtcccttaaatctacataggcagaatttctgagccaggaatgttcatggttgttttaagctattttgtgaagttagaagaagctgttttgaaaacatctctgtttaaaaaaaaattatgttcccatgaaagcatatcgagtttccaaacaaaaagaaaatatacccagtctgagcttgagaaactgcttgatgccagttaggaaacagtttgaaaggtacagagctggattattatggaggaatacttatatatattatataaaaggaggaaaggaaaaagaccagtagagaaaattccaggcctataagcttgtggcaccaggagtttcaggtggtggaaagaagctctgttttcattggtgtgaggttcttttgcaattatttaaaatatctaatggaaacaatttttttttttttgagagggagtctcactgtgttgtctgggttggagtgcagtggtgtaatctcagctcactgcaacctctgcctccctggttcaagcaattctcctgcctcagcctccctagtagctgggattacaggcaccagccgccacacccggctaattttttttttttttatttttagtagagatggggtttcaccatgttggcctgtctggtcttaaacacctgacctcagatgatctgcccacctcggcttcccaaagtgctgagattacatgcccagcctctaatggaaataatttaagcagaatagattctatgggcttttgaaaaaggcgtattcaatccagttgtattatgtattttgatgtaggataccttaaaaagtttgatctggacaacatgtcacataaaatcatccacaacttggagaaaatgtgtttatttatttggcctcaatgatttcccccttaaaaacattgttgtaaatgatgattaggtacccaggccccttcacaaaagccatttacccttgacaaagctaaattatgtgaccaatgttagtattattactatagtatgtgatgtgtaatatggttactaaaatttgtttgtcatatggtttaaaagactaatttttgaagcagttgctttgttccagacacagaactaggtgttttgtagaactgtatataaaaataacacctgttgttttcctcataccaggcagatgcacatgtattaactcatctaagtcctgtgtatattctctcatctagttataataatcaaatgagataggaactgactatcttcattttacagaagaaaactggagctcaagagggttaggtaacttgcccaaggtcacccagctagtgagtgagtgacaggaataggatgcaactgacttcaaagcctacatacatatccactttgcagtatgcctacactgtgagatttaaaacatgagatttttttagcagaagattacattctgggtgtaggtttgccagatttaacaaatgaaaatacaggacaccagtaaaatgttgcatgggatattgcatgggacatacttttacaaaaaaattatttgttatttatctgaaattcacatttacctgggcatcctgtattttatctagcaacctcatctgagtcgacattgtaagaacatgtctcaccctctctgattttcctgttaccccacacagtcatgctggtggctacctagccttatgtagttttataaatcacctaatgttcatatcagtcttttctcagctgggcatggtggttcacacctataatcccagcactttgggaggccaaggcaggaggattgcttgagcccaggagttcaagaccagcctggacaacatagcaagacctcatctctataaaacacacacaagcacacatacaccagagtctttatctcaaggccacacagcaagagagtcagttaggaagcttcagaagagcttgtgtggcctcctgagccatttttaagttcagcaatgtgtgtaagttcaggacttaggataggctgccctgaaagccctgccctactggaagtggtgtgcgggtaaatgtttaacaactggctctgcagaggggggaaaaaaacaaaacttcaatttttggtgtttgccatactcctaccatggctgcttcatgatgccaacatgatgtctttgagcctggagttgggaagaaatgtatatacagttggctcagggttccctatgtaagccagtcccagcccactagtgttacaggcatttctcattttcacatgtaaacaaatcaagcctacacaacaatgaagggtttaccttaaaatctccgtaccgtggtatttcttgaatttaaacaactaaaattttaaaagataatttcctacttgggataatacaattgatcaaattttttcctcatttcaattcaaattgaagtctagaattctgctttcattctgtttaaaaggcaacagttaattatgcagcatgttgaaatgccaatactctcacactctttattctgaagaaaggctatttctccaggccagcatgtctggcgcacttttgatgctaagcttctgtgcagtgcgttgtgggagtgatcattttttaaaactgttcactatgtcacatatttctgagctagcatattgaacagatgtatctgtgggtaggcaagaggctatagggaataactttgtattcctctctttgaatgaatagtcaagaaagacttacccatgtacagccaatttgactctctgaattcagatccagccctctgtggtctcactggtcaggaaaccctgatggtagttaagagcaagggctttggagtgaccactttccaacggtatgactttggggaagaacttcagtttttttcatttgtaaaacaaggccagtaattttacctactttgaggggttacacatataaagtgcctggcacatagtaagcacaaaaataagtattaactcttggtagtattaatgctataactactgtcatgattgtaatcttactgctcattagtaaatacccatatgtatccatgtaggtccagcagatacttcccattctacagaaaatgtttctgtttttttttttttcaaccaaatcatgtaaaaaatcaatattataaaaattcttgtttgacattaaatttttaaacaaatctcaagaaataaaaatggtctttataccttgtgagaatgtttgtgaatctttataatctcaagaggacaaaaagttagttgttagggtatttttagacttaaaaaatagactaactaaaaaacctatccaacagttgatgcagaattgtgaagcaaagtttgtcatccatgccccattcctctctgtggtcctccgctccctcttattagcttccagtcattcatccatccattgcatccaacaaagtatgattttcaaaaagttagaatcatgacttttacaaatattgaatgaacatatgttaaagatttattaacataataccgaaggaaccaatgatataataaagctggttccaagagcatttgaagaatgcatctttataggcattttttaaaaagaatttcagcataagattgctaggtaaacactaaactggctaatgtcctagagggcagtaagtccataacctttggggttattattttctgctagaaagaaatctacaagttaacatataaatatcttcacaatgtctcagctctagtcaaatattaaatagcaaagtcaagcacaggtacattctcccagagagagaggcccatttaagaatgtcccagcaagatcttaagagtatatgtccttttttgccttattttcaagtattggataatttttactaacatatccacccattcatatattcattaaaccttttttaatagctatgtgccccagggatatagaagtaaagacatagtccttatcctcaaggaactcataacctaatgggggagacaaacatgcaaaataaaaattacaaagcaaagtgatagggtacattctcctcccaggtgccccaggatcccatcattacaggggtaaccagtccccagttctttttttttttttttttctaattgagatgcagagtctcactctcacccaggctggagtgcagtggcgtgatctcagctcattgcaacctctgcctcccgggttcaagcgattctcctgcctcagcctcccatgtagctgggactacaggcacatgccaccacgcctggctaatttatgtatttttagtagagacggggttttgccgtattggccaggctggtcttgaactcctgacctcaggtgatccgcccgcctcagcctcccaaagtgctagggttacaggtatgagccaccatgcctggcccccagttctgtgctatgacaacccatctaccattttccccactcatgtattaatcttaaagcttggatgggtgagaagtagataataggataaatgaatgattcctcttttagatcatatataggtagagataaataaggaccttcaatacctcagccaagggagtatgtcaaatggtagtctcagaactggctgggaagagataggtcgaacaggaaagaggtgaagaagcctttcttgtcactgctaaaattactgcatatggatggctctgaacagaattactaattaaccagatcttatatttcagaaacacccccttgaagatatatttttatctaaattaatggagcaggggaggcctttctgaaactttactttgggaccctagaatttagttataatatggcagacttttttctgggaggaaagtgcaagaacctgtctgaggacacctaaattaccttggctttcccttagaagagatatctgtttcatatagcagttgacctggtagcttcagtttcacctgccctgcttttatcaggagtcatgttttcccctatcaccataatccccaatgtttcacctctctgagaatatatagtgattttctatgtgcatttaattctcctagcagaggcacatagagtaagagtcatttatttcagttctctgtccttacagatccaatttagtaaacatctaataagcaattattaatgtaaagaacttcagtggaagctgtagagcatggagaaaaagaataacatccccatctccctactggagtccacagtttattggagaagacagaaacatggaggtatttctaaagcacagatcttaatcttggctacactcaggatcacctgggaactttgaaacatccgacacccaggctgcactccagagcaattaaattaaaatccctgaagctgggactcaggcatcaatatttcttaaggctgcctggaagactccaatctactgtattgctaagctagagaaaaacaaacttggaaaatgctgcagtaaaggactaacaagatgctgtatgagcaagggtaccacaaccattctggatatgctaatattcttatccactgtctgaccgcatttctgcccatgaatgcagcaaatataacctctcattgtaaccaggggaaaaatttagatcagtttgattgtagggcatttagaaactatatactctgggaggcatggtctgaaggaaactatgtttctgaggggaaaagggccccaaaaaagatcaacccagaaaaatgaccccaaaattcaatccacatgctatctctctcccctggaatgttttattcacttgtcttcctgaagaagtcctattcatcctctaagctcccagctcaaactttacctcttctgtgaagcctttccttttcttccccttacccgggcaaaactgggtccctatttttgtcttacttagctccttgtacaaagttctgttcttagcagtgaattataattattatcaaattgagttataatatggcacactgcttacgtatctttgttttctttttttttttttttttttttttttttttgagacggagtctggctttgtgccccaggctgctcggctcactgcaagctccgcctcccgggttcacgccgttctcctgcctcagcctcccggatagctgggactacaggcgcccaccaccatgcccggctaattttttgtatttttagttggacggagtttcactgtgttagccaggatggtctcgatctcctgaccttgtgatccgcccgcctcggcctcccaaagtgctgggattacaggcgtgagccaccgcgctcggccgatctttgttttcttaatacctagcccagtttctcggcttattgaatgaatattcagaactgcagcgattttaggtggagtgagaacttatgccaccagcaggggaaatctagactcaggaactcctcgggctccctcgtcctgtttctgagcattgggatcctctgcttccaagtggttgggctggggaaatgggcagacagactcatgggtgtaaagcagctggaggaaatgatggaagggccccccgcctccgggctttagttaaagcggtgagcttgagtttcatttgcagagttttgttgttagaggaagaaagagacagaaggaagttcacaggttttcaagtatgcgcattaaggaaaagtgcctgtgtggactcctgttttattcaggccacaggcatcccagaaaagttagaacagttttctgtctggggaaattgtctgttttagtttatttttaaactttaaatcttaacaggttttttaaaaagtttaataggttttacacacatgaaggcgaaaagatgatttcaatcttatatgtatgagggtgcagtccagattttctaggacaatgctaattttagatcttatgtcctgatttcttttttttttttttttttttttttttgagatggcgtctcaccccgtcgcccagcctggagtgcagtggcgcgatctcagctcactgcaaccttcgcctcccgggttcaagcgattctcctgcctcagcctcccgagtagctgggaccacaggcgcctgccaccacgcccggctaatcttttgtatttttagtagagacggggtttcactgtgttagccaggatagtctcgatctcctgacctcgtgatttgcacgccttgacctcccaaagtgctcggattacaggcatgagccaccgcgcctggccctgatttcttatatggaaagtgtatggttgctattcttaccattggctatcattttcccagcatgcttaaagatcttttagtagtcaaaatgtttaattatttttgctttctgtgtggtgagcaaaaactttttttttaatttttaaaattttaattatcttacttaagctttcttaagtaaggttgcctcatggacaaaaaagcctaaagataatatagaacaggcattgagtatattgccttgagcactagacttgtattgaatatagctttttggtgaagattatatatattaacacttctttctctaccacaaattagtacaaaaatccctcaaagaaaaaatgagggctgggcgcaattgctacacccgtaatcccagcactttgggaggccaaggcgggcgaatcacttgaggtcaggagttcaagaccagcctggccaacgtggggaaacccggtctctactaaaaatacaaaaattagccaggcatggtggcacgcgcctctagtcccaactactcgagaggctgagacacaagaattgaacctgggagggggaggttgcattgagcagagatcgcgccactgcacaccagcccgggggacggagcgagactctgtctcaaaaaaaagaaaatattagtcattaagaaccgttctttcattatgaactattatttaatcctgactgtcacttgagaaatgtttctttgtgaggtgcagacacaggagcccaccaggaaagaaactagtgactactagaaaagcctgttgctggagccacatccccttgtgccacaggccagatggaatctctgcaaaatggtggctgtaaccccacatgggcttttacttttagtgggcacatttttgaaaatattaatgtttatccttatcttaccttaataaccataattattatggttattatggattaaattgctactgtttctctttttgtttcctggattcagaccaaattaagcctttataatctgtgagcaaaatcacctcaattttaattgaatgacccacaactatttaatctttttgcctatttaaacagtgtgactttttttctcactgaataatacaaaaagtacaaaataaaggctaaactttaaaatattcttttgtatctaagatttgtaagctttataagcttttaaaaagtgcttagtaattttaagttactttttttttttttgagatagggtcttgctatgttgcccaggctggattcaaacttctggaccaactgatcctcctgcttcagccttctgagtagctgggactataggtgttccccactgtgcttagctaacagttacatttttttgttgtttttaatcacctgactgccataaggtctcccgtaacctggttacatttcttagaggacatcttgtatgttcttcagtcagtattttatgaaacaataacaacagaatagcatcaaaatatatgtcactggtaggtggcaagctattagtgcatgaactgtatcgtcttttagaaaaagcaagctattttcagatgtcattaaattaggagctatttctggctcatgtagcagtgttgactgctccatgtgttaccataatccttctgtgatggaaaatctacactaagtaaggacagcacccttcccagtagctagcctgtctacattcacagactgctgttagctacttccatagtcaaaatctgtgtgttttcatctgcccaagctttcctcttttgcaaccttaggacaattaggaacttctcacatacttgcccagaattccagcagatcttcagttggtggtaacaccgttaccatgagccagatttgagatccctaatattctgtgatccctgatgagtgaagggaacaaggatatgtgtaggaggggagctcggtatgactaagggtcaagagaaggtgaggccagagagagcctgagctgagatctgctgaaacagctcctaaaatgaaaacaaagttggggccagaattttttctggatagtagttatgttttcctgccaacgctcaagtcctacacaaagacaaatgacaatcaatgtaaatgtcaaataagatcgttagcctgagtaatcataaccaatctgtatgacacctttttaacaggaggcctcattcttcttttccccaaccagaattaagagaaaaaaagtgaatatggtttttgctcacagaatggataacagcaagccacatttgattattcctacacttctggtgcccctccaaaaccgcagctgcactgaaacagccacacctctgccaagccaatacctgatggaattaagtgaggagcacagttggatgagcaaccaaacagaccttcactatgtgctgaaacccggggaagtggccacagccagcatcttctttgggattctgtggttgttttctatcttcggcaattccctggtttgtttggtcatccataggagtaggaggactcagtctaccaccaactactttgtggtctccatggcatgtgctgaccttctcatcagcgttgccagcacgcctttcgtcctgctccagttcaccactggaaggtggacgctgggtagtgcaacgtgcaaggttgtgcgatattttcaatatctcactccaggtgtccagatctacgttctcctctccatctgcatagaccggttctacaccatcgtctatcctctgagcttcaaggtgtccagagaaaaagccaagaaaatgattgcggcatcgtggatctttgatgcaggctttgtgacccctgtgctctttttctatggctccaactgggacagtcattgtaactatttcctcccctcctcttgggaaggcactgcctacactgtcatccacttcttggtgggctttgtgattccatctgtcctcataattttattttaccaaaaggtcataaaatatatttggagaataggcacagatggccgaacggtgaggaggacaatgaacattgtccctcggacaaaagtgaaaactatcaagatgttcctcattttaaatctgttgtttttgctctcctggctgccttttcatgtagctcagctatggcacccccatgaacaagactataagaaaagttcccttgttttcacagctatcacatggatatcctttagttcttcagcctctaaacctactctgtattcaatttataatgccaattttcggagagggatgaaagagactttttgcatgtcctctatgaaatgttaccgaagcaatgcctatactatcacaacaagttcaaggatggccaaaaaaaactacgttggcatttcagaaatcccttccatggccaaaactattaccaaagactcgatctatgactcatttgacagagaagccaaggaaaaaaagcttgcttggcccattaactcaaatccaccaaatacttttgtctaagttctcattctttcaattgttatgcaccagagattaaaaagctttaactataaaaacagaagctatttacatatttgttttcactcaactttccaagggaaatgttttattttgtaaaatgcattcatttgtttactgtagtttttgtgggttttattttacttgctttttatgttttaggaaaagcgttcactttgaactttagccaacagtccttttactattaatatattagttacatgcataaaaaagaaaatgctttcttactatttactgttggttcaaaaacataaacctaagccatacacacagtctttgattaatgattcaatctagttttattttgttttctttttctcctccttactgaatttttataactatgggcttcagttccaaatgaaatccccgtgtcacctatctcagagatttatatttctttcactaagcaacatttaggatgagttaatattgtataggttgtcacgttaccttcctccaagtaaccactagccagatctgctatggaaagcacgccatatattggaacttgctggcaagtcttctgtggttggattttaatcaggattcttaggggaagaaagcatacgagttgcttaatttctcttgctctttctcttgtttttatccttccttaatctaagcagctgatgaagccttgaaaaatgcaaagttaatgcaatgttttcctcacacctgtgtcccatctaggctgtgtctaggacattcacctcccatttttgagttatatacaagtaaatgagcaggtgctgttgctagcatatctaaaaaatgccaaagacagaaatgacagatggcatttctctgtgctctgcaattcaagccgagactttcagctgcccagcactaccctatacaccaggacagcaagggcaaggactgtcttcctcattcttgtagaaactggaggccatttctctagccagagcctgttctccctcatctctctccagagcacagcaccataccctggccaacctcaaactcttctttgcctgtgataactagggaatttttttcctctggttcccagatctccattatttcaaatcgaggaccagccagcacatttaaaaaatgtttttatttaaacaataaagggtttacagacaagactggtatgcattttcacgccctagttaacaagagctgcaaataataactccagttgttcagcaattctacatgcattatctcctttatcctctcaacaattctgtgatatatttattatcatcccttttatagatgagcaaactggaactcaatagttatgtgacctgcccaagttggaatgtgacagagctggtattcaaactcgagcctctaaccgcatgtctgtctgttgctctttccttgacatttcagatgtctccctagacgacacgaggcgccaaacccatccaggccctgaaggggcctcctgaccactgccttggtggaagtcaaaggtctaagagaatgtggccattcttttttctttttttaattttttttttttttttttttgagacagagtctcactctgttgtccaggctggagtgcaatggcgtgatctcggctcactgcaacctctgcctcccgagttcaagtgattctcccgcctcagcctcccaagtagctgggattacaggtgcccgccaccatgccaagctaatttttgtatttttaatagagacgggggtttcaccatgttggccaggctggtctcgaactcctgaccttaggagatccgcctgccttggcctcccaaagtgctgggattacaggcacgaaccaccgcacctggcctcttttttattttcaattttaaaaaatcagctgaatttaaggttcactggtgattcttaaaaagggtctagttgaaatgtaatgagctggccttcacctgttccttggctgtagctaggttcttggacttgtgctgcggaatgtttgcaataaggagggaaacctgtgccttcctacctcccagacacaggggaatgagacaagattacgttttgatatttggaacaaagaataacaaaatatttaatctacaaaacatttacagagctgatgtttttaagttgagatgctttgttcaattgcagattccaaagagagaaataatatatcatatttttctttctcccttttcccatcctcctcacattcttatcccatcagcaaatggctctaaaacagcaaaatgtgccagatatttacctcacttagcccttgaatttcatggttcagacttgttaaaatgtagaagagatccctgccgtagttttattgtctttttaagtgaaatattattttttcgagttacagtgtgaaaagtttaatttgtttccattttgtttttatatatttataggtctcggtttaaactgaaaagaattacactaggtgatttctaagctctattgtgtctaacgttctgggagtttactacagtaggtggatattcagtgagacaatgtgatacaagctcttgtgtaaacagtttgttttttttttctttttgagacagagtctcgctctatcacccaggctgcggtgcagtggcacgatctcagctcactgcaacctccatctcccaggttcaagcaattctcatgccttagcctcccaagcagctgggcctacagccatcacacccaactaatttttgtatttttagtagagacagtgttttcccatgttggccaggctggtctcaaactcctggcttcaagtgatccacccgcctcagcatcccaaagtgctgggattacaacacgagccaccatcccggccagaaggtattttttaatcccccaaataatgacaaattaagagtattaagtcacagtcaagagagccccaaagtcgtgtgacctgtattaattcaactatgttctctcagggtgttggtaattcactgtatttttgtttagcttaatattcagcattcctggtgtttctcttatcctgaatttggaagaggctttacataatgcacagatggatgaaaatttgcttaagtccctcaacacaagaacagcattcactacatctcacatttactccacaagaaccagaattaagccacagggagacaatgaggtgcaccacacacccagaatcatgtggcccttcaaacaggagtacaagaaaggaaacagttggaagcaggctccacagtagaggcagttctcctacctggctccaggttctcgtaaaccgtcggtgaggagggaagggacagggatgcatcctttgagtggaatctgaattctccctttcttctcatcttcatcgaatacgttaatgtccagcctgctgctgagtcaataagcacatcctgcacagatgcgcttgcctgtgagcctttcatcacaggcttagcccccatgcccggagctgataccccgggccagacttctccctcaggaatgacaattttatccttggtggaggcccatctccaccaagcatgtggggagtggagtcgtttgccagagagtgctggcaatttcacctccccctgtgggcacagaccctcttccgcccttccatctttgctgccatttgcacaagctcactctgaagtcacataaccaggctcagctggggagacctgaccaggatccgcttccaggttatgctcctctaaaaaccatatgtaaaagaagcaaggaattagacactttcagagcagaagggatgttgggagacccaggccaagcccttcattagttagaagcggaaattgagaccaagagatgtgaagttagggctaacctgcaatgtcccctacccaccggttaaactttctttctttctttctttctttcttttttttttttttttttttttgagacggagtctccctctgtcccccgggctggagtgcagtggcgcgatctcggctcactgcaagctccgcctcccggattcacgccattctcctgcctcagcctcctgagtagctgggactacaggcgcccaccatcatgcccggctaattttttgtatttttttttttttattttagtagagacggggtttcaccgtgttagccaggatggtctcgatctcctgacctcgtgatccacccgcctcggcctcccaaagtgctgggattacaggcgtgagccaccgcgcctggcctcaactttctttcaactttaccatttggcttgctgtggctttatttatatatttatttatttattattattcaagatggagtctcactctgtcgcccaggctggagtgcagtggtgcaatctcagctcactgcaaccaccgcctcctgggttcaagcaatcctcctgcctcagcctcccaagcagctgggactacaggcatgcgtcaccacacccagctattttttgtatttttaatagagacggggcttcaccatactggccaggctggtcttgaattcctgacctcgtgatccacccaccttggcctcccaaagtactgggattacaggcgtgagccacagcgcccggcctgattcatttattttttaatacattagttttatttattcctcagcactctgggaggccaggcaggcagatcgcttgagcccaggagcttgagaccagtctgggcaacatagtgagacccctcatctctacaattagccgggtgtggtgcgtgtgcctgtagtcccagctacccaggaggcggaggttacagctgagatctgccactgcactcatcttggctcactgcaaccttcgcctcccaggttcaagtgattctcctgcctcagcctcctgagtagctgggattacaggccccgtgccaacacgccctgctaatttttttgtatttttagtagagacggggtttcaccatgttggccgggctggatgtattcgatttttaaaaatccaaactgtgtgcaggagaatatgaaaggaatacataagccttcactgttcatttaacctgctaattcatctgtgaaaatgatgaccttagagtgccataattagagaacagtggaaacaaaccgacttcctctaacagttttccagaatgaccgcttgatggcactgtgacttgtgggcagagcccaccacctcttcacgatgcctgtcacactggcgaattcagggaagtcctcgtctcatagcaacaagacagggaaaattgctgagcacccagaagcagctgtagattaagtaatcaatcagtgtgttcaaaacacaaagcatttaaacactggaggaaattccaaaataatacccttttcagacatgaaatcactagtcaaaatattgttttaaacccattctacaaatgtgatcattttcaaaaaactccatcagaccaccaagctggcattagtgccacccacacttgccagggcctgtcttttccttttccgctcttttcatcattgactcagagaattcatggactttttcatcgcagtgtatctagagtttccctacaagtgaatgttcatatgctgctggtaagcaggcagttaaatgtattttaaagtaagcccctacaatccgggccattctgaacttttttggacaattgaacacttcaagagctctatattttctttctcagaagaagcctcttttataaatatatatatatattttattttttagtagagatggaatcttgctttgccgcccagggtagtcttgaactcctggcctcaatgatcctcctgctttggcctcccaaagtgctgagattacaggtgtgagccactggcctggccagaagaagcttctttaaaagaattgctttacagactctctgtgaaccctaattaagttctatgtgtagggttatgcaatttggattcaccaataatttgaagaatgtgtgagtttagttccacagaagaaagacctccaacaaatgctgggctctgcagtgaggagttcgcatgtatctggtttgaggattatgatgcaggtctggaggtctgggaacataggctggttcccagcaggcagtcaggaaggcagttccagttatttacccacaacccctagatatagattcaaactccttgaggggaattctgaatgaatcctctctattctgtttccctgcagtatcttccaaagaacagtctcctttaaaagactactgtacatttggccagcaggaccctgactatgcttgctcaggaaggacaataagaccatagcatagaccgctggacaacaaaatagtagctgtgaagagttgcatggtggggaggatggcagcacaacagctgagaagaacggatgggtctctgctcatcagtcaagggtcatttcacttccatgctatctggttctctaagcagatgcactgcacttgaatgaccctttacaaatcagaaaaaaaaaaaaggtacaaaactccagtgagataggcagccagcacagttgtccttagttacagaatagtataatggttattttcaagggctctggagccaaactttttgggtccatgtccaggttctgcttaccagctatttaagcaaattgttctcagaccccgccttctccatgattaaaatgggggaaataacagaacttacccatattagggttctccagagaaacggaaccaacaggaaatatgcatagatgatggttgggtggagagttactcttaggaactggttcatgcaattatgggtgctgctggcaaggttgaaatctgtggggcaggccagcaggcaagatttgatgctgcagcctttgtttgtttattttttggagacagggtctcactttgtcacccagactggctggagtacagtgacacaatctcagctccctgcagcctcaacctcccatgttcaaatgatcctcctgcctctgccctccaaatgtaatagctgggactacagttgcacaccaccatgtccagctaatttgtcttgttttgttttgttttggggctttttttttttttggcagcttaaaaccacacacatatatgatctcatagtttcagtgggtcagaaatctggacacagtttaactgcttaacagtgaatcttctgattcacaaggctgcaatcaaggtgtcaaccaggatggggtctcatctgaaggctcaactgagataggatctgctttcaagctcatgtagttgttatcagaattcaattcatcaagggcctcagtcccttgctggttgttggccctcaactccttgcacatgggcctctccagtatggcagcttgcttcataaagcatcaaacgagaggggctgctatcaagacagaagttgctatcttatgtaacctaagcatggaagtgacattccatcacctttcctgtgttctgttggtcagaagtgagttatagctcttgcccatactcaaggggaggggccaagcaagggtgtgaatatcagaggcggggaaatgggggccattttagaggctgtctgccccaacaaaatgacatgtggtgaaaactaaatctgtctcttaccctaggcttgtctcccagtacctctctctagaggtaaaggttattgagtttgttgttgttgttgttgttgttgtttgtttgtttgttttttgagatggagtctcgcttggtcacccaggctggggtgcagtggtgtgatctcagcttactgcagcccctgcctcccaggttccagtgattttcctgcctcagcctcctgagtagactagctgggattacaggcatgtgccaccacacctggctaagttttgtatttttttagtagagatggggtttcaccatgttggccaggctggtctcaaactcctgacctcaggtgatccgcccacatcggcctcccaacgtgctgggattacaggcgtgagccaccatgcccaacccttattgttttaatgtacatttctttatgagtgaggttgaatagctttttatatttaaaagcaactctttttttcatgtcttttgcctgttttcatagtgaattgtatatcagttaggtcgcttttgattttaagtgacagacccaaattgacaaaagaatgaactgctcccctaactaaaaattgtgggagtagaacttcaggcataactgtatttgagactcaaacaatgtcatgatgaagtggcctcactgtctggggtgatttcctaggtttgttgtctcatgccaaggaaatcaaggacatggacacactaggagtgaggttaagagctgaggcttaacaggcaaaagaaagagaagagctctctcctgcagagagaggggtcccgaacaggcacatgcagcaggttttataggtgagcttgaggaggtggtgtctgattaacatagggcacaaaagattgcatggaccaggtgtgccatttgcataaggtgtgaaaaactggttagagctaggggtgccatatgcatagggcacaaaaaggtggctgcacccaccctaatcttttattacgcagatgggttatttacctggccggtgccatgttgcctgtttctttactgtacacatggtaacaaagaaaagggaagatggagcctccatgccgaacatacctggttcccaggtagccctcttctattggcacagatgctggcattcacccatgtaaacttccagttgcttatctatttttgcagctcaatttttcaagctgtccttagttagaaaaaaataatttgggggctgctttttgttaaaagggaaattctgccaaagactcgtttaccctatctgcctaaataatttctttctggttcctgtatcagtgagagagttggtactctctctgccctctgccttgaagtagcttggctttactgggagcaaattagagtagcagctctatcccctacagcttttcatatgccaagttcagcaggaaagagctaattcacttctcacagatatcataaaagctgcagaattgagtctctttgattctgattggctggacttgggtcaggcccaacccagtcactaaaccaatcattttcacctcgaaaacatgatggtctaattatttcaggaaaatactctgtcattttgaagtagattgtattagtctgttctcacattgctataaagtactacctgagactggataatttataaagaaaagaggttgaattgactcacagttctgcatggctgtacaggaagcatggctggggaggcttcaggaaacttacaatcatggaggaaggcaagagggaagcaggcacgtcttacatggctggagaaggaggaagagggcaggggaggtgccacacatttttaaacaaccagatcttgtgagaactcactcactattatgagaacagcaagggggagatctgcccccatgatccaatcacctcccaccaggcccctcctccaacagtagggttacaactcaacatgagatttaggcggggacacaaatccaaaccatatcattccacctctggcccctcccaaatctcatgtccttctcaaattgcaaactacaatcatcccttctcaatagtcccccaagtcttaactcatatcagcattaactcagaagtctgcagcccaaagtctcacctgagacgaggcaagtcccttctacctataagtctgtgaaataaaaaacagtgagttacttctaagatacaatgggggtacaggcattgggtaaatacaccctttccaaaagggagaaatcagccaaaacaaaggggctacaagccccatgcaagtctgaaacccagcagggaagtcattaaatcttaaatctccaaaataatctcctctgactccatgtctcatatccagggcacacttgtacaaggggtgggctcccaaggccttgggcatctctgtccctatggctctggagggtacagccccctcggctgcttggctgctttcatgagctggggttgagtgcctgtgcttatccaggcatggtgcaagcaggtctccagaaatgtctttgaagcattttccccattgtcttggctataaacattgggctcctctttacttacgcaaatttctgaagccagcttgaattcctccccagaaaatgggtttttcttctctaccacatggtcaggctgcaaattttccaaacttttatgctgtgcttcctttttaaa

SEQ ID NO: 368 - DNA, 2149 bp, Homo sapiens
gtgtccgtcgcgttgatctgatggattcacgtacacaacaccacattctatgagattttgcaggcaaaagtccacaagctcgatatatgggacacctgcaccggcattggatttggccccgcaacatcttaaaggaacaacctaatacataccccttgtctgcctgatccctggggaacatgctgtcctgtgatgctgaagcctgcagctggtgaactcatggtgaactcgtggcccacctttggattcagacaaatctcccagggagtattggccacctcccctggcagactcagtacccctggcccctgctgtggggttaccttgtcttggttgtggcaggcctactggctgttagttcagcatcatccttcaagagaacagaaaggcttagaataattgattgtcatatctgtgtctgaccatgctattgtggacttggcctgaacagccatagaaatgcaaggaatgaggtttgagggacttgggcagttgtctcaaaaagggagtcaaggcagaaatcccttaccctgagcactgctctcaacatggaggaagcaggctgtgagccaaggggaaggcagaggacagaaatgaatgtgtttccaggctttcctggtggtttatggcattctccaaactcctatgcaagggctattcctgaccaagaagatctaaagagaacgtctctgaaatcaagtccggatgaaggaggcctcattcttcttttccccaaccagaattaagagaaaaaaagtgaatatggtttttgctcacagaatggataacagcaagccacatttgattattcctacacttctggtgcccctccaaaaccgcagctgcactgaaacagccacacctctgccaagccaatacctgatggaattaagtgaggagcacagttggatgagcaaccaaacagaccttcactatgtgctgaaacccggggaagtggccacagccagcatcttctttgggattctgtggttgttttctatcttcggcaattccctggtttgtttggtcatccataggagtaggaggactcagtctaccaccaactactttgtggtctccatggcatgtgctgaccttctcatcagcgttgccagcacgcctttcgtcctgctccagttcaccactggaaggtggacgctgggtagtgcaacgtgcaaggttgtgcgatattttcaatatctcactccaggtgtccagatctacgttctcctctccatctgcatagaccggttctacaccatcgtctatcctctgagcttcaaggtgtccagagaaaaagccaagaaaatgattgcggcatcgtggatctttgatgcaggctttgtgacccctgtgctctttttctatggctccaactgggacagtcattgtaactatttcctcccctcctcttgggaaggcactgcctacactgtcatccacttcttggtgggctttgtgattccatctgtcctcataattttattttaccaaaaggtcataaaatatatttggagaataggcacagatggccgaacggtgaggaggacaatgaacattgtccctcggacaaaagtgaaaactatcaagatgttcctcattttaaatctgttgtttttgctctcctggctgccttttcatgtagctcagctatggcacccccatgaacaagactataagaaaagttcccttgttttcacagctatcacatggatatcctttagttcttcagcctctaaacctactctgtattcaatttataatgccaattttcggagagggatgaaagagactttttgcatgtcctctatgaaatgttaccgaagcaatgcctatactatcacaacaagttcaaggatggccaaaaaaaactacgttggcatttcagaaatcccttccatggccaaaactattaccaaagactcgatctatgactcatttgacagagaagccaaggaaaaaaagcttgcttggcccattaactcaaatccaccaaatacttttgtctaagttctcattctttcaattgttatgcaccagagattaaaaagctttaactataaaaacagaagctatttacatatttgttttcactcaactttccaagggaaatgttttattttgtaaaatgcattcatttgtttactgt

SEQ ID NO: 369 - protein, 430 aa, Homo sapiens
MKEASFFFSPTRIKRKKVNMVFAHRMDNSKPHLIIPTLLVPLQNRSCTETATPLPSQYLMELSEEHSWMSNQTDLHYVLKPGEVATASIFFGILWLFSIFGNSLVCLVIHRSRRTQSTTNYFVVSMACADLLISVASTPFVLLQFTTGRWTLGSATCKVVRYFQYLTPGVQIYVLLSICIDRFYTIVYPLSFKVSREKAKKMIAASWIFDAGFVTPVLFFYGSNWDSHCNYFLPSSWEGTAYTVIHFLVGFVIPSVLIILFYQKVIKYIWRIGTDGRTVRRTMNIVPRTKVKTIKMFLILNLLFLLSWLPFHVAQLWHFQDYKKSSLVFTAITWISFSSSASKPTKIYNANFRRGMKETFCMSSMKCYRSNAYTITTSSRMAKKNYVGISEIPSMAKTITKDSIYDSFDREAKEKKLAWPINSNPPNTFV

SEQ ID NO: 370 - DNA, 1438 bp, Homo sapiens
gaggcctcattcttcttttccccaaccagaattaagagaaaaaaagtgaatatggtttttgctcacagaatggataacagcaagccacatttgattattcctacacttctggtgcccctccaaaaccgcagctgcactgaaacagccacacctctgccaagccaatacctgatggaattaagtgaggagcacagttggatgagcaaccaaacagaccttcactatgtgctgaaacccggggaagtggccacagccagcatcttctttgggattctgtggttgttttctatcttcggcaattccctggtttgtttggtcatccataggagtaggaggactcagtctaccaccaactactttgtggtctccatggcatgtgctgaccttctcatcagcgttgccagcacgcctttcgtcctgctccagttcaccactggaaggtggacgctgggtagtgcaacgtgcaaggttgtgcgatattttcaatatctcactccaggtgtccagatctacgttctcctctccatctgcatagaccggttctacaccatcgtctatcctctgagcttcaaggtgtccagagaaaaagccaagaaaatgattgcggcatcgtggatctttgatgcaggctttgtgacccctgtgctctttttctatggctccaactgggacagtcattgtaactatttcctcccctcctcttgggaaggcactgcctacactgtcatccacttcttggtgggctttgtgattccatctgtcctcataattttattttaccaaaaggtcataaaatatatttggagaataggcacagatggccgaacggtgaggaggacaatgaacattgtccctcggacaaaagtgaaaactatcaagatgttcctcattttaaatctgttgtttttgctctcctggctgccttttcatgtagctcagctatggcacccccatgaacaagactataagaaaagttcccttgttttcacagctatcacatggatatcctttagttcttcagcctctaaacctactctgtattcaatttataatgccaattttcggagagggatgaaagagactttttgcatgtcctctatgaaatgttaccgaagcaatgcctatactatcacaacaagttcaaggatggccaaaaaaaactacgttggcatttcagaaatcccttccatggccaaaactattaccaaagactcgatctatgactcatttgacagagaagccaaggaaaaaaagcttgcttggcccattaactcaaatccaccaaatacttttgtctaagttctcattctttcaattgttatgcaccagagattaaaaagctttaactataaaaacagaagctatttacatatttgttttcactcaactttccaagggaaatgttttattttgtaaaatgcattcatttgtttactgt

SEQ ID NO: 371 - protein, 411 aa, Homo sapiens
MVFAHRMDNSKPHLIIPTLLVPLQNRSCTETATPLPSQYLMELSEEHSWMSNQTDLHYVLKPGEVATASIFFGILWLFSIFGNSLVCLVIHRSRRTQSTTNYFVVSMACADLLISVASTPFVLLQFTTGRWTLGSATCKVVRYFQYLTPGVQIYVLLSICIDRFYTIVYPLSFKVSREKAKKMIAASWIFDAGFVTPVLFFYGSNWDSHCNYFLPSSWEGTAYTVIHFLVGFVIPSVLIILFYQKVIKYIWRIGTDGRTVRRTMNIVPRTKVKTIKMFLILNLLFLLSWLPFHVAQLWHFQDYKKSSLVFTAITWISFSSSASKPTKIYNANFRRGMKETFCMSSMKCYRSNAYTITTSSRMAKKNYVGISEIPSMAKTITKDSIYDSFDREAKEKKLAWPINSNPPNTFV

SEQ ID NO: 372 - DNA, 22612 bp, Mus musculus
caatacatggctgtcattagcaaaggatctttcatcacgtgtcctttcaggtgcttgctttagcagaacatcctttcacttgtgtctgcttcagaaaaacactccttcgtgtgtttacaccagcaaaacactatccaacacaacttactttccaaagaactcttaagtttccacttcacatgggttatatgagactgttggggagatggagggagataaaccaaaataaagggaaaatcctcatccttgggatatagtttgtattttaaattttttattattattaatttatttatttatttatacatatgcttgtctatgtatgaggaagtcattagggcatcagatcccctggagctggagttacaggcagttgtgggctgcctgatgtaggtgctgggaaccaaactcatgtcctgtgcatgaacaatatgtgctcttaaccagtgagccatctttgcagcccacctagtttgcccatcataaaatcaccttacaatttcattcgcaaaagaaaaaaatgttattgtcggtgtctttgttgttgttcagacaggtctcatacgtcagactggcctagaacttgctatgtattagaaggtgagcttgaccgtttgatcctctagctacctcctatgctaagaatacaagcacaagcctcccaatgcagtttatgctgccctgattgaacccagggcctcgtgcactttatacaagagctctgttgactgagctacattcccagtctgcagagttcagcaagactccagaaacagacctgaatgagatggcaagtgactgaagaaaagatggacacactgatagaaagctaggacttgattttatatttaattcaaaaattaatgattaagagcttgcctttttgcaattttttatcctgttataaactataaactatctaaggaaatgtagatgttaaaaaatatatttaatgtatatgcatatttatatgtatatatacacactgtagctgtcttcagacactccagaagaggacattagatctaatttatggatggttatgagccaccgtgtggttgttgggatttgaactcaggaccttcagaaaagcagtcagtgctcttaaccgctgatccatctctccagcctggaaacatgtagattttaaatattaaataatcataataaagatattttatttattgccagcaaaaaataataataataaagaaagctaggatcttgtgatctgggctctcggatggagaaaccgcagcaagtgcagggtgtttattatatagaatcaacaaagaatgagggtattgtataccgctgaacaaagaggcaaagttattgcttaagataaacaaggaggcagggtttgtagtatataactggaccaaggagacaggatgagctaatatcagtatgagcagtctctctctgtaggcaaactgtcttcaagccataactgtctaggggtagggaattactgtgaacattttctgcacacactattaatatccacacatggcctagaagaaggaattgccatttccctctgtatctgaggctagggtccttgacatggcgatgcccacgacaagcacacacactcagtacctcacatactcaggacttcctgaagcagcctccaggaaatgttctaaaataataagtaaaccatatacattttaaaggatttattttattttaaattatatatatgtgtgtctgtgtgtgagtatatgcatatgcatgcaggtgccctaggaagccaggggacaatttcagatcccctggaactggagtaacaggcagttgtgaggtaccaaacatggatgctgggactcaaactcaggtcctttgcaagagtggcaagcattcttaatttgagctatctctccaggaccccattaaactgtgtactttaatttaatctttaaattttgcttcgcttgtaactcttgttgtaaatcacatcctttgagtaatgtagaaagccacagaatcatagggccgttgtgaagacacagaagccttcctcactcttgagaagttggcagccacgtttggatgtgtgcctgtctttctcctgcttgcctccgtctccaagtactcatgcttaaatctgaaaaggatgctctctcgcctttacttcgcttcctttgtttcactctgagagcaagataagggatcagagtggagccatcctcatggcaagcatgcaggaggacctgctaaaggcagagcagagtagggtgtcaaacgcagtcctataaagtcatctgcaaatcattgtctcctcattaccctttttgttcttccataaaaattcttctctcagccaggcggtggtggcgcacgcctttaatcccagcactcgggaggcagaggcaggtgaatttctgagttcgaggccagcctggtctacagagtgagttccaggacagccagggctacacagagaaaccctgtctcggaaaaaaaaattcttctctcatttattacatcccgaccacattgtcccttcttcccccaccctccctattctctgttactcttgattcagctaacacccttccccaaaactcacctccctatccctgcctccctccacactgggccaggtgacccaggctggcctaaaacttgaaattctcctgcctctgtcctgctaggagtacaagtatacatcaccacacctgacgccctccccacccccgcctcctcttccctcactccctgcttttcagtctttcagtctttcattctcgctctctctttttttttttttttttaatttctgaggtagggtctcatggatcccagagcagcctcaaactcactatgtagctgaggacgaccttaaatttctgaccctcttgccacctcccaagagctaggattacagggtacagcaccatgccctgccttccaactcatctccccatgcaagccctttcttagctagatcagaagtgatcctgatttataaattctttgggcaattatgtgagaacatgattctattcactagcagggcagttatgtgagattctattcactaacaagtaaggtaaaaattcacctgagttccatccgatgaatggggataggggcaggctgtcctaagccatcatccaaaacaacttgaggttttaatgatataatttcctttttctcttctgtcccatcccccagccagccaggctcagctaagagctttaacacactgctggtttccttggtaaccacctcgggttcccactccagtgtctcttgttcttcctattccaccctctctttgtgtgttagtattctgtctaaactccactccacagttacctggcaacagccaggtaggcctgacccactataaaaggggctgcttgccccctcttgcctctctctctcttgccttcttgccttcttgcctcttgctctcttgctccctcttgcttcccctctctctccattcccttccccactttcttcccattcccttcccccctctctccacgtggtcatggccagcctctacttctctattctctccctctctctgcctttctctgcctctattaccctctcaactcccctccccatgccctgaataaactctattctatactataccatcgtgtggctggttcctcagggggaagggatgccttacatgggcccacggaggtacccccttcccccacacctcaccacaccccataacatatcttatacctctttatctttttataaacacatcactctggaggggctctcctgcttccagaaggggacagctttggacacggccctagtccccattggggatttgctggagagcagtgtcccagcaccccatgctaggcacacatatccatgttccatgctcttcctaaattcacatagaggcctttcaaatcctgttgaatttcaaatgaaatattcacaagaaaaaatgtgttccctggtcagagctgaacagactgggcttaagtatggactctgaagccagcccggcttgaaatcctgcttctgatatttatttgctatggatcttgcagagtaatctcttggagcttgattcctgtccttaaagtaagaatagaataattgagcttttctgaaagtgtgtgtgtgtgtgtgtgtgtgtgtgtgtaagtgcttcaaacagtagctggcatatggtaaatatcacataaatgttactaatgaatattattgttaccagccatctgtccactcacctctgggcattttggttaagccagcaattgacctggaattctgtgactaacaaactcttaggagccacaaaggagtgtatgcttttgatttgatatctctttgagggatttttgatagttttatttttgagattataatataatagcatcatttccctcttcccctttgtgtctcaaaatcttccctgaacacccactcttcctttctttcaaattcatggcctttttttattgttgtcatatatatgcatgtatgtgtacatatgttcctaaataaataagtaccaccttctctgcctgtataatctcacttgtatgtatgttttcagggctgaccaattggtattggatacccaattggtttggtattctctgatttctcccatacttagtattcccttaattgccagttctttgtctagatttgaggtcctgggctttctgtctggactctgcctttactgtgctctggatctagttgaccatctgtcaggtaccctagatggagaggccacccacccctatacctataaatttagatatggaaattcaagatggcactcaggccccaaggccaaaggccattacaattccaaacctcatacaagttcaagactttgattttccagtatgtggtgactcaaggcaaatgaagctgtttccctgggtgtgttcagcagtggtaggaagctgagctgccaccaccactgagaagcctggcaaatggtctgagtgccttctaatagacagacagtatagttttctcttctgacccagaggggaaaaataagacacagggagatgaaataaactacacgtggtggggccactagtaaatggcagcgccaataacacaattcagcctgactcactattcagggacttactgtgtatcaatccccctgcctcacatggacggcagggctctgacaggcagagccctgctgcctgtgccttatgcagatggattcctgcctagatggagaaatcggagctcagatgtaataagaggcagagctagtgccacagcaccatgcacagggtccccaaagctaataccatgctctgctgggattgtagaaaattagttttgactaactgagttattttccagcagttcagagagttcaagtgaggcaggatagaaagaaagacagggaagtttgagaagacatgaaaatgagtccctaaccactggtgtgaagacgggaatctcacatgcaggagtacaaactatggtttggggaaagcatatgccttgggccagctcagtggttgtaaacaagggcacagtgaaaccaccgaactcaaccactccatcatgggtgggaaaaagaaaagtttatttaggaaaagttcaaaattgccatggctccctcttgtgggagggtgcagagaatagccaaaggcttttaggagaatccaaagctgctatggctacctctcggggacagcaagagggacagcaaaagggtagagaaagccttgccagtcgtaaagggggagtagctacagggagggaggtgtgcaagccagaaccacctggagggttagggaagtgggcgggggaggtgaggatcaacgaactttcatgtgtgttacacgtatgtgctacagggaagcagatgccccatttgcagaggttgccagaggtagggaattagtggctcctcctgacaacagacacaggtttgggaggaatgctgactgtgagcctttgtctgtctgtcagcaagccttccatttactctgtctgagtccagacagacagacattagcagtgccattttagagcgtttggaacctaacagtggtatgaagtcagcctgggcagcatggactttatgtcaaacctaacacaatagcaacatcgagccacttagaacagcacctgaggttaaaaaaataaataacaataaaaagaaggtgttcttatcaccctgctggggctcacccagctcccaagatagaagcagccttggcacaactgccaaaaatatgcctgacccactcagtccctcggccctagcacactttgaaagggttgactccccgaaggctgagaagccatattatgggcagagggaaggaccacactccacccaatatcctgtgcctcggtctccccgtccctgggtcttcttgtaacttgagtgctccttcccttgggaaatctggggccaaggggagaaagcctcaagacttaggagtgtggaaggaagatgcccagagatgagacacctcatttcatgactcagtcttgtctaggcagacttttaaggcagcctggggctgacaactgagttagggagcttttggaaacatgactagggaggctattgtgtggctgtgaagcagaggctgggagagagaaggaaatgacccctgttcctgatgagggggccctccttcctgtgagggtctgggcacaaaggtgtctatctcccagcctcctgtctccccaaaccacagctcagaggtgtgaaagaatgaaaaacaacagggggaggggaggcagagaagagccaggtgcacatttcacaccttgaccactgatgaggccccaggcagcttcactctgactaacttcctcctcagccctctctgctgcagagcagggagggcccagagaccagaacacaggctgtgagcttttggctaggtagttgcctctgaccttgtcttgggatgaaaaagaaccaaattagaaggccaggtgaggggttggctcagctctgtgacccaggaaccttccaaggtatctcaactgcaaacagcagctgaagcccagcactgcaattttgagacttgggagttgggttggtcccagaagaggaggagcaagccactaactgggcacccatctttgccacagacttgccacgcatatggtgcacagtccataaagcagtcccatcaaatgcatgctatcctttagagccactcttcagataaggaaactgaagcagagagatgagatgcttgcccagggtcaatagctggacagccaaggaatttagctagaactggcagagcctgctctatcaattgaggccagagaccaaccactttcatggaggactagcccactggccctggccacagccacacttacaggtcccataagccactactctctatcatgggctctcttggcatggaaagttctaggtagtcctggttctggggtctgcatttacttacttccggccctcggctgcacctgtgcgaagcccttggcccccgtgctagatgcttaagcctatggttatctaggttaatcttagagcaactctgctgagggaactgcctgcttatggttctgatctgtccaagatctcagagggctcgtagggtggaactaggcctggagtccagacaaggtcggtgctctgccacccccaagacagatatacaagtcactcaagcaaaccaagagagccacctggtctatcggggcctaatgctaacatctggctgccaggcctcagaaaggaaggcttctctacacatgaccttcagtccagcatccctccctgcaacctgggaaggtaaagatcaatgaggacaaatggggagactaagggccaggaaggagattaggggaccctagacctttacacttcatatagatcagtaatgtttcagcagccactgggaagaggcacactgaggggctggcttctgccaccatgaggcatttctaaaatgaccatctgttttcactaccttttctttcataaagcaaaagttccctttaaagccaaaaaatgggatgcgggacacaatggcagactgcatccttgaacatgaacaagtgtgggcatagcctttacagttatttttctcatttgcataagtcacagacaggcatggggaaactgtggtccttgtgggcactaaagcaattttgtcgtgttttccaggcttctgtcatctctgtctctatagtcagtcaagtgccaagtcatctacatcctgactggcgggccctcaggaatccttagtcccctccatacacacagctcctgacctcgtctaagacctcgggtccttttcacctgagccctgcaggtggtggttgtttcagagaagtgtcccacctgtccataggaagagacgagcgctaagtttgggcaggagcatgccatctcaataaagttggactgaattagtggaggagcagtttgtttgaaaactgagcatcagcacgatgtggtggctcataactgtaatctcagttctccagaggctatggcaagaggagcatgaactcaaagctagcctgggctatatagcaagttcttgtttcaaaaagaaaattgcatttaggataaacacgatggcccacaactttaatcccagcagccaggaggcaggcccctgagcttgaggccagtctgtggagttctagtccagccagtgtcacatagtaagagccctgaaaaaaaaaagttatccagtcccgacttccactacccagcactgatgcatgcatactgtagcctagtatggcactttctacatgtgcatgggtagtaccaaagtacatacaatagtctgttacttgcctcttctaccacatgggcataagctcctctgcattcagcctcatgaaaaatatgtggctctccacttgtgtttagctggatgaatacatcagtttgtctatttacaagagagtggactgccccaccctcctgccacatgctgttcacaatggtgcactccaatcatcccggctctcggctctcgtgaggctgagccaggaaggtcactgagagttcaaagccaggttgggctacagaatgaggctatctcagaaagaacccaaacccaattttaagagtgctggcgtccttttcagaccaccgactttgagatgggtctgtaaaagcaggcaccaccctgggacagaccagcacacagtctaggtgtgattcagaagcagtccgtgcacctggtaacagggctgccctctacttccccactgtgtggcttcagacctttcctcaaagaaccttcccccagacagccaccccagacccttccctgggtcccaggttttttgctttctcaccagatggaactccaacattcctgatagcctgttgccctatcagctgcactgcttgtctgcgccacacatgcccacctgccgatcactgaggtatcaagcatttcccagcccctgagcgtgctcctgaatagttccatctgatctggacattaaatggacattccagatgactttgggctcattataatcccatcgtgatttcattcatatatatatatatatatatatatatatatatacatcaatgccaggtctgattcaaccatgcccaaatgagaaaagacaagaggtggcaggcatctcttggaaatgtcctccctactcatgcagttatgatagcagtagccacaccacagcccactctaacacagtcccagtgagactccaatcccagtacttgctaaggagaaggtcccttcagttgagcttccctcctgcagtcactgccatcagatcacacttcctgcctgctcctagactcacttagttgtttatgaatgatattgagtaagacaagaactgcaggctttgtaacagtcccaagttcctggctagccccttctaagtgtattcacctgaccacaggcgtggcagaaaagacagaaaagccctctgcggagggctggtatagattaccctttggaagaggctgtgctgagccgtgaaatcttcacttcctctgttcactgcaagttcccaaccacaagtgccaaaggcagagaagcaggcagcacgagacctgaccccagcagccacagccggagcaccagccaagccatgtaccttgaggtaagttctgctgcccagctcagctacaatacagcggccaagtggccgagctcggataccagggacaagcgtgggctggcccacagccaagaggcaccagcgggctgagtgagcagcatcgaatgcagaggttctgataataagagcattggtggattgggaaacccagcctggccactaaccacaggcctgtctcctgcctctgtggcttggatgcctcatctgaaaatgtcaagctgtagaaactcaacttcggtgatctctagttctcagatagtttgggataaggtgtagagctgaagtggaagtggtatgcccccattgtctgagctacttgggaggcagaggcagaaagctcatctgagcccaagagtttgaaatcagcctggccatcttgggaagaccaattagggcttgggtgggaagctcagtgggtacccactgcctctgggtaggggaagagaggcatgtacggtgtgtgtaggggtgcacagtggtttgtagaaaatccttatgtgagaccaggaagtcagggtcaccagataagggctgaggagggaaaaggagggccagggactagaagatagagtaaggaagcacctggggaggccagtggttgatccaggcaggggtggccatagcagcaaggctgacaaatcaccaagcgtaaagaggaagggaaagaatggaaggctccagaccctggaaggaagttcctcttccggcagagaatccctgtcctggatgataatccagaaagggtctgggggggggggggccggggggttaccagcctttgaaaagggggggtcaccttcccagtctgagtagatggagttaaggagatgtggtccccggagagaaagagtcagctcagggtctggctattgctaagggaaacaaacactcaccagaataaatgacagggcacaaaggggcaaagccagttgctgggtctttacagagaatggcctcccttccctctctcccccttcctcgggcaggttagtgaacgtcaagtgctagatgcctcggactttgcctttcttctggaaaacagcacctctccctacgattatggggaaaacgagagcgacttctctgactccccgccctgcccacaggatttcagcctgaactttgacagaaccttcctgccagccctctacagcctcctcttcttgctggggctgctaggcaatggggcggtggctgctgtgctactgagtcagcgcactgccctgagcagcacggacaccttcctgctccacctggctgtagccgatgttctgctggtgttaactcttccattgtgggcagtggatgctgctgtccagtgggttttcggccctggcctctgcaaagtggcaggcgccttgttcaacatcaacttctatgcaggggccttcctgctggcttgtataagcttcgacagatatctgagcatagtgcacgccacccagatctaccgcagggacccccgggtacgtgtagccctcacctgcatagttgtatggggtctctgtctgctctttgccctcccagatttcatctacctatcagccaactacgatcagcgcctcaatgccacccattgccagtacaacttcccacaggtgggtcgcactgctctgcgtgtactgcagctagtggctggtttcctgctgccccttctggtcatggcctactgctatgcccatatcctagctgttctgctggtctccagaggccagaggcgttttcgagctatgaggctagtggtagtggtggtggcagcctttgctgtctgctggaccccctatcacctggtggtgctagtggatatcctcatggatgtgggagttttggcccgcaactgtggtcgagaaagccacgtggatgtggccaagtcagtcacctcgggcatggggtacatgcactgctgcctcaatccgctgctctatgcctttgtgggagtgaagttcagagagcaaatgtggatgttgttcacgcgcctgggccgctctgaccagagagggccccagcggcagccgtcatcttcacggagagaatcatcctggtctgagacaactgaggcctcctacctgggcttgtaattctggactggaactgtagcctgcgcagcccaagtcctaacacactccaagtgcttgtcctccttgtagttgggctagctcgaacttacccgtaactttgctgccaggatgcactgacagctcagcatatatccaggtctcctgagaatcaatctcagcaacaaggacaacaccattactgtgccttagctgccatgccctatcttgctgttttagaactagctgcctggagccccaccgccctactaaattagcaagtagaactcagccatccctgtgtgagaagagggagaggcaaatagcacagagggccaggcgttgtcagcactgaatgtgcccatctcagtatctcaatatttgcccaattttatttctagaaacctcacttaaactttcaataaacaaggtaatgaggaccagggcgtattcacagtcattctttgaaccaggtctggctggactctggcgtgtatttcctgccacattctgtctggcttagagtttgtctctctgccctcctgggttctactgtgccctctactgcacccactgtggcctagtggaactgctagatacagtctcaggtttgggtggtggcagtgaacagctggttgtctaggtatgctctggggccactagacattaataagccataatttcctgatcccagcagctcaggccaacagggaaggtgtggtgaaaatgaacaaataccaagcaatctatactacagagcaagagggtagcactcgctaagtcctgggctcagcaagatggcaagatctatctgaaatggctttctggagacttaaagggcaagtggtatctcgaaggctaagagaaggaagagttctttatttctaagcagaagagagagcggtagcagaggcagagaggctgaagacagtaatgctttggggacactataagtggtctgggctagaggtggtggtacataccggtatttgggaggcagaggcaggctgatctctgttcaaagccagcctgttctacagattgagttccaggcccaccagggctacacagtgagaaactctctctctctctctctctttctctctctctctctctctctctctctctctctctctctctctctctctctctcaaaaaaaaatggtctcagctggctagagttaagggtttgggtaggggtaagggctgatgatgaagctgtggtctgggtaaaggcaatgggctcccaggccactcagagaaagttgtattggttatttgggtagtattcagggaaaataggcttgaaaaaaaaaaggtggggctggggagctggttcagttgctgagcaaacatgaagacccaaatccaagttcagacccccagcacctatgtaaaagctgggtgtgtccatgcctgcctatagggttgagttgggttggctggctgccagcctgagggtgggggtgagttccaggttcctgtctcaaagaaataaggtagaaagtaatagagaacactcaatatgctcctatggctttcacatacatgcacacacacacacacacacacacacacacacacacaccccacaccagcaactgggtgggcctgatgatttctttgctagcagacattagcatgaagccaccaaagcaagaagtgggcaacaaggagcagtttcaatgtctaaagctgagtggaaaaaataaccagtgctttccagaagggtaggtgacagggctaccccctgcactgtcactttctcccaatgaagtcaccaacatgccatgactcaccctgacaggctgggtcttatctgaggctgcagatctgctggagcttgggaaagaaggaacagaagcagttagctgggtaagtttgccctgccctatagatacatacctgcaaccttatctagtctcagtattccaaagactagactacccttctacaacatgagaagcaagaagagaggaaaatgtcaaaagagaatatcctggtaataaaaagtatcagtaataaagataaagataagcattatttgtagcaggccaaaaactgggtccatcaagacacctatactctgactcctagagcttgtgatcaggtaaagggcactcgccaagcacagtggtacatccctataatctgagtgcttgggaggatacggcaggaagatcaacgatttgaggctaacctaggtgacaccatggattttagactagcctggggttaaataaggaaagtcctgtcttaagcaagcagaagggtgaggtggtacacaaacttgaattgcagcttttgggaggcagaagctagaagatttctgtaagtctgaagccaatgtcatctatctagcagtttccagaccagccatggatacccagtgaaaccctgtctcaaaaacaaacacacaaaagaacaacaacaaaacaagccaacaaagatggcaaagaggaactgaggttgctaatctgtgaagtaactggtttaaaaataagattgtgggggttggagaggtggctcagtggttaagaacactgactactcttccgaaggtcctgagttcaattcccagcatccacatgatgcctcacaaccatctataatgagatctgacgccctcttctggggtgtctgaagacagctacagtgtactcacatataataataaataaatcttttaaaaaataagattgtggcaggtcatagtggtgcatggctatagcccccagtatttggaaggcagagacagaaggaccagaagtttaaggcctgccttgcctacctaaagagttcaaggtcaggaccaagccagtgacctcagcagataagagtatttgtcaccaagcctgacaacctggggcccacagagtagaagaggcctgactcccaaaagttgccctctgatctctacatatgtgctatgacataattataccccctccctcaaaataaatgtaataattttttaaaattaaggtcaacttgggatatatgagacctatcaaaatggtaataaataataaaaattaaaatgatactattgggctgaagagaggctcaatttgtaaagtacttaaccatgtaagcacagtgacctgaatttagtcctagcaaaaaaacaaaaacaaaaacaaaaacaaaacaacaacaacaacaaaagaaaaaaaaaaaaaacaagcatggtagtgtgtacttgtaaccccagtcctggggaggtggtaacaggaagagcacagtaatgtgctggttagccaacctagcctagtcggaacgacctacagccacatgagaaactctgtctcaaaaaacaaaaaacaaaaaaacaaaacaaaacaaaacaaaacaaaaaaaaccaacaacccaaggtggacagctcctgggaattaaacccaaggttagccactgacttccacgtgtatatgccaaatacacacacacacacacacacacacacacacacacacacacacaggtgtgctgtggtggcagcagcagaagagagggggagcaggagaaggagaaggaagcatctgccaccgccaccactgccaccaagtgagcctagtgtcacaggaatctataaaaggaaaggaaagagacaaaagatgttttgtctttgaagaagccatgcaggcaggggctgtgcgaggaactaggagctgggaaagacagagaacttcattctccagagaggaaggtcaagattgagattgttatctcgacgactcatcctaggctcaggactgccagaactctaagataagacattcatgcagatctaagccattcaattggtggccattttctctggtttccacagaaatatacaaatacaatcttggatccaatccacaaccctcaatagctcccaaagatagggagtctgctggaactcttgaataaggagaacagtaaactaagatgaaaatacttattttctaagtaattacatgacttagctttgctcaaagacatgacaagctggaattcatgaagcacgttggctcttcaaatgtggctagtgtaataggctgacagaagcctagctgtggggtagtgcctttacaacttactcttttatgacaatattttctcaacactccccatccaagaaaatatcattgtcttctgtttcattttgcattttcaactacataatcaaagttaagacccaaggtggttccaaatggcttcaagtgttgtcaagggatatatggttagcaaaagatctctttgttaaaaacagtaaccattaataacaaatcagaaaacacatttaaactccaatatttaaacctttacagaaatagggatttctctttttttttttttaagatttttgtttatttattattgtacactgtagctgtcttcagacacaccagaagagggcatcagattccattatgggtggttgtgagccaccatgtggttgctgggatttgaactcaggacatctggaagagaagtcagtgctcttacccgctgagccatctcacctgccccatgaaatagggatttcttaaacttcttgccagtaaaggagtcagctcatataaatatactccgggacaaccttaaggattttccttaaagatttactggcaagataatccttgctgagtcttttctccacatccccatggctgattcctgttgtcccattaaacactgctctataattctcctgaacatatttagcaaatggccttaaatggggcacaatgggggttccattcttccaaaataatgacagcaagaccagaggccctttgcatctggcacagatgaagcactcagtgttcaaatatctggtatagtggccaaccctgctgaggaaggagattcaatacctaaataaataaataatgatacctcaacatcagctccaactccttaaccttgtgcccaaaactgttttctgtgggttctgaggagccccaggcatcagcagggtcaggcctgctaaatttaggcctgaggtggttaggtgggggtaatagagaaagaggacacagaaatagtgagattcactcaagtcagacagtccacagtcttaactaaagatctactttgtcttgccacgtgggaggctgaggcaagttcaaagcctgtctgagctacaaagctagctcaagactaacatggaaaacttgctaagaccctcttaaaacaaaacaaacaaaacaaaaaccacaggaaaaaggctggtgacattgctcaagcagagattcagtgtagtgtttgcctggtacacatgaaaccctcagttcaattcccagcaccagaaaaacaaaccaaaacaaaccaagagctactggagcctgaaatgacaaagtaattggaaaaaagtatgagaaagacctttcctgtatttgcacagaatacatttgttgcaggaaatatttttttttaaatgccagcaggcttcctgcacttctgctgacaactctctgccccagtgccgtccctccaactctgtctctagctaggccctgcagtgaccaattgctctctgctcagctccggttcacttgtctctggggccactagttgcttctcagccataaacccctgcagttcaacagtcccaccttccagtcacccagtaaaacaaaactctagaagcttataattaggaagtcagatttatatatcaataaattctcaattcacaagatgcccacacaataattttagagccaattgataatgatacaagctgcccacctagatcaaacaagttatcccaattattctatccctatatgatattcataactgtctgtggctaatttaaaaccacgcgggatcgggatcttcttcctgtccatctgcctccatctttgcttcccttctccctcctctaagtcgctctctgtccctgcaactcttcgctccacctcccttttccctgtccaatcacaggcctcctgctgcactaatattttaatgtaattggacagggaaaatcctgtcacatacattcataatagatcttgtagttaattgtatagttatggcaatggatgaccttaggcagctctgggtgtactgaattgcatttttgagcataatattgccatgagtcaccatgagaatcctggatgccatcaagcagccaggacgatgcatggcatagatcatggatggtgtcctggattccatcttgaaagaatgaaaggaaaccgtgagcactgaagtagattttcttctgatctgctgcccagaaaccccttgattttcactttcaccaaacacaaggccatctcacagaagtgtatacaggcaggcagccataggggttgccttcccaagattctgagagagaaagttccacccatgacaagctggtttgggtttcagctgaaccttaagaagtcaggttgggagcagctctaacatgttcatcttcttgtggggcattgctacaagtgcacctggacaaggattggtttcttccttctataaacaaaagtgggctcagggactatctggaccatgagatttggtcagcagaagcttggagtgagatagagatctgaactgggctctattatacatttattgatttattatgtgtgtatgtgcatacatgtggaggccagaagacaacttcatgggagtcggttctttccttctaatattcaggccccagggatcaaactcagatcagcaggcttagtagcactgagccatctcatccagtctgagctggacgcttaacaactcactgactttagaattagaaaatccatccaagctgatactcaacctatgatctcagcccttgacggactaaagctagaggtcagagttacatagtgagcccatctcaaaacaacaagaacactattttgtctgctttagtattttttttgtcttactgatgttttaaaaggtttttatctgttttgatattttactttcctgttttttgtttgtttgtttttaagagacagtgtgagcacaagcacacagaaagttgggtggatagggcagatctgggaaaggggaaagaatataatcaaaatatattgtatgaaaaaagatttttagattaaaataaacaacaacaaaaatccagcagcttacttatgtaatcctagcactggaaggctgaggaaggaggactacacaaattctaggtcagcctgagctatatagtgagtgtgagaccagccctggctacacaatgagaccctgtgtcaacctgtactctcaactctctccaccaactaaggtcattataagctgggttgctggtagacccttgtatggagttccagctactcaggaagctgagatgagagctctgcttgagccaggggttcaagaccagcctgggcaatatagcaagccaccatgtcagaagtaaaacaaaaatcctttgatttctgagaattaatgaaggttgtagctgctatttagtggcatacctcttacagaacatgtgtgaggctctggttcccaatatggtaggggtagatggaagaaacctgctaaattacacttacctggcagactatgtcactgctttgagctgtcatttctaggtggacaggccttctgtgtgttgcatagaggatatcattattggatgcttcaccaatccctaggaactcaacataggagatgattttccaggcccacctgctcatttcccttgccaaaaccagcatctccattctctcagtatccaagggtcaagatgccctctctagctagtagtcaacccctcctccggctttgcatttagccagacttcagctctcaggtttcttatcagaaagacagggtgctaaggttaagtcgccattttcccggaatgaccagcagagtcacagactttcagagaaatgccagttttggcatagcactccctctttggttgttgtatctcattggtagtgcagcagtctgcaacatctttttattccaagtgatttccattttctctggcaactcaaaatgaaaagcaagcacaagtatcaaaaagtagttctaaaggtttacttatttttctatttaaatgtatgggtgtaagcctgagtttatgtgtaccgtgtgtgtaacagaagaggccagaagatagtgttgggttccctggagcttggaactataaagcagttgtgagttgccatatgcatgctgggaaccacacctgggtccactgcaaaagcaaaaaaaaaaaaaaaaagttatgagctcataactgctgaggcatctccctagaaaacaactcttagcagatcggaaaataagagtgatcatttttctccatttaatgaaaagtaagaggacatgccaacatggatgaaagaaatttcaaaagactctacccgtagatgaaaagctacaggcaatagctgccctggcaaaacaggtttttttcctccagggatgaacccctgataggttatacaattcccagtgatctgccctaaacacatggacataggagcaacactaaatggactcagtagattttacacacatacacataaacacaaaaaacaattaaagaggttatgagtttgagagaaggggttgaagcagggagtggtggaaatgatataaatatagtactcacatatgaaattctcaaaacataagagaacacttttttaaaaaaaggcaagaggaactatcttccctaggcgttttactctgagtacatgaatatactgaagagaaatatatgtgaataaaatgtaaatctaaacactctgggaagaatgggcgcttagttgaagtcctgggaaggacttaattacgttaactaatcaggacccaagggaggaaattgttgaggccacacaaatgtaggatttggtgcttagatgcatggatccaagtctggggccgtcaggagagaagtgcaaggctgctgaggttggcaaacatctgcacaactcggaatgctttggggttccactcacctgatatagcatcagtgtcatgaggaagggtaccaaagactgaagaaccttcaggatataagaactgccctctgcaaaatctcatcaggaaactacaaaattggatcaaaaagcaacagcaaatgacctctgcctgatagtagagcgcagggacagagtgctttcctcgcatgcaggaagcatggcaagacaaacaaacaaacaaacaaacaagaaaaccaaagtgaacaatcaaggggactggccagcaggcctctgcctctggatttctaatccagtacataccaccaagctactagcaggtggactttattcagcagtagctccctgtcacattttcctgtgcacttgtgcctactgatttcaacttaacttcccctaacctaatccccaaggccatctatagtcagaaaaacaagggctttctctgtttaggacctgctctaagcattttatgaacatgaaatcctgcagccctaacagtaattctacggtagtaagtaacactggccttgtatccacgagttctgcattatggagtcaacaaactgcagatcaaaagttaccgaatttattatataaacatatgaactttcaaatagtaaataaaataaaaagaacacaaaactgcatctgctctgaatatatacagattttcccttgccactctttcctgcatagtgtttccactctgtcgggcattggaagtagcatacaggtgggatgaagtgtagcggaggatgagtagaggacattttatataaggtatttgagcattttaggttttgtcatttgttgaggggtaccagaaccagttccatgcaggcacagaaggatgactggacttttattggccccattttacagaaaacacgggtaaaatgaggttaaataaattgtccagctccttcctatcatcttcttttcctcaatacatgtgactccctactgctgttctcagtactaactttccttaagaaacaggagcctcatgtcttccagaaaatcctttcttccttctctgatttttcagccattctcactctgctaatcccctactataataaccacccgttccatatagcacaaaacaaaaacttctccttcatgtaagcatatctctcatgtctgtaaagtctaaaatgcatcccccccccccagatatggcagtgttggtgacaatgtgctaaacagaagggctctaaatgggtaaacagaattgttattgggcaaaggcatctagttcctgattgatccaaacagcctgtatcagcataaagatctccaccctgctgactatcatataaaatctgcctccttttctacaaatttgcttctctctgcccctctgaaagatagcctggcagtttgatccccaataaaccactactgatggagtggtccaattctgcttaaattaacacatgtcccggtacacatgcgcagcagcagagagtgctggcatacaaggggtattcaataaatgct

SEQ ID NO: 373 - DNA, 1608 bp, Mus musculus
gcaagttcccaaccacaagtgccaaaggcagagaagcaggcagcacgagacctgaccccagcagccacagccggagcaccagccaagccatgtaccttgaggttagtgaacgtcaagtgctagatgcctcggactttgcctttcttctggaaaacagcacctctccctacgattatggggaaaacgagagcgacttctctgactccccgccctgcccacaggatttcagcctgaactttgacagaaccttcctgccagccctctacagcctcctcttcttgctggggctgctaggcaatggggcggtggctgctgtgctactgagtcagcgcactgccctgagcagcacggacaccttcctgctccacctggctgtagccgatgttctgctggtgttaactcttccattgtgggcagtggatgctgctgtccagtgggttttcggccctggcctctgcaaagtggcaggcgccttgttcaacatcaacttctatgcaggggccttcctgctggcttgtataagcttcgacagatatctgagcatagtgcacgccacccagatctaccgcagggacccccgggtacgtgtagccctcacctgcatagttgtatggggtctctgtctgctctttgccctcccagatttcatctacctatcagccaactacgatcagcgcctcaatgccacccattgccagtacaacttcccacaggtgggtcgcactgctctgcgtgtactgcagctagtggctggtttcctgctgccccttctggtcatggcctactgctatgcccatatcctagctgttctgctggtctccagaggccagaggcgttttcgagctatgaggctagtggtagtggtggtggcagcctttgctgtctgctggaccccctatcacctggtggtgctagtggatatcctcatggatgtgggagttttggcccgcaactgtggtcgagaaagccacgtggatgtggccaagtcagtcacctcgggcatggggtacatgcactgctgcctcaatccgctgctctatgcctttgtgggagtgaagttcagagagcaaatgtggatgttgttcacgcgcctgggccgctctgaccagagagggccccagcggcagccgtcatcttcacggagagaatcatcctggtctgagacaactgaggcctcctacctgggcttgtaattctggactggaactgtagcctgcgcagcccaagtcctaacacactccaagtgcttgtcctccttgtagttgggctagctcgaacttacccgtaactttgctgccaggatgcactgacagctcagcatatatccaggtctcctgagaatcaatctcagcaacaaggacaacaccattactgtgccttagctgccatgccctatcttgctgttttagaactagctgcctggagccccaccgccctactaaattagcaagtagaactcagccatccctgtgtgagaagagggagaggcaaatagcacagagggccaggcgttgtcagcactgaatgtgcccatctcagtatctcaatatttgcccaattttatttctagaaacctcacttaaactttcaataaacaaggtaatgagg

SEQ ID NO: 374 - protein, 361 aa, Mus musculus
MYLEVSQVLDASDFAFLLENSTSPYDYGENESDFSDSPPCPQDFSLNFDRTFLPAKLLFLLGLLGNGAVAAVLLSQRTALSSTDTFLLHLAVADVLLVLTLPLWAVDAAVQWVFGPGLCKVAGALFNINFYAGAFLLACISFDRYLSIVHATQIYRRDPRVRVTCIVVWGLCLLFALPDFIYLSANYDQRLNATHCQYNFPQVGRTALRVLQLVAGFLLPLLVMAYCYAHILAVLLVSRGQRRFRAMRLVVVVVAAFAVCWTPYHLVVLVDILMDVGVLARNCGRESHVDVAKSVTSGMGYMHCCLNPLLYAFVGVKFREQMWMLFTRLGRSDQRGPQRQPSSSRRESSWSETTEASYLGL

SEQ ID NO: 375 - DNA, 22608 bp, Homo sapiens
tttagtacagatgggttttctccatgttggtcaggctagtctcgaactcccgaactctcgtgatccgcccgccttgcccgcccaaagtgctgggattacaggcgtgagacaccacactcagccttaactttttaaaaatatcgtttgcttttttttttagaattagacagagccttaccgcactgttagtttccttggtaaccacctctagttcccaacccctagacctcctgtcctcagtccctaactgcagaccgtctgaggcactcccacactccctggctccaggaagatgccttgccgtggttctcaccccagcccctgcgctatctcagtgctccactccagagcccatcgccaggtcccagactgggtgtcctcagcccctaaagtcacatcatggtcttttcaaatccagttgggggcaggaagggtattcacaagataaaacgtattcccagagacagaagggcgggctggttaggagtgtggactttgaagccagaaggcttggtttgaaagccaggctttgtcacttactagccgtttgaccttgggcaagtgacttagcctctttgagtctgttttatcatccttaaaagagaaataaaaatagaacctttctgaaagagttttcacgagaatagatatgtgtaaaagtgctttaagcagcacctggcacttggggagcgttcctggtcaatattattgttgtggccatccatctgtccgctcatcttcagatgttttggcttagtcagcagttagtctgggattttgtgagtgaggaattcatgactgccacaagcaagagcatgtttttaatttggtgtctcttcaagttttttctttcttttttttttttttgagacagtctggctctgtcgtccaggctggagtgcagtggtgcgatctcagtacactgcaacctccacctcccgcttcaagcgattttcctgcctcagcctccccagtagctgggattacaggcgcccatcatcacgcctggctaattttttgtatttttagtagagacaggttttcaccatgttggtcaagctcgtctcaaacccctgatctcaaatgatccacccacctcggcctcccaaagtactgggagcacccaggcatgagccactacacccagccctagattgactcttaatccagaagacagagaggttaaataacctgtccgtggtcacaaagctagtaaatggcaaaaccaggaccaggaacccaatccagacagcctgctccagggtccgtgtgcttacccactctgctgccctgccttgcatgggactagccaggctctggccagactgccactgatgcctatgcctgtacagatggctagctgcctagttggagaaatacgggctccactctaagaggaggcagggcctgggccatggcacctcggcacagggcaatgtggacaaagtccccaaggctgacaccacacattgggattgtagaaagcgatttttggctggttgaggaattttccagaaggcctgagagtccaagcaggtaaagtccagcccagagtcaggcccaccattaagaggcctcgtgcgggtcctgggagggcagcttcaagcagtattgggtgtctcagaaggtatggaccaagggaggaacgttacttggcagctttgctcagtggagtgtctttgggttgggcacaacggtttccagggtgtgcctttccctgttcctggaagcccagcagcagccaagagccccaggccacgcccagtccagactacctgctcctcaggaaggggccttagccagctgtgcaggccctcttcagtttgggaaaaagaacttcaggctctcagctggtgacaccttctgaataacacaaccccaaatcccttctattcagccagtctgagccaaggatggggtcaacccgggagcctctggtgtggcctgtattccttgaggggccctgagtggcttggagaagaagccctcgggctgctgatgccttgcagctggagggcaagcaggcttccctccctggttcaaaaggctgcaggggaagtcaggaggaacttggctgagaggttggaggtagccagacagtgagaaaagggaagaagcccaggattctagaagcacaaagtgaggccacgagcaggaaaggtggggaccaactgagggagggagaggtgctttcctgggaccgggatgaggccagaggccactgccagaaaagatgcgttcccaggcaggcttgaccccaccttcttctcacacggcctctaagctgattcagggaatagcatccgatatcaaacccatcctgcctgagattcttctgatacttttttttttttgaggcagagtcttactctgtcacccaggctggaatgtaatggcgtagtctcagctcactgcaagctccgcctcccgggttcaaacgattttcctgcctcggcctcccgagtagctgggactacaggcacgtgccaccatgcccggctaatttttgtatttttagtagagacgggctttcactatgttggccaagctggtctcaaactcctgacctcgtgatccgcccacctcggcctcccaaaatgctggattacaggcgtgagccaccgtgcccgacctaacttttattttgatataacataaaacttattaggttggtgcaaaagtaattgcggtttttgcaattaaatgcggtttctgcaatactttcaattgcaaaaactgcaattacttttgcaccaacctaatacaaacaagttgcaagaatagtacaaagttctcctttatgcacttcctccatatcaccagttattagcatgccgccccatttgctttatcctttgtgcattctctcttgctctgcatatttggtttccaagtcacacgaaagtaaattgcagacctcatgacccttaacttctaaatatctcgatgtgtatttcctacaaacaaggacattctcttacattatccaaattagctaaatagcaggaatacaaggtttttgtctaatctccaggccatattcaaattttaccaattgtcccaatcttttagcttaattttattctttcattattattattattattttgagacagggtcttgctctgtcacccaggctggagtgcagttgtgcgatcttggctcactgcagccccaaattcccaggctcaggtgatcctcccacctcagtctcccgagtagctggaaccaaaggtgcgcaccaccacgcccagctaatctttggttgtttttttttttttgtagagacggggtttcactgtgttgcccaggctggtctcaaactcctgggctgaagctatctgcccaccttggcatcccaaagtgttgagattacaggcgtgagccacaatgcctggcttattctcctttttttttttttttttttttttttttttttgagacagagtcttgctctgtcacccagactggagtgcaatggtgcaatctcggctcactgcaacctccacctcccaggtcaaagtgattctcttgcttcagcctcctgagtagctgggattacaggcacctgccaccacgcctggctaatttttgtatttttagtagagatggggtttcaccatattgaccgggctggtcttgaacttctgaccttgtgatccacccacctcagcctcccaaagtgctgggattacaggtgtgagccaccgtgcccggccttattctcctttttgatgactgtttaatcacacagctaatacatgaatgcagtctctgaataaaacaatacagacaaggccaaagcagtcctctttgaacagcactctcgctcccagcccctctcaccttacacagtgtccctgtagagtgtaatgggggaagatgaggagcctgtgccactaactagctgtgtgactttgagtaagttccttgaactttctgtgtttctgtcatctgtaaaatgaggatgatgatgatagtaatggccacatagttactacatagttgtaggtattaaatgaattcatcccaataaaaccctgagaacagtgcctagcacgtaggtaatcaataaatgtccatcaggcgaggtgactcacgcctataatcccagcactttgggaggctgaggcgggcagatggcttgagtacaggagttggagaccaacctgggcaacatagcgggacccctgtctctacaaagagtttaaaaacaataataataataagttgggcgtggtggcacatgccgatagtcccagctactcaggaggctgaggcaggaggatcgcttgagccaagggagtcgaagctccagtgaactatgatcgcactccccactgggcaacagagtgcgaccttgtctctaaaagacaacaacaaaaaaaaaacaagcaaaaaaacaaaaaagaaccaaaaaaagccccaaaacaaatacatgtcctcagttcttatgaccctgtttgacctcaccctgtggggaaacccaaggaaatgcaagaagcaaactatcaacactcccctctatggctccagcccagccaagtgggtgtccaccctcaccacacaagatgcctgattagggctgtgtgatgagaaaggtgtggctcctgatgagtccttgagcagcaggatgtttggagggctggcagtgtgacacagccctcctggctgactaggcttggacagatcacttcacctctctgaacctccattctgcaaaatgggcgcagtagcctctccctcactgggtggctgaacggtttaaaggagatcgcatgtatgaaagtacagccttgcagaatggaagtccttttatttaatagttcccagggaactgccagagacaggatgacaggaaggtcattgtgcttggtggtggggcttgggtcctgaactgctttccagccccctctaccctcctgccgtcacaagaacgttccgttctaaccagtctgaccgcccctggtgtgaggagctcttccttacttccctgtcttggcacctggtgttcccccagcctgagaacagcctcgtctccctttgccatgtgacaaacagcagcaacgtcctccaagacccagctcaaacttcatctcccctgtgaggccttctccattccccaaaaaagcagtgtccccacaggtctgggaactcaccctcatgggctggggctgtctgtcccacctcctgggctcccaaggccccagcccacggcccccagcacttaaaatggacttgcctcccaggagggctcagagctgcaggacatgggcagaggaagaggcagtccccaggccccaggtctccctgtgacttcagctctctttcaagggaaattcagggccaggagaaggaagcccagggtcccggcactgtctggagcagatacagacccctgcccagggcttggactcttcttgatttcacgtaagatagtctcagccccagcctgggccacacgggaacctcaggcctggctgagcctgctcccctaacagcctggggctggcggccaagtccagtagcttttggagtagtgctccaagaggcatttggaggagctgcaagagaggttgtgaagcagccgactctgacagagaggaggaggaaatggcccttttcccgggctggccggcctggcagacagcagtaggggccctccttcctgtgaggcactgggcccaggcctcaacctttgagcctcccatctcctcaaaccacagcccagaggtgtgaaaaaaagaaaaaaacagggggaggggtggcagagaagagccaggtgcacatttcgcaccttgaccacaggtggggcccggagcagcttcactctgactaacttcctcctcaggcttccccgccagctgctctggagggcggaggcaggaggctcactggccagaactctgattgcaggcccttggccaggcagctgtcccctaagctgggcctgattctgtcctggtctgggagctgtttgggaccagaaagaaccaaattagacagctggtcaagggtttggctcagccccgtaacacagcaaccttctaagacatctcagctgtgcacgacggcagaagcccaccacagacttgcaattgcgaggttaggaggggtcagtttggaaagttcctagagcgggaggagactgctgctcactaggcacctaccctgccccagacactttctacacatatcatttgcagtctccagagcaaccctatcaaatgtatactatccttagacccatttttcagatgaggaaaccaaggtacagagattaaataatttgcctgagattacacagctgggcagccagaggattcgcctaggactggcaaactcaccgtccccctccacccccagttaaggcagagggtggcctctctggaaaaccagccctccggccaagcccacacctgtacgccccacaagtgccaccctctatcactggctcccttgatatgaaaggctcctggttgctccgggtttgtagccaacatctctctcactcaacattctcgattgtactcctactaagctatgggccctgtgctagaagcctacagccttggttattccagttcatctttttaacaaccctgctgaggaaactggctcgactcagctatgtaatttgtccaaagtcacacagctcgaacagggtggagtcagggctggaactcagacaagtttagcattcttcccacaacatcatggcctcactgggaacagctcagacccatagcccagcttgggctatcaggacacggccctgatatcagggtacggccctgattatcagggtgtccgagctcagaaaggaaagctctctgctcctttccaaagctcttgccctgcctttctctcatgtgtccttcccagcaacctgggaaggacatgatacaaacaagtgaggagactggaaggacaccagggaggacaccagggttacctttttttctttttttttctttcttgtctttttttttttttttttttgagatggagtctcactctgtcacccaggctggagtacagtagcacgatctcagctcactgcaacctccacctcctgagttcaagcaattctcctgcctcagcctcctgagtagctgggactacaggcatgtgccagcctggctaattttttgtcttgttttgttttgttttttgagacggagtttcactcttgttgcccaggctggagtgcagtggcatgatctcggcttaccacaacctccgcctcctgggttcaagcaattctcctgtctcagcctcccgagtagctaggattatgggcatgcaccaccacacccggctaatttttgtatttttagtagagacagggtttctccatgttggtcaggctggtctcaaactcccgacctcgggtgatccgcccgccttggcctcccaaagtgctgggattacaggcatgagccaccgtgcccggcctggacttttatctttcacatggaccagtaacatttcaacatctatttagagcagggctccccagcccatgggtggtggaccagtataccggtctgtggcctgttaggaaccaggctggacagcaggaggtaagctgcagggggagggagcattactgcctgagctctgcctcctgtcagatcagcagagcacaaatcctgttgtgaactgcacgtgggagggatctaggttgtgcattgtttatgagaatctaatgcctgatgatctgaggtggaacagtttcatcccgaaaccatccccactccagtccgtggaaaaattgtcttccacgaaaccggtccctggtgccaaaaaggctggggactgctgatttagaggacccacattgggttgtcaacttctgccatcacaagatgtttccaaaactaccatctattttccccatcatttcataaagaaaaggcccttttgataccaaaaaaaggggacaaataacatgattgctgaatataagacagacctttaaatggaacaaatgtggctttccatggtcaattttctcatttgcagaagcccatggaactcaaacctcttcacaggtcagcactgggagactgtggtcccagctcccaacccttttccacccccataggtagctactggccaagtcctgctcatcctaactggcctggtttctggaatccttcctgctccctccactggcactgctcctgacctctgccaggccctcagttccctctggcctgaaccctgcaggtgacaagctgtttagagcaaggagagtcacatctgtccacaggaggggaagggccttgatgccttgcaagtatgcctcatgtgggtgtaaatttaattccaggccctagcctggaggctttggtggggcagtctggctgaaaactggccccaagaccatgggctagcacttgcttttctctctctctctcttctctcttctctcttctttctctctctccctccacccctgctttccaactaggggagagagagaaagaggaaactgcttgggagaagcaaattacgggcagccttgcccactggtaatgagaagagggcgacagggaggggagaagagggcaaaggggagagctgagggcaggtggggagaggaattgttcaccattctctgccataaagtgactgatgtgctgtaccaaggctgccttacagcttttccttaagatcaagaagttcctatggcctcctccccaaccccatcctccttcttgcccgagaagcaactgcttttatgaatttgtggtatctcctgtccctgttttaaacctcgagaaccaacagtgttatccaaaacaacatggtattgattttgtggtggtttttagagtttatgtaagtggcatcaaactatacatggcattctgtaacttgcttcttctaccatgtgatcgttggcttttctagatgcatccatgttcaaatgtgtagctttagttcatttgtttttaactgcatgaatatatcatagcttattcacttaaaagaaactgaagacagtgttcatgagtaggaaaaggagaatcagacagccgtgggatcaatcctcacgcccacctttaattgccgtgtctggcgaaggcctgtcccctttctgaatcatccatgcagataaccccgcacgtcacaagtgagttgtgtggttgaaataaggcagtgtcggagaaagcacctaaagcaatgtctatcacatagcaagttcattactggtagttccctttctttttccccactgattagcagggagaggtggtggtaaaaagctagatttagtgtaacggctttttaaaaaaatattttaattccctttttaagagacagggcctcactctgtcaccaggctggagtgcagtggtacaattatatctcaaggcagacttgaactcccgggctcaagcaatcctcctgtctcaggcttccaagtagttaggactacaggcacatgccaccatgcccggctggctttttttatttttggtagagatggagcctcgctatgctgcccaggctggtctcaaactcttggccttaagtgatcctcttgcctcagcctccccagtagctgggattacaggaatgagccactgcacctagctgaaatttttaagaaggtggatctcctctgcagacttatttctctacccagcctttacaatcatgcaaagatcaactcaaggccaggacagatgagttccaatctatggagcactgaccctaccagtgcaggcagtagggttgcccttcacttctcagctgcattgcttcctcttcagacctctcttctcaaaggacctgcccccagccagtcatcctctgcccagcttttctggtcccaagcttgtagccagctcctccagagaggtttcacccagtcacggaaactctgtggcctgaggtttagggaggtctggtagaggtaactccctggaagaggctgctgctgagaactgcctgaaactcccacttcctctgtgactgcaggtttccaaccacaagcaccaaagcagaggggcaggcagcacaccacccagcagccagagcaccagcccagccatggtccttgaggtaagtgctgctgcccagccaggccaggccagaattcgaagtggaaaacccggggcatcaggggaatgccagggctggcccacagcccagggtcaccacagggttgggtgagtagctggaggccgcatgggttgtggcagaaacagcactggggaattgggaacccagcttggccactgaccctgggtgcctctcctctcctctctggcttcggtgtctcgtctgcaaaatggggggggcggggggcaagtagactcgaaggctcccttcaggagacttggaactttgactcttggcgtgctggactaaattggtactggggagacctgcaggtccatagtgctgggggtgaggggataaagaagattccttctcaagctaagtgggggatccccttgtgggcagctaaatggccgtgcaagcctcagtgtagggagggggaaggactgggcagactgcatgcatttggggggcgtggtgacttgtagagaggccacacggtgggggggggcgcaggaagttggggtccccggacaagggccaaggagggaagaggagggttagtgactggaaaaggggattgtggagaggcgctggggaggaaggtggttgaactatgtgttgggggtggggcactgaggacgcaaggcaagcctgaagggagagcagggagagagaggacagtgggcagagagggctctgggcactggagggacgctcttcttcctgcccaggggtccctgggccgatgggatcacgcagaagaatgcgagagaagcagcctttgagaagggaagtcactatcccagagcccaggctgagcggatggagttgaggaagtacggccctggaagactggcggggacagttataggaggagctgctcagagtaaatcacagactaaatcagactcaatcacaaaagagttcctgccaggcctttacacagccccttcctccccgttcccgccctcacaggtgagtgaccaccaagtgctaaatgacgccgaggttgccgccctcctggagaacttcagctcttcctatgactatggagaaaacgagagtgactcgtgctgtacctccccgccctgcccacaggacttcagcctgaacttcgaccgggccttcctgccagccctctacagcctcctctttctgctggggctgctgggcaacggcgcggtggcagccgtgctgctgagccggcggacagccctgagcagcaccgacaccttcctgctccacctagctgtagcagacacgctgctggtgctgacactgccgctctgggcagtggacgctgccgtccagtgggtctttggctctggcctctgcaaagtggcaggtgccctcttcaacatcaacttctacgcaggagccctcctgctggcctgcatcagctttgaccgctacctgaacatagttcatgccacccagctctaccgccgggggcccccggcccgcgtgaccctcacctgcctggctgtctgggggctctgcctgcttttcgccctcccagacttcatcttcctgtcggcccaccacgacgagcgcctcaacgccacccactgccaatacaacttcccacaggtgggccgcacggctctgcgggtgctgcagctggtggctggctttctgctgcccctgctggtcatggcctactgctatgcccacatcctggccgtgctgctggtttccaggggccagcggcgcctgcgggccatgcggctggtggtggtggtcgtggtggcctttgccctctgctggaccccctatcacctggtggtgctggtggacatcctcatggacctgggcgctttggcccgcaactgtggccgagaaagcagggtagacgtggccaagtcggtcacctcaggcctgggctacatgcactgctgcctcaacccgctgctctatgcctttgtaggggtcaagttccgggagcggatgtggatgctgctcttgcgcctgggctgccccaaccagagagggctccagaggcagccatcgtcttcccgccgggattcatcctggtctgagacctcagaggcctcctactcgggcttgtgaggccggaatccgggctcccctttcgcccacagtctgacttccccgcattccaggctcctccctccctctgccggctctggctctccccaatatcctcgctcccgggactcactggcagccccagcaccaccaggtctcccgggaagccaccctcccagctctgaggactgcaccattgctgctccttagctgccaagccccatcctgccgcccgaggtggctgcctggagccccactgcccttctcatttggaaactaaaacttcatcttccccaagtgcggggagtacaaggcatggcgtagagggtgctgccccatgaagccacagcccaggcctccagctcagcagtgactgtggccatggtccccaagacctctatatttgctcttttatttttatgtctaaaatcctgcttaaaacttttcaataaacaagatcgtcaggaccagggcatgttcgtgcatcattacagtcagcccagcccacctgggctccaggggcacttcctggttctccctgcctggccctgggtctgtgccagcccatcctgccttcatcaatgtctgtctgcagctttgtctctgccctcgtgggcactcctgttctactcacagggaaacacccaagtacatgggtgcagagtgagcagttaggcagctggttggcataattggggaaggggccatcagacatgaacacgagagccctgcactccagcagctcaggacaggaggcaagatgtgtgtgaaactagcgaaacccagcagcctgggccatggggcacataagtggcacagtgaacccagagctcagggcactgaaggttggagccatttgggaaggcttcttgaagacttaaagggcaagtagtatttccaggcataagggagggcagtagcaacagtgggaaggctgaaagtaagactgaaaggtaatttgggatcaggtgatggtattggagaccagtcagaaggccctactggtttttcaggtgagtgatacaagcgcttactagggaaatggctgtgggcttgaagaaaagcaaggccagatgacttgccaacagtcattagcacacagccacctggaggcgggctgtggggagcatttttccagggctatcaatgaggccgaagtgagggaaagaaataactggggtttcccagaaaggcaagtgacagggctgagttaaaacagaaggtgacaaggtgggtctactgcactgtcagtgccccctaattaagtcaccaatgtgctaggatccagtttcacaggccagctgcacccctgctgaaactgcagaaacggccggagatgggaatggggaggaagaatctgaagagttacctggggaagctcgtcccaccacataaacacaccatcccgctttgtggcctctagacactccaagcttttacaaaatgaagaaaggaagggaaatgacagaatgcaccctgcctagaaaaagtatcagggtagtcaagatgcttgtggctggctgaaaacatggcgcccaagatgtccccgtgctaacccccagagcttgtgactatgttaccttagatggcaaaagggaattgaggttgccaatcagctgacttgaagaagaggctcctggattatccaggtgggcccaaagtaaccacaagagtactttaaaagtgaaagaggcgccgggagcggtggctcacaccttaaatcccagcactttgggagactgaggcaggcggaccgcttgaggtcgggagttcgagaccagcctagccagcatggctaaaccccgtctctaataaaaacacaaaaattagctgagcacagtggtgcatgcctgtaatcccagctactcaggaggctgaggcaggagaatcacttgaacccaggaagcggaggttaaagcaaaccaagatagtaccactgcactccagcctgggcgacagtgagactccatctcataaaaataaataaataaaaataaaagtgaaagagagaggcagcaggggagtcagagagggagctgttactgcctctggaggacgggaccatgaacccaggaaatgtgagcagcctctaaaaggcagaaaaggccgggcgaggtggctcgcgcctgtaatcctagcactttgggaagccaaggcgtgtggatcactcgatgtcaggaattccagaccagcctggccaacacggtgaaaccctgtctctactaaaactacaaaaattagccgggcatggtggcaggtgcctgtaatcgcagctactcgggaggctgaggcaggagaatcacttgaaagcaggaggcagaggttgcagtgagccaagatcgtgccactgcactccagcctgggtgacagagcaagactctgtctcaaaaaaaacagaaaggaaaatacaaggcaacagattctcccccagagcctccaggaaggtacacagccctgtcaacaccctgattttagcccagtgacaccggtgatggactatctgacctccagaactgtaaatgtgtgttgttttaagccactatgcttgtggtaatttgttgtggcaaccataggaaacgaatacaatgtggatcccaatccacatcctgaatcactccaagaagtagggaagctgctaagtccttatgggcagtcacagaaatccagagagaaacacggagtgcggcacgctcctctagacgagtcctggagggcttcagatgttcggagtcttggacaaaagaccagagggtctgttctgctctaggtgcagggattcaatgaacagactttgctaacaagcaagatgcagaaaacttttattttttgattacatggctcagatagtttcaatcaataccatcaacaacgaattttatgaaacacgtttgtctttcctgtctacatagatgccacagtagccctagtgtttaagtgttgcctctcaaacttgtcctctttccagcattctcctctctcaacctgccactcttgaaaactcacttttcttttgcattttgttctacatgtgaaaaatatggaactcaagtaagacccaaggtagatcccaagggcttcagaaataccctgtcaagggcacagaatggttagcaatagagtccctatttaaggtcaatcatcgttaataacatgaatcttaaattctaacattacttacttaacagtacctaaattctaatattcctaacttcacaaaacaaacttttctaaaacttcttaccagtaaaggatatagctcacattaatatactctaagataaccttaagaattcttcattgccttgtaattcctgccaagtgttttcatcacatccccaaggctaatcctagccatctcctgcataatttttctataatacttctgcacatacacagcaaatggtcacacgtggggcacaatacgggtcccatctttctgagttaatggcaccatgaccagagaccccttgcatttggcacagatgaagcggctggtgtccaacgatttggtgtagcagccaatcctgggaaggaatggaacaacacacaacaaaagaatcagtcactgcacctcagcatcagctctgagatgttagccttgggcccaaagcaatacttttctctgggttgtcagagacccgggcaccaagcggcagcagtggtcaggccggctcaaattacggaagagaaaggagaaagagaacgtggaaaggaggagagaggttctcctcttcagttcagacagccatctacttataaaatcactgaagagccacttggaggccccagcaaaacgtaactgggaaaagtctgagaagagtcttacctcgttttgcatccagtacattcataatggaccttgtagttaatcttatagttatggcaacgggtgaccctgggcagctccgggtgtatcctgttggatttcctggcataatacttccatgcgtcaccatgagaatcatggataccatcaatcagccaggaggcagcatggcacatttcatggatcaaggtatcccggattcggtcttgaaagaagaatgaaaagaaatgtgagcactaaaaccaatcctctttttttttttttttttttttttttccttttttgagatagtcttgctttgtcgcccaggctggagtgtaatggcatgatctcagctcactgcaacctccacctcccggtttcaagtgattctcctgcctcagcctcccaagtaactgggattacaggcatgcaccaccattcctggctgattttttttttttttttttagtagagacggggttttgccatgttggccaggctggtcccaaactcctgacctcaggtgatccacccacctcggcctccctaagtgctgggattacaggcgtgagccaccacacccggccccaatcctcttcttatctgctacccaacaacccctcgactttcagcgccaccagacacaaggctatcttaaagaagcacatgcaggcaagcacgagtgttaccttcccaggattctcaaagtgaatagtgaacctacttcaacccgatattgtttatggcaaagagccttcggtgagcaggtcttttcagagcagctccaacatgctcatttttttatgaggcacttctagaaaaacatcaggacaagatctagtttctgccctccaggaacagagatggacagggtggggagcaatcgctatggccgtgggatttggttaggagaagctccatggtgaaattgagatctcaggggttcttactaattgattgaatttgcaaagttagaaaggccattctgggtgtggcaaaacatgagtatgtggcacatttttaaaaacattttagagactaagtctcgctatgttgcccaggctggagtgaaactgctattcacaggtgcgatcatagtgtactacggcctcgaactcttgggctcaagcaagcctcttacctcagcctcccaaatagctgggactacagatgggtgccaccacacccagcctgtggtatgttttgaaggccagtgtgaagagagcctgtctggggcatgggctagtggtagaatactgagagacaagattggccaagccaaacaggagcagattacaatggcctcaaaagccaggctctaggccttgaaaagccctggtttctcagcaggaaagcaatgtagtggcatatgggagaccaaacagagcagggatgagggcctgtccttggatggaggcacagatagagaaggaatggtgagctactctgaaggaagatttggtgattggctagaaagaggggaccttgaacctcagctcctgagagaatgaagatgctactgctggcaaaggggaaatgcagagagaaaggcaggcctggtataaagatcgataggtttgattcacagggatggtgagacatccaataactatgtcctctaagcaacacacagcatgcctgcccacccaagaatgacagttcgagctgtgacacaggctaccagctaggagtaatttcacaggcacggtgtcagaaggaaagagcacagtggtgaagctaccacactcctgccatcacctgcagagtcgcagactttcaagccaatctggatcttggcaaagcgccgccactttgggtaccacatctcaccagtgctgcataagccagcagttttcaccatcttgttattccagcctatgcgtagtttctctggcagctgagaatgaaacgcaaatgaaaggaatcagaaagctgttttgggtttttttgtttttttgtttttgagacggagttttagctcttgttgcccaggctggagtgcaatggtgcaaactcagcccactgcaacctctgcttcccaggttcaagtgattctcctgcctcagcctcccaagtagctgggattacaggcatgcgccaccacacccagctaatttttcgtatttagtagagacagggtttcaccatgttggtcaggctggtctcgaactcctgacctcaggtgatccgcctgccttggtctcccaaagtgctgggattacaggagtgagccaccacgccgggcccagaaagcagttttaagcagaccagaaaatattaactccagagttttttaccctctaataaaaaggaaaaagaaccttctcccccaggttcttggctcagagcaagtttgagaagaaatttattcaaagagcacacaaatcaaaacattctgaggagaataaaagccacattaacgtctgggtaaagacaacaaacaggcaatcaggacacaagggagattgatagaacacgtgagtgcaggacttgggtctcttgtccttagggcagccaaggagagaaggacaaccctgctgaggtgggcgaggctggactgaaaaggcaactcagaacacttcagtttccacccatctgatgtgacaccactgtcatccagaagggcatcaaaggctggggaacctttaggaatatgtaagaacttccctccataaagtcttgtcaccagagatgatgaagtctgaaaaatctaatgaccaataggtctctctgcctccagattttctccaatccagtccatacccacaggttagtgtcaggttaatttctttcagcaggttaatttcattcactccctgatgcaccccatccctgtgcagtggtgcctactgatgtaaatttcacctcctccaacctgattcccaaggccctctggtatccagtcctacactatcaaaaaataagagcttactatgtcctaggccctgttctaggcactgtatgtgtattaacttatgtaagggtaacaataatcctatgaggtaatacgtactgtgttgtccccattttacagatgaagaaactgaggcaaactgaagtcaagtaacttgttcaaggtcacacagctcttttccattatccttccacaagaatcctctcttcctgattgtcgagcctcaactctccctctcccccatcctgtttgccacttaccatcctttaagaagcagagtctcacttcctccaggtaatcttacttcctggctgttgaggctcttagtgatttctccctctgctgatctcctgtggtaacagccatctgtcctatacattataactcatacacattctctattgctttcacctgtaccagggctcatctcccaaccttaactgcctctgctcaagggcaggaagtatacatggttagcacacctcacagcaccaagagtactggtgtatagcaggtgctcaatcagtgctcattcattgatcctacctttttatcacagacggatctgttaaacaggtcgtagattctctgaaccaattcatccttatttcgctttaaattttttccagagtatttctttgacttttcaaggtcttgcaagaaacatccagggactttgcatttaggagtcctgcaaagataaattcaactgaggtttatgtagctaaagagagagaaggaatgcacacctaagcgtctcgtcaagagaccctgaaaacatgttgctccctcttccatccagctccttagatcagggcatttcccaagccttcatttgtagccttttctcttctctctttgcaaccctcagaggtgtaaagcccgtggtttcaagctcaacgagacttatccccacatctgtatctgcactctggagctctctcctgagacctagttctgaatttacaattgcccagtgcaaacttccaactgattaacatgaatgtatctccagctaaacgtgtgttcaattatcaaacttgtgttacaattggctgaaaaacctcaaagacatttaaaaattcctcttcttggctgggtgcggtggctcgcgccttaatctcaacactttgggaggccgaggcaggcggatcacgaggtcaggagatcgagaccatcctggctaacacggtgaaaccctgtctctactaaaaatacaaaaaattagctgggcgtgatggtgggcgcctgtagtcccagctactcgggaggctgaggcaggagaatggtgtgaacccaggaggcggagcttgcagtgagccgagatcgcgccactgcactccagcctcggcgacagtgcgagactctgtctcaaaaaataaaacaaaataaaattccttttctctctttattgggcacagagacagactatcttcttcacactttctcttccagccagcacctcctttccatccccctggttcctactctagttcaagttcttgtcctaccctttaatgcctagatatgagaacactccagtgttccttacctccaggctctgtctcttctcatccaatcacacacacccctccagattcatttttgcaggccatgctccaattaatgtccccctctggtttttcactgactgcctggcctgacattcatggccagggtcaaccctgtccaaagctctattcccagctaccactgacactctagccaaagtgggcaacttaaatgttccctggacacaaattgcaatttcccgcatttgtgccttggtacaatctattttcccatggcttacaaggactacatctccacctctactgagaataaccttctgtgtagcactttatcatttgcaaagaacttctttttgcattgtcatatttaatcctcacaactgcccttcaaagaagctgttactatttttacgatctccactgtgctcaggggtcaagtgacttgcccagaggtcacagagacagtgaatctcctgatccaaatctcatggtcttttgattaaaccacaatcgctgccccatctttcaaggcctaattcaaatggcacaaagaataatgctgaacacataaaggactcatactgtaataactaccatttaaacagaagcatttttatcttagctggaacagtccactaagtccagagatgagcccaaagagctggaaagacaaaatgggagcaaatgcagcaagtttctgacttaatagaactcctaagactaagaatttgccagaacacttattaacccttaagtcacaaactaaaccctacgtgaggaagttgggctgcagaggggggaagtaccagacaagacagaggttacagaaggttcttcatcccaagcctgaaatgggggactcaaacatttctgcctccagttacttaggtctgaaagcaaatttacatcagtatttaaggtggcagatgcaaacctgaaccctctgcagactttggcagagcccggacccctgtgtgtttgtgctcacagaacgttggccttgtggcttagcatactttcacctcaaggcctgtggctctttactgcaggctgagcaccttcacatcagaggaaccgacaagaccccaaactgggtacatcagacaccatgaccagcaagcagcctacacaggaacaatgctaagcataacaggaagcctccagactgacacaggaagtgctaaacaacagttaagagtccaaacgggctagcctcctttggataatgcagactgacaatgacaccaagggacagcttttcccttcttttgtcacgctctagcaaagtaacctgggagttacccaagacacacgtccctggaggcaaagcagcttaaatatgtagttaggagtctggagcagaaaccttgctgaaaggggatccagctaagagagtacttggcaagctgctaccggctgcctaagccagtgcagaaacagacagcccttctgctcaggtccggggtaacctggtgcccctatgcctgacacatcagtctttttcccctcccttaatatacacttattgtccccaaatactcgttaaaaaataacatatagtccttcaaatacattctttgtcttgtaagacaattcagatgtgagcatacattactcttcaatgaaagtaaaaacaaagaaaattatgcttactatatcaaatttttaagggaaaaactaagaaattcctggaatctaaataagaaaatatattaattttttgccttaagtattaacatgtctttggtctacaggatcagtggttgttttcagtatcaactatatatagcttaataaaaataaaggaatgataagcaatccatttcatcctaatatttaagcttaaaaattcatacagatatacatagtagtaagagtaactgggttcagccaaagcactagaaaaacctggaagacaatcttgaccactctccctccaattccaacagattaatgtgttgctttcgccttctcaccatttccagtgcctttgccttggtttagcacaaactggtggccatgaggctgtatccagcctgaagaaaagtgtcttgtttggctacacattgttctttgatctgagttgaaggacataggcaatctcagaggccagagctgctgtgggtgcagaaaggccccctccacccaggtaactgcaggcaccttggcggagagcccatgcccagcctcagagagtggggaaagaagggaggaaggagcca

SEQ ID NO: 376 - DNA, 1630 bp, Homo sapiens
ccaaccacaagcaccaaagcagaggggcaggcagcacaccacccagcagccagagcaccagcccagccatggtccttgaggtgagtgaccaccaagtgctaaatgacgccgaggttgccgccctcctggagaacttcagctcttcctatgactatggagaaaacgagagtgactcgtgctgtacctccccgccctgcccacaggacttcagcctgaacttcgaccgggccttcctgccagccctctacagcctcctctttctgctggggctgctgggcaacggcgcggtggcagccgtgctgctgagccggcggacagccctgagcagcaccgacaccttcctgctccacctagctgtagcagacacgctgctggtgctgacactgccgctctgggcagtggacgctgccgtccagtgggtctttggctctggcctctgcaaagtggcaggtgccctcttcaacatcaacttctacgcaggagccctcctgctggcctgcatcagctttgaccgctacctgaacatagttcatgccacccagctctaccgccgggggcccccggcccgcgtgaccctcacctgcctggctgtctgggggctctgcctgcttttcgccctcccagacttcatcttcctgtcggcccaccacgacgagcgcctcaacgccacccactgccaatacaacttcccacaggtgggccgcacggctctgcgggtgctgcagctggtggctggctttctgctgcccctgctggtcatggcctactgctatgcccacatcctggccgtgctgctggtttccaggggccagcggcgcctgcgggccatgcggctggtggtggtggtcgtggtggcctttgccctctgctggaccccctatcacctggtggtgctggtggacatcctcatggacctgggcgctttggcccgcaactgtggccgagaaagcagggtagacgtggccaagtcggtcacctcaggcctgggctacatgcactgctgcctcaacccgctgctctatgcctttgtaggggtcaagttccgggagcggatgtggatgctgctcttgcgcctgggctgccccaaccagagagggctccagaggcagccatcgtcttcccgccgggattcatcctggtctgagacctcagaggcctcctactcgggcttgtgaggccggaatccgggctcccctttcgcccacagtctgacttccccgcattccaggctcctccctccctctgccggctctggctctccccaatatcctcgctcccgggactcactggcagccccagcaccaccaggtctcccgggaagccaccctcccagctctgaggactgcaccattgctgctccttagctgccaagccccatcctgccgcccgaggtggctgcctggagccccactgcccttctcatttggaaactaaaacttcatcttccccaagtgcggggagtacaaggcatggcgtagagggtgctgccccatgaagccacagcccaggcctccagctcagcagtgactgtggccatggtccccaagacctctatatttgctcttttatttttatgtctaaaatcctgcttaaaacttttcaataaacaagatcgtcaggaccagggcat

SEQ ID NO: 377 - protein, 364 aa, Homo sapiens
MVLEVSDHQVLNDAEVAALLENFSSSYDYGENESDSCCTSPPCPQDFSLNFDRAFLPAKLLFLLGLLGNGAVAAVLLSRRTALSSTDTFLLHLAVADTLLVLTLPLWAVDAAVQWVFGSGLCKVAGALFNINFYAGALLLACISFDRYLNIVHATQLYRRGPPARVTLTCLAVWGLCLLFALPDFIFLSAHHDERLNATHCQYNFPQVGRTALRVLQLVAGFLLPLLVMAYCYAHILAVLLVSRGQRRLRAMRLVVVVVVAFALCWTPYHLVVLVDILMDLGARNCGRESRVDVAKSVTSGLGYMHCCLNPLLYAFVGVKFRERMWMLLLRLGCPNQRGLQRQPSSSRRDSSWSETSEASYSGL

SEQ ID NO: 378 - DNA, 52464 bp, Mus musculus
tttcacaacaccttgtgtgttttccagatcatttcccaaacttcagctggctgagtcacgaacacaattagttagctctctgcatctctggacctcaaatcccttgagttaaccaatcctagacaggagataatcgagagaaatattgggtgtgttctaaacgtgagcagatgccgcttgccattgcttcctgcagagcacagtggagcaagtactgacgtagcatctacacagtattgggagttgggagtgatctacaggtggtttaaacatggagaagaggggtgtgcattctgtatgaataatctgtcacttcgtatccagaacttgggcatctgtggatctgggtcagttcaccacagatcctgggggaggggttattgtagtgaatctcagacagctttggaagaaggagaaacaaaatgacatgggatctggaggacagggacagaactgaatataacagagatcacataggaaggacacgtactgatacggcagaggtcgggatggattggaccgtaacttttcttcagccatgaagccagctacttagtagttgaagctggaaatactggacagagaagaggtcatgttcatgcttcagacactaaatggagcaatcccagaaattaccaattgagaaagaaaaaggaaagtcaacagcccacagtcagcagcagaccctgctgggccaaggaatgtaaccattgtttttccaggctcgtatccaaccaggaaatccttcttactgcttccaacagttcatccctttccacagagctgaggcctcagtcgtggctgattttctcttagagatttagttcatgccccccatgagaacaggaagtcaggagttcacaggctggagagccagagaagacattcgctgcagctggagtctgagggcagctggaggctttcctcaatctgctttcctcaaggattgctgccctacatgttaatcttagcttaacatgaccatcacagcaacacatagactgatgttggtccaagtatgccccagacaaactgacaggtgatattaaccatcacacatactacctatcttagctttgttcctacggctgtgagaaaattcacacaaaaagcaacttagggaggagagggtttatttgactcacaaatccagactgcagtccatcattttagtcaagttagatacacaagcagcttgtcctgtcacacccgaagtcacgagcagagagaagagacactctgtatctatttttttatgtatctatatatatgtatctatctatgtatctatctatctatgtatctatctatcttgcctgctagctttttcactcttacacagttcagggcccagactaggaaatggtgctacccacagtgggctggatcctcctacatcaatgaacaacctagacagctacccccaagacatgcctacagatcaacctgaactagagagttcctcattaaccctctcttcccaagtgattctactagctggcacaccaccctaggaaaacaatatcacagtctaacttaaatcttatctgttattaacagatacctaacccaggatgctggggattaagtttgtttcctaatacagccctcactggatggccaacctagcaccaagttctagtcattatcttcctacccatttctaacccatccccaatccactaaccctggtccagagatgggcaagggttctgtctgggagcagtcacttccaggggactttgtagagagctggggaacgggggtatggagggtggtactggtcacatgatgggctgagtgctacaagtatttgatgagcagaggccaaggatgctggaccactccatcatctaactactgtcttctatgatatgtctatggatagatctttgaaggtgaattccctgtttggacttaagcttaaaacctatttttgtttggcatttaactatgtaatttttggtactggactacatttctcaacactgaatgaaattttccctaaaacgacctcgattctgaagttcacatcccaacactggccttatttccattcctaattccaacactatctgatagcagatctccccctcccccaaccccgcctccgcctctaatcatctatctcattggtttggccatgactccccgcccaccccaccccccatgttgtttccacagcagatccaccctagccattcttaaaccatcttaaacccctctccacaaagccagacttcttattgatccccatccccagtgggaagttcttcttactctctgatcaatcaattaatcaagactttgtgcccaaaactactgtttgcagacaaacgcaattctcgctcttcctgaccatgctgctcaagacatagaaaggatcaggacagaaacaaaattgtcctggagattgtcctgcgtgctggccgcctactcagagaaagcattgggaccccatgtctaggttctttctttcctagcactacagctcccgtgagtccccaaagctaatactatatagccttgctgttctgtagggtgtctcagttagggtttgctgctgtgaacagacaccatggccaaggcaagtcttataaaggacaacatttaattggatctggcttacaggtttagaagttcagtccattatcatcaaggtgggagcagggcagcatccaggcagatgtggggctggaggagctgagagttctacatcttgttctgaaggcaaacagaaggctggttctcatgtggttaagagaagggtcttattgcccaccctgacagtgacacacttcttccaacaaggtcacacctactccaacaaggccagacctccaaatagtgccactccctgggccaagtatatccaaaccatcacatagagattccccaaagtccgcctctacaggttctgaatccacagactcaaccaaccttctgtttaaatattcagggaggagactggggagattgctactgtatataaagtatttgccaatcaagaattccccctcccaggtcccgagggctgggcctttgaaggtcatagcccagacctggttccaatctagttctctgcttcttttcactcaggctgccaccaatacttccatgtcttcctcgttatgaggaactgcaatctccctgagcatcgtaacgtctctcgttagaatttagagcactattcgaaggctctgtcagtcaagtgcgattctctggggctctgtgtcctcacctgccataggtgagccttgcaagctcacctgatttagatcctaggactcaggtaaagatgtggacgcagcgacacacacttgtaatcccaacactaaggaggcagagacaggaggatccctgaggctggatggaccagcccttttagcctagttggtgacttctaggccaataagagagaccctgtcacaaaggatggcagaagatgacacacagggttgtcctctggcctctactcacacattcacatacatgtatacatgtgtgtattcatacacacgtgaacggacacaaataaatagttaattataaaagaatttagagtagtatgtagaaaggtgaaggaaaagcggagagaggcccctcctaggaaaaactgagtcacagcccttctgcaaagacactgtttagatatagtctctaatcgtgagggcaacaccataggctcccaggttaacctgctgttccatgagtgctgcatccatgaaaatatggctggcaggtgaggacacagagccccagagaatggtactgagtctgaaaaaaacatcaaaaaaagggagggtgatgagtcatttgaagactctgaggtagggaaaggtcatgtgcactgtagccaagcacttgggttgaggttggggcactggtggcagctgcctccagtgagacaaggcttggctcaccacaaccttaacaccctgtgagcagatctcttgcaacctctgctccacttcctgaatctgccaggttgaggctgcaggtggtcagtggggcttgggattctcagcctagagactgaggaactggctctcacctacctcaaatgtgcaggtttgagggaagctcatggcccaccagggcctcagtcatctggaaggtggtccaggacctgccaagagaatgttacagtccagaaatatagctttgccccaggtgtgttcacagatagactcaggaccagacccagctctccagacatgttatttgtgactctctccacctccctggaagcataggaagttgctgggtatgaggttttatggacaggaagaccagccccacactctgcagctcagagaattttactaacttcccttccgtgaagcctctgacacacatatgcattccatatctagaatgttctttctccacaaatctcttacatggctcttgccacaggcctccttctctgcaacagaccactgccacacacttcctgtgaaaagcagaagctgtcactggggactctctagccctcttcctccaaatacacatacgatccaccttcattttctccctgacaaaggatgccaacctagcacctgcttcttcagagagtcaacccttctctgcattcctggactctcctctgcctgtcccaatcacttcagccttgcctgtctctctggggtcattcttgatagactatgatcattcccaacaacatgtcatcttcaaaacaccactttaggcagtgacacgttgttgctgtgtgatagaattttcctggggagatgcaaaacatacgtctacccaccccagataaggagcccatggcagagcaaaggataaataccaccaaagtccatcttggtgaaccaatgagttttattgagattacttaccggaacatgggcaaggggtgacttataggagcagaagtgactcaaacacaacaccaaagcccaccccagcatgagtgaagacaactcacaaatgctacgcacctggagcacactgcacagcctgcaggcaggttagagggtatcttttccaggtggctgcttcttccaggctgcttgactggtttctgcttcttccaggctgcttgactggtttctgctttgtccaggctggtcttggaatttatttgcagttttgctttcctgagggcaattctcagcctttctctgcatttctagactctcctctactgtttactacaaaggagcctagtgagtcttgttagcttcagggacttcctgaaactatgttgagttgtttactttctgtctcaaggggtttcctgaaagatatacaatgtttcaatctaggaggaaactgtcgtacaacattggctaaaacccaacactgctaacaagtgctggtagggatggagaaccacagggactttcatgctttgctggtgggtatgcaaggtaatgcagccactttaggagataacttgatagtttcctctacaactgaccatattgtaccatctgatctttcaagtatgctcccaagtgttcacccaagtgagctgaagatcacgtggataagagcactcactactcttgcagaggacctggcttgagttcctaggacccacacgatggctcccaacccttcctaaccgcagttctaggggatcggatgctgtcttctgacttctatgttattgcacacaggtggtgcatatgccgcaggccctctggtcccctgtgcctgcataggaaagagtctctagagtagatgagcaaagatttggatgtagtgacagtcagtcaaacacacaagagaggtgttgaatctgaatgtaattttccagtcgagcatcagacttttataatacagaataaattgcagaacaaggcacattgaatttttccaggtgcaaaagaagtgacttcaaaaggaaccagataaatgtataacactagagattagcacagatgcaaggagtgactacaaagggaatttgtagggaccagataaatgtttacattagagattagcactttctgccaggcaagagttttacacttagagttaattgcctcagggtagttaactcttgatacgcctcaaggctaatgtagtgtcaccgaccccaaaattctctaggcctcgttaattcttatctatatctggagactgtccatttttagtatagcatactaatttgctcttggcatggaatgtagtctgtaataagaatttctatctcagtgagaattttagtctctatctgtaaacagctgagtaaaatggcaagtgcttaattgttagtaaactaaatgggttaagctccttgctgctatctgaaatctaagaacactgggaaaaggctttagctatgttagaatacaatcttaaaaggcatttactataaataaggtgatgcttaatagagtgcatgtgaatctatacactagattaatgtggtggaaatttgaatataatgggttagggaaagagatgccataactctgggaggaaaatttccctggattcttatccttgtaaaacagcttccaggcttttcgcctgacaaaccgatccaaactggagagttagctttcgccagaatatccaggaggagagtcttagaaattcatttttcatgagcagctttttggcatttctgcctcacaagctgactccaccagagtgccctgacatgcatatacactaatgtaggcaaaatactcacaaagcaaagcaaataaatctaatttaatcaggtgttttaaactttaaagtcttcttttttttttctttctttctttcaaggaccatagtcttggtgcatctagcaagactccacccaacccaaggtcatcgagcttttcattgatattacttactaggactcttcaaggtttgtgctttatgttgaggtctagggcctacttttgagttagtttttgtgaaaagtgtaaaacctgtatctagcttcacctttttgcatattgagtttgtatcaaacagctttctgctactgtaacacatatccaaggtaatcaatataacaagagaaaaggtttgtttaggcttactctgtttttagagtttgggcccatgattaagtatctccattgttcttgagtatccacagtaaagcaataaatcaaggcagggagcacaaggaagagaggagaaggaagagatcagattcccacagcccccttcaatgccctgttggccagagtctcccagcaggctctgcttcttaaaggcttcactgctttccagtagaaccacagtgagagccagatctttaacccacgcaccctgggatacttcattcaaactgaagtggtgctgtcggtggaaagactgccttccttctagagaactgtctgctaccatatcaaagaccacgtgactgcatttgtgttactacgtgtcccatgtaattgatctgtttgacctaaaagtgagattgaatgctctcatggaattaatcatattaacatttagagtttttgggggggggttattggatattttctttatttacatttcaaatgttatcccctttcccaccctcccaaacccttatcccattccccattcccctgcttctatgagggtgttcacacacccacctgcccacccactcctgcctccccgccctggcattcccctacactggggcatgctgccttcacaggaccaagggcctcccctcccactgatgtctgataagacatcctctgctacatatgcagctggagtcatgggtccctccatgtgtactccttggttggtggtttagtccctgggagctctaggggcacgggggtctggttggttgatattgttcttcctatggggttgcaagccccctcagctccttcagtcctttcgttggggagcccatgatcagttgggttttgtttttagtgattaggacaatgataatttttccacaagggcatacatagaaatttcaacaatcctgtgtgctgtgtgtgtgtgtgtgtgtgtgtgtgtgctcgcatgcaccccattatactttattcctgtgccctcattcctccctggccaccccttcctcctcttggtcttcccttcttcctcccaggtacagagcccctggattctactttcatgacttgaatgtctgatgtcctctctggttctccctccctccttggatctcctcctctactttcatgccttctgtctacttccattgcttatatgtaaatttgcatatatttaagtccacactccacatatgacagaaacagaccaatattattgagctgagtttggtatattttgctgaacataatgatttccaatcccacacgttttctgaaatatttctatttttaatgtgcatgtgtatataaaagggggcatgcagaccacagttttgtatcatctttaccccacttgctcggggctacttctacaacttctttgaaactgtggctgaaactatttcagcactgaacggcttttgtagagaaccaggatcccagataagagcctttcaaattcatgagactggtaggaattctgccagtgtgacataagtggtggaaacctcttcaggtcagcccagaaagagagactcagcaactgtcagtcctggtagatgaaactgttctcttaaactgcatatggtggctctggaatggtgattctagcatttggtgggtagggcggggagatcttaagtttcaggccagctggacacacaaagagatcttgtctttaaagagggggaaaacacatacacacgctttttaacggaaagaaaatccctttacataaactgtgaactacctccccttctcttccctcggagatctgaaagtgagaatccaggcccaggtaggcatcattgccacgcctcctcttacagacttccattagcatttccaccttggaacttccaccttcatacttagactgtgcatacgctacagaaagctcccgcgtattccatttcggaagacaagggatgtcagttcctaagtaggtatggaaagattgtttctccttactctaaaatcgtttggtctttagccgggcgtggtggcgcacgcctttaatcccagcactcgggaggcagaggcaggcggatttctgagttttaggccagcctggtctacagagtgagttccaggacagccagggctacacagagaaaccctgtcttgaaaaaccaaaaaaaggggctggtgagatggctcagtgggtaagagcacccgattgctcttccgaaggtccagagttcaaatcccagcaaccacatggtggctcacaaccacccgtaacgagatctgactccctcttctggagtgtctgacttacatataataataaataaatccttaaaaaaaaaaatcgtttggtcttgagagagggccctggggaatagtaagcaaagacccaagaagaagcaggcaatgagttatggtatttataatttttgtttgtgtcctgtgtggaaaattataatcagaggagcttaaaaacaagtaagcacaagatgagagagggagagaagagggaggactgggaggggaggggaagagagggaagcatgattgacaagcgttctgacactcagttctgcccagacccctcttcctttgtattttgagtcagggtgtccctacattgcccaggctggccttaattttgctctgtatcagataggtattgaattcgagatcctcctgccaaggccttcctggaagaagagagtacacacccgcatcactaggccaggcacccaacccattcgtatccagttagttctagggatcaggcactacctagtcctccaaggaggcagcgataaacacaacaaccccgatccgttaactctggctccctggactgtacttgaagtgggtggggtcgtaatggatgcgaaagtgcccatttgtcgccggctccgcccgggccccgcctctcgcctcgttctctgttcaccgctaaccccgcggctgggaacccttggcctccgggagcctgcgtggtctagccctagaccaggggaaaccaggctgccagcggagactcttcgggtcgcggggcaccggccatcccgccgccgtccctttcgcctggctcggctcccgcctgcctccactgctcgccagccgcgcgcagctgcgcctgatgcccagagcagctcggaggtggccccaggacatcccagagggggattcacgagacccggcgattcaggtactgtactgcgggcattacggggacatgaatgggtgtcgctcgcctcgcggacagtaggactgggccgcctccccgctgccagttcccggaatccccttttcaattctcctcttcgggactccgcctcttcctgcctttcttccgtggagagtctgaggattctagctcccccgacccacaagctgcgtatggggggccctcgtggcccccgcatgggcgccttcctttcaccgttcctttggtgaactctgggtttttgtgggctctctgccttcactccaccagcgtcgcctcaccgagggtgcatggggcaccttagcccgagccattgccagatcctagggggtccacattccttaggatccactacgccttgccaagctagttatcatctccagcctctgggtcctgttctgcgtcctgacacccctccccctaaacacacacacacacacacacacacacacacacacacacacacacactgcgcgccctgaaacctacctaaggtcccaggatcgtttgttcaagctcctacgaggtcactgaaggggttgtggcccgcagaagatgggcagggatgggatacaggaaaggcactgagtttattggtagcttgcatttctattccaagccagccaatagtgcatgcggtaaaccgttggccccattgacccatttatttggttaacatggctctactggaaaactttgacaacctatgaacttttgtgttttaatgtttgttttatgtccctgttttgtgtgacaggagatcttaggaaatagcccaagtgtcatctaagaaaggtgctaagattgggaccagagactgagtttgccctactgtcccctgtcccttgcctgtcagtccttctgtgcagccttgggagagtaatgaggtggggtctggtactggggtaacagaggtcacaccaaatatggcttcatcgacttcaccaacacactagcaatttggggatcgttaatgaggttcatcagtgtggcgcaggaagtgactgttgttcaaaagtggcttttcaaatttaaatcataaaaagaaaaacccggatgtgactattctaaagttttttcccctgtatttatttgaacatttaaagagagctgaagttgtagtgccccttcctcgtagtcttggatttcctggcttggattctcagggctgcaagttttagttaagtagttaatgttgagttaaagagctctctgaggtttggtttgagttactcaacaatgtgtctaaaataaatctaggaagaccatagcctaagaggtactgttttagaagtgaaactactttttgttgttgttgggttggtggtggtagtggtgcaaccatatcagataaatgataacagtcggctgcggagctacagccccagaccagacgtaaaacatgcatacctccatctactgagtaacctgtaatctcacttaaaactcaagggactgaggtgaaaggatgttgtgttagaggcaggagtaagctgcttggtgagatcttatctcaaacaaagaaaagaaaaaaaaattagaccactcccaaattcccaaatgaatattctactactcctacctgtccacaccaagcctcagtagactgattttcctgttacatctctagacattcacactgttgaagattcagtgatacaaatatattctctgattactggccttcatattttaatctaacctgtcacccaaattaaaatgcactgaccttaagaagttcttgaaaacgggcaaccaagtgagaagagttgttcatgctgccatttctggttccagaaatgtctaaagtgtattctatcattcatgaaatcagaggtgctggcacagagcctgtgttttgcccacccttctcaagtatagccatcatgactgcaggctgagccagggtccatactgatcatgtatgacctgtttttatgccactaaccccccactccaccccccaaaacagtgtgtagtggtttgaatgagatagaccatcattggctcgttagttcacgattagtactcagttgatgagctgtcagggagggagggattaggaggtgtggtattattagaggacttgtgtcactagggggtgggctttgaggtttcaaaagccggctccaggtccagagtcagtcagtctgtctgtctgtctgtctgtctgtctctctctctctctctatctctatctctctctctctctctctcctctgcctgtggatcaagatagcaggatgtagatcttagcttctgctgcagcacctgcctgcatgccgctatgttccccgccatgttcccaccatgatggtaatggactgactaaacctctgaaagtataatcaagaccccaattaaatgtttcctttatataagacatgtcttggtcacggtgtctctccaaagcaatagaacagagacgaagacacggtataagagctagttccgttgtacagagtattctaagtaagatggtggcaatttactttacgtgagaggatgtatgttctgtgcagataccctgccacttttataaaggacttgaggattctgggggtaaagctcctggcatcaaccccccaagggatattcaaagaccactgtccagttccttgaagtatctttaaagtatagtaggggctggtgaggaggttcagagccttagttctgaaaaaaatgagaggacctgagttcaaatccccagtcttcacatacaagccatagccatgcaaacctttagccccagccctggacagtgaaaacaggtggctcccagcagccctctggctagctagcctaaccttaacagtaagctttgtgttcagccagaggccttgtgtccagaacaagcaggaagttatagaggaaagacttctgactctacctgtgtctaaccttagcttacttgtgtctagggacacacacccagacatacagccaacccacacatgtgcacacaaagaatgaaacttgaatctctttcttttggaattctcaaagaattaagcctttaatccctgggctgaggtaccagagaaaaagggatttatgtgtgagctcaaggccagtctgggttatcatggataacagcaggttatcccatgccatccgaggctacatagtaagaggctacctccaaagaagcaaacaacaaaaagagagttaagctggtgtgtgcaatccagggaagaactaacggcaggcaagcacctgagaggaagctggctgctataacaacagtgggaagcagaggaaagggcggaggagggcaaggggtgcggatggggtggaggaaggggtgaaaattattggaaagtgtttttccaacaggaagatgcacccagcagtcagcctagaagcccgtctacaggctggataaccttaacccttgccttagcttttgttcgttcattttcaattctgagattctttaaaagtgcctttaactgtgctccgagcattagaaactgttctacaggtccaacagaagtcttgaacacttttttttagtcatcaggaaagaagcgaatggccaagtatggccttatttctttttctcggaggagcagtgggcctttgtgtgagcagaggcccttgagaggggacggccacagttggggagcaatccaagacaaatggttgactccattcgcctctcccctatgggcagtgagcagtaccagacaccagagtctctgtggagaaagcaagcccagggttttggcacaggcctcgctcgagttcttacgggctgtgccgtataccctgaccagagtgtgagctcctccttcggaacaagaggctgcccttgctctcctgacaaagcagaacccactgagttagatgaaaagcagcttaagattgcagtgcaccacagtacagcagctgcaatggaagccatccaagtatagttctgtggagtgggagacagagtagcacaggaggctcacaaggggtctttaaagtaaaaaagccgggtgcgcgctctctctctctctctctctctctccctctctctctctctgagatgctcgcctagcgtgcgtgaggcctcctaggtttgaccctgtatacctggtgttaaagaatgagagaagatgacaagataaataaatatatttaaaatttttttaattagatttattttatttatgtgagcgttttgcctgaatgtatgtgttgcactgtgtgcatggttagtgacagtcatggccagaagaggccatcagagtccctagaactggagcttcagatggttgtgagccaccaggtgggtgctgggaatagaacctgagtattttgtgagagcactaaggcctcttcaccgctgagccgtctctccagccccaaatacaaatattttaacaacagaaaggcttgctttaagcccaaaggaaagagacagattaagttacttagaagagtctcctagggggcaggcacagcacaatcagctatctaggatagttggaatcttttgtacagccaaagcccccaagtacaacagaaagcgcacacatgcacaccagaacaggacgaaagaaagaacactgaggtgaacgggggacgggcaacagggcctgtggccagcagcaagaatggcatgcgcgctgcgctcagcgtcaagaggatcttaaatgatttcagctcgttgaaaacgaatgagtagaagaaaaagttctgggaagtttctgggaagaaaaagttaagggagaaaaaaacaaaaacaaaaacaaaacaaacaaacaaacaaaaaaaaaccccacaacccaacaataatagcaaggaaaaccaagccgacctcagactttgccagagtcaatcaatgattctatgcggtctgctcagctcgccattcaagttgaaagtcggtggtcagattcctcatatactgaaggccaggggtgagggttgtggcagaggggacagctagaaaataaaatgccagaaacagcaaattctcataaacaaggtacaaagcttccacagctgcatcttggtgcagcatagattcgctggctcaggaaccggaagaggactttgtagagcccaggatcagggaatcttttgtcacctaacatgggggaggagggtctggtagccggaaactgacacaaagcaaggtggtcctcagtcaaaatgttcagggcagaaagcaaaacttcaggctggagaggtggctccgagggtaaagagctcgctaagcaagcaggtcatgtgttcagtcccttagagcccccgtaaaaaaaaaaatctggggcggggtaacactcgcctgtaatcccagctctggaatggatgatacaggaggatccctgggtccttctggacggccagtgcagcccagtctgtgggttccaggttcagtaagagaccctgcctcaaaaaattaggtgtggccgccctcggacgtttgaaactctaggagcccgccactcctgtgaaaaccgtcttgtctctttaaatgaaattactgtcgctttgctaaaaataaacaaataaagtgaaaggtgatgggtgaagacatttgacatcgacctctggcctccacatgcctgctctcacaaacacacaaaccagaactacaagagaaaaaaaaaacaacaacaacacacacaaacgaaaaagcaaaagaggtcagaacctgtcattccggtatttctcaaactttaagaggtattttagactcctgaaaacggttcgttccagaagattaagttactgacagactatctggacctggatggcaacttaacgtctgttggggaaatcgtcaaggtttggagaagaatgcttggtctctttgtgacctttttgatattttccttgtccaaagatgccaagaggatcgcacacccgccccctcggcttcccccccaccccccaaggaggggcagtgcagctcctcgaaggtgtaaagtgagtgtaaggctgacctgcaaggctcctattcgctccctcatccccttttctaaggacccgcccgtcctgtagtcctgtagtgtactgtccgcctctaagtgtctgtaaacctctgttccaatctgctagtgcctgggggcggggcgggggggcggggattacagacctgttcccaccagcccggaactccagccagtttcccattataaaagaaccagtgggctcagtacaatgcagggctgaagcacccagtcctgaccacccaggatgaagggctttagtggcaaaatgagattctgctaatgtgacctagttggtacccaaccatggaaccacagcattaatgagtcctggttagcccaacttgctgggggaaatgaaagcagcccagatatgagctggtgctttgagcccaggctgtgccactgtcccagcagaaggtgctaacaaaccagagtcaaagataagttgggaatgttgagacagaagaccgtgaaaataagttgttcactacacaaggccctgagactgaaaggcctggccccagagacaataagagctctgttttaggaagacagagctgtttgggttcagggagacttttaagggtctctgttaagaattcaggcaggactccaaaagtggaaacgagattcaacaaacaagaatttagttagaagacgtcttgtgtacagtggagcctcattttgcctggaacaaaacaaaggaaggaaatattcttggcccagaggagaagagtggtgtgtgtgtgtgtgtgtgtgtgtgtgtgtgtgtgtgtgtgtgtatgtgtgtgtatgagtgtgtgtataagtatgtgtatgtgagtgtgtgtatgagtgtgagtgtgtgtatatgagtgtgtgggtgtatgagtgtgagtgtgtgtatgagtgtgcatgtgtgtgtgagtgtgtatatgagtgtgtgagagtatgtgtgtatgtgtgagtgtgtatgtgtgtatatgtgtgtgagtgtatgagtgtgtgagtgtgtgtatgagtgtatgcgtgtgtgtatatgtgtgtatgtgtgtgtgagtgtgtgtgtatgagtgtgtgagagtatgtgtgtatgagtgtgtgtgtgtgtgtatgagtgtgtgtgtatgtgtgtgtgagaatgtgtgtgtccatgctcccactactgaagcaagtgagtcttcctgcagatacatcatgaaaacaaagatctttcactatcagaagaaaagcagaggctcaagggttcaggtcaggtgctgggatgtgagtgagctatctcacatgtgaccatgcaggtgtgcctgtgtccaggcaggtttctagccctgcagcctctcttctgtggcacagggcggggagataacaacacacgtcacaaggctagcccggaaggtgcttcctcgggaaagcagggttattagataagttgtggggaaggtgattggctgtctctgcagaaggaatgtaagctttaacctggaatctcccaaatgtctctcgaagattccatggatgggaactgccaccatgcagtcaaggggaattctaaagtaaagttgtttatagcttaagctgagacagtcatttcctggtccttttccttttttatttctgtctcaaatggttttatttgtgggtgggagcatgggggggggggcaaagaatctctctttgacctctaaatcttcggtgagagaagaaatcagatcaaatgaagctcctttaaactaacaagtccctatctcaccttggaatgggggttccttctaaaagggcaaaccccagaggctgagagaataaacagtcacgccttgataacttttgggtccagagtctcttgggatatcaaactccgaggatgctcacaccccttgtataagatgttgtcgtgtctgcatataacccatgctccctgggcaagcgggtgtacagctatcgtcccagtgttcacgaaataggtaaggcaagaggatccctccagattccaaggcagcctgatctacatggcgagatctggagatggggactggagttctgcctggagtggtgagatgcctgtctgtcacacgtgggtttagggtgtacccccagcaccacatcaaacctgattcaatggcagacttcttaggggtcttgaagcagagggagaggaccagaaagtcaaggtcattctccattaccgagcaagttcaaggccagagtggaatacgtaagtcgccgttccgaagaaaacaagagctgttgcctagtttattgtctgtctggttgtatatttaaatcatgtccaaattgcaggaaatacctagtgtaacacaaatgatatgtaaacagttatattgtatcatttaggaacgactgaaaataaaaacaatcacctatagcaagtcttttgtttccatacaaaatcctgtacaaagctggtctaacactaatgcagaatccccaggtaaggagggacaattgtactttttcatatggaagagtaaaactcagaaaattccaagtggtttacacacacacacacacacacaccagcacaagtaatcaatcaaaaggcaggcagagagctcacaagaaaaaaaattgatttatatcaggaagggccaggttccctcatacttaaaaaaaaaaaaaaagtctgccaaaaaagggagaaagaacaatagagatggaataaatagttgactggaaaagaaaactggcatcccaggcccttggtgacatcatttgagcgctaacagtcttgaagaatcctgtctctccaggtctgctgtggcgcagatgtccttccccttggaccagccccagcttgcccccctgcagctttccttggtgaacattcctgactttgacatctccgataacctagggtctccactgcaacgtgggatttacctgcatggctttacacacagcctatttgggagcttcctgcaagaaatgcatgttacaccttctcagaaactttctgaagtgttggcataacattcttaatctactttgctcttgggtcttgcacagccagcgccacccagaacactgagattcctgctgtccgtgtgagatgtagcctggcctccctggatggcagctgctcttctactcagagcttttccattgcgggaggggggtaccgctgtcttctacctcttcggttgctttcttttcatacgaaaagtattgttcacctggaactctcagtaggtgacatctaatcagccagatgactttcttacaaccctagggcaaagtccctgggtttctctttggtatggcagcatctgtaacagttaccaatgcttcggccacacccactttgcctgcaagcaattttaaatccacccccttccttgccagactccatgttgttcccgtgtttccacctcactgtactccctcaccatagacacggataaggttgtgagcagtagccatgacagcctgcacgagcacgccatctttaattcagatgcccttctccatacaaattaatgtcactcccctctcagcctgctcagattctcaggacacaggcagattctttgcccgataatagcacaaatgacctcgagccaacttccccaaagagttcttgttcctctatgaagctagagaggacagtctttactgtgtgtatggctgagaacgtttttggtctttaaagctttaagcccttcagaggcacttaaaagcttctataaccaacggctccaaaatcttccacattcctcccaaaaacccattcccaaggcttaggaaccacacggtcaagtttgtaagagcaaaggctgcacttgttgcgagttttctgtatgagttgccttgtcccctgttgtaaccaaatacccggccagaagcaactccaaggagagagttatctggttcacagtttgagcaagtctaatccatcctagcggggaagacaggagagtcaggggtggctaccgtaatgtcggtaacattacggtaaggggtctcatgtacatatagtcatgctgtgcaactatgtcaaaaaacaagaaaattgtctttggttggaaggcttcccaaatttattaggcaaagaaaaattaggtagaacggggctgtatagtctacctcttgcctgaaagaagagggaaatgcgtttggccagaatggtggtgtctgtctgtagtcctagcgtttgggaagctgaggcaagaggctctctcaggttcgagccagcctgggctcgaacgtctccacagcaatgtaggatggccataattgcctataaccccttcaactgcttaagcctccacaggcaacaatgcgcacacgtgcacattcccacacagagacataattaaatttttaagatttaattatttaatactgaaattaaccaaatgcctattgcctgttcaaaatttaagtttttggttttttggtttttttggttttaagtcgttttaactagggattgataccacagcggaaggtgagctaagcaagtcccagggatcaaggaaggactgaaaccagaatttggctactttttaatttatttttaaagacaggtagctcctctagctggcttcaaacttgctatgtagccgaggatgaccttgaatgcctgacctttcccccacctctctgcttagaggacagatgtgacacgcacagtaaactcatgcaagtttaaccctaatcctaaccaatccagggctaccacggggccgcatctgcagctaaatctggctcgttcttactcgtctctcgttagcgtgtatgtgtctatcatgtaaattacaatataattgggtgcttctgagttttgaccaactcaatattgatctctttcaggtgtgagagcagaaaaacggacttaagagctgagcaggatgcgttcacggtgcaccgtctctgccgtcggtctcctcagcttgtgtcttgtgggtaagggctacttctcagcacagcccttagaggagaaagcctctgtttctgtcatcacagagagccctggtgtggagcagcacactgatgtccatatctggagaacccagatcagcacggccagcatcaggcaccccacgggggtcttccccttcattttagctaagccagaataatataggctacagccatattcaggaaacggccttgtttataattcaaagggttgcggctctgcacaccctgaatctcacgcccggtggcgtttagaaggtggccatccctttatctcttcccatataaactaacttgaaaaatccatccctacacattgatttatactcttcctttctttttagcccttatcttttctatatctgtatttcttcacgtcctttctgttccttcctctgaactgtttgaattccacaatgtcatctctcccattcattgtcctcagcggatccaggagtatgacaaatgtctcagtgtggacatccacagttaatgtgtcccgcctatggtttctaaaaaataccaggaactctactccctgtaagtcactgcaagatcaggaaacaaatgacccctcttgcccatccctactctaagggacgacactcactaactccaatcacaaataccctctcttcatctgccactcttgttaaatatctttactttaaatgtattaattaacagcgtgcttatttctgttccgagaaatgtgtcacatagacagccacttctcagacactctctcaacccttccaacccctgccgtttgtgtcaagtcccagcggcctcactttacatccgccccgattgccaccttcagatggcacacgtgtcatgtcggccataccacattacccaagagcatccatactctccacaggatttttgttagcacaagaaaatctcaacccttaagtagcacatgtatgtcatagagccttacatttagagtaatgttgacagtctgggcccgtaacaagccctgttgtaatctgttgtgcttccttctagtgtctgcgagcctagagactatcacaccgtctgcttttgatggtaagaactgttctgagcttgactgaatttaatgtaagggtcaaagtatctggctaacaggcaggaaaggggggggggagtttgatttctgaccccagatatgctgaccagtttattggaatcctttctaggtagaggagctaagggtgtttttcattatttgtgctctaaactattataagagggaacaaaaacaaaaacaaaaacaaaaacaaaaaaagcactagtgattattaggaggccctcttaaaggcacactgaagcttttcagctcactaagaaaaggatgaagaaaacagaacagggtccagacgaatgtctctttaatttccaatcgtctacagattagtttcaggcaaaggaaaataaatttcttcaactgaaatttgttctcctttgtgtgatgaggggaataaaaatgcagtggggatttgagatcaagggtgggaaggaggggggtggggagggaaggataatggggagagacttcaggagggagggagacagaaaagggagagtgtgggggagagagagaaagagggacagttggggagggagggaggaatgagggggagaggggtgggtggcacagcagtttatgggccagttgagagaggaatattttgaatccgtgaactcaaaacagttcagagaagccctttgtcctgtgtttacagggtgccgagttcccatttgttagttttcctgccctgataataagttgtcactaatcaactgaattgcttcacttcccgtgtccagtggacttcctgcttggtctaagtgccagaatgcttccactagggcttgcctgtgagccgtgtgtgtccgagctcctaagggagtgccaccctagttccaaatctcatcgtttcttctcatcgtttcttctcatcgttgcctcctgttctttctagggtatccagatgaaccttgcactataaacataacaatacgaaattcccggctaattttatcctgggaattagagaacaagtctggcccacccgctaactacaccctctggtacacagtcatgaggtcagttggcgtggcctttttgtgttttttgttttttctctctctctcactgagtatgttacctctcctccattgcatggtttctcccctcgctaggcatacttcctgccccagaactttttaggttaacttacatgttttggggaggggtgtgtgtgtgtgtgtgtgtgtgtgtgtgtgtgtgtgtgtgtgtgttgacactggaagttcctcaatcactctctgccttattttttgacacagtctctctcactgggcttgagttttttgctaggttatctggccagccatctttccagttctctgtcttgttggggttttttgtttgtttgtttgttttgttttgttttgttttttttgttttctgactcataaaaggccaaagtcaaaacacctatcctttcctaattaatttaaattcttctgtagcccaaagctattgcagcaggagccaagcttgtgtttataagccaaatcctggcagtttgcagtttgcacagtgattcctccgaggtcactctagagtttacaagtccgaatttccatcaggctcaaggtctcgtgaccatattggtggtttatgtccctgtttctttactcatggagacaaggtatactccagaaagccctacttggcaagcttgggtccaaagccactagatcactggactgcttaatatttagcccagagtttttgtctttgcctaaacattgctatggggataaggatggaattggcagggaccaccttggccctcctctgcccacaaacaacagccgctttccgaagtccttgcttttctcagtagctctttggagagagtgtatctatgatgtaagtcctgtagccctggcccgaaactgtctattctcttgtatatcataactccaacggttataccagccaggagaaagcatgagtgtcttgtgactttgccttcctcctgcaaaactcacatttcctctgctgatgatcacacatatcgctagcttgcgcgttctggtttcatctctgtggttgtgataaaatactctggccaaaaggaacttgggaagcaacgggtggttgtcgagggaactcaaggcaggagtttcaggtatcccatcagtcctgagcagagagaggatacatgctgggctcccttgcttgcaaactacccagctagctttccatcattacacaatccaatgcccaacccacagaaggctgccagccaccctacagttaaccatggagatggtcacctgcagacatgcccacaggcgaacctagataatccttcaaccctgggttctcttctatctcctgttgacagttggaactaactagcacactcccttactttcccaagcttggtgaatcagctgtccctgatgtccctaaatgaacagaattctgacttaagatgtaaggctatgtgaccttcagccagagacacatctcaaagaaagcactgctaattatcctagggagggaagtctggggcccaggccgagaaaagcccaaacccagggctccttcctccctccctccctccctccctccctccctccctccctccctccctcccttcctccctccctcccttcatatatgcatgcagtagattctatctattaaacaataaaagtataatgactcagttggggatgaaccattaagggaaaacaaatccagaagagattagaagtgggtgggtgggtaggggtttgcgaagttgaatgtgttcagttttagaatgatgtgattgtgggatatctgggcaacgcctacaaaccatttcttttagccatcataaaagatatgaggcacaggaaacggattctcaccacacgcatgttcgtctttccttcttcaatctttccccctccaaagcaaagacgaaaatctgacgaaggttaagaactgttcagataccacgaagtcatcatgtgacgtgacagataagtggttggagggcatggagagctacgtcgtcgccatcgtcatagtgcacagaggggacttgaccgtgtgccgctgctcagactacatcgtgcctgcaaacggtgagtgggtgtctgtgtctctcaacctcatcagtggtttgctgtgaacgaggaaggtgtttggctggagagctggcctgactcctggccctaccttatgtggccatttggttgctcagagcctcagctttccgatctagaaaatgggttcataaccttagcttctcaggtttttgttcggcacgtgtataaggcaggttttcagaggtaattgttgctgtctttctgttcactttacaacctggcaggaagcaggcagaggctttgcatgggtctttctataccatcacatctctttagggcagtatctttctgtccaccacctgagactgtaagtcaagaaggctatatatatgaacacttagggcactcagctcacaaggcaagtggggcccaggagtggggtgacccttctatcttcccatgtcctgagcacttatgctagtggctccagctccactgtgttttcagtgactaaatttataactggtttccatggtaacgtttttttggtttcagcaggtgtgtgcactcgtacatacttgggaaaatgacaacggttgaaaccatgaccagatcatgagtcagtcttaggaggtcatcccaggggtgtggaggttgtcccaggggtgtgattgtttggatcaacaatcacatctgtgcattgcactcacagaaaaaaaaaatcaaagcacagcttatagatcgtgataaagaatatatattaaagtaataagtatttttcatgatccaaatcctaaatataaaaaagatactaaaacctaaggccaccagatgtggtggtgcacacttgcaatctcagcacccatgagcctgacacaggaggagtacagaggtttgaggtcagcctaatgttacatagaaagtaggaagccatccaagactacatagcaagatgatgtgtcaaacaaacaaacaaacaaacaaacaaaggagttacagagacaaagttcggagcagagactgaaggcatgaccatccagaaactgccccacctggggatccatcccataaacaaccactaagcccagacactattgcagatgccaacaagagcttgctgacaggagcctgctatagctgtctcctgagacgctctgccagtgcctgacaaatacagaagtggatgctcacagtcatccattagacggagcacagggtccccagtggaggaactagagaaagtacccaaggagctgaaggagtttgtagccccctcagaggaacaacaatatgaactagccagtaaccctagagctccctgggactaaaccaccaaccaaagaaaacacacggtgggacttatagctctagctgcatatgtagcagaggatggcctagtcggtcatcaatgggaggagaggcccttggtcctgtgaagattttatgctccagtataggggaatgtctggaccaggaatcgggagtgggtgaattggggagcagggggagggggtgaggataggggatttttggaggggaaactaggaaaggggataatatttgaaatgtaaattaaaaaatatctaataataaaaacaccaaacaaaccccccaggactaggaaaaaaagacagacatcattctttgacatatttcttctgaacagatccagcaatatattttgttttctttttttgttttgttttgttttgttttaaagtaacataagccaacaagatggctcagtgggtaaaggcacttagcaccaagcctaatgacctgagttcagtccctgggaacccacaaggtagagagagagagctgatccctacaagttgtcccctgacattcacacatgtgctgtgacagagtggcccatacacttacacatactcaaacacaaaacaaaataaattaaaaatgtaaaaaaaaaaaaatttaatttttttaaacggttaccttaaatagatgtacttacatcaaaagagagagagaataaaatttaaaacctttctcacgtgactcagaattcctctctaataatttgttataaagaaatgaccaacaggactggagagctggctctgcagttaagaattcaatgttccccagagggtctgagtttggttcccagcatgcaagtgggcactcacaaccacctgtaacttcagcctcagggacctgctgccctcttctggccactacaagcaactgcacttacttgtatctattccccaccaaaaaaaaaaaaaaacgcacacatacacataattttaaaaaattttgagccaggcagtggtggcacacgcctttagtcccagtacttggaaggcggaggcaggcaggtttctgagttcgaggccagccttgtctacagagtgagttctaggacagccaggccacacagagaaattctgtctcaaaaaaacaaaaataataaaataataataatattaaataaaaaatacaaaaattaaacacttttatttttctaaggagaaagaaatggctaagaacaaacgcagagattgagctccagaaacaccaaatgacacatagattctgttcagaaatattaaaaataatctgtttgttcaaaatagtaaatcagaggggtcacaagaacacagggtttaaattcagcataggaagttacaaagtgagtcgggagtcagtgaaactccatgaaggccagagacgaaacacgttagactgtgtgggccacatccagtctctgtcctatgttgttctttgtgttttcctttgagattccttaaaaataaaaaataaaaataaaaaaacaagaaaaaatgttcaaaagaagaaaaaaaagtgagattgtaggttgtgccaaaatctaacccatgagacatggttttctaaccctcagggtaaataaatgtgtattaacatgtttatgtcatatagttaagtaagtcagccatggtagcatgcgcttgtaatcccagaactgaagatccagaggcaggaagttgtgagttcaaggccagcttaggctgtatagtgaaaacctgctttgttttgttttgtcttgtcttgttttgttttgttttgttttgttttgtttttaagtagttaagtaaaattataaaaaacattgtgggatagaaggacttcatttcagtgtgtgtgtgtgtgtgtgtgtgtgtgtgtgtgaacatgcatgtgcatatacaactatttatataccccaattaatatgtaagaatatgtatatatttatatacattagcatagaacagttgattatactcaaagaaaattccctgtttatattactattgtttattactattatatattcatgttgaatcatgaaaataagtcattttaaatttcatgtctacaatccagcctgagaattgggaaggttgttgacatccatctcaagtcagggtaccatgtgccataggaatgctaatgaatcaaattgttccgtttttcagcagtaaatccaaatagcactatacagctagaattagaagcccattcagacagaattagcctttctttaaaggaaatgacactgtctctgacaacaggatacaatgtacatactgaaataaggaaagactgttactcatttctctttcttatgaagagtgtctgttttccacagctcctcttgagccgccagaatttgagatcgttggctttacagaccacataaacgtgacgatggaatttccacctgtcacttccaaaataatccaggaaaagatgaagactacaccctttgtcatcaaagaacagataggggacagcgttaggaagaaggtaagtggtccctcctgttcagatgaaaacaatacgtagctggcagtggatacattgtacttccttctcaagaactgtgtaaggccagggaagggttactttagacggcttgctcagtggtagactgcttgctactgtgttcagcacccaacattgcagagggagggagggagagagagagagagagaggagaaagagatacagagacagagagacagagagagaaaagagacaaagacagagagatacagagacagagagaagagagatacagagacagagagatacagagagaaaaaagagacagagagaggtacagagacagagagaggagagagatagaggagagagatacagagatagagagaggagagagatacagagacagagaggagagagatacagagacagaaagaggagagagatacagagacagagagaggagagagatacagagacagagagaaagaagagaaatatagagacagagagagagaaaagagacagaggcaaagagacagagagggggaagataaggggagaggagttgtatcatctactgctgtatttcatccatgtttctctatgttcaaagcatgaatcacagcattttagactgtgtgattattaggataacaacaacatcataaaatgaaaactgtacacagaggcattttttttaagaaaattgatctttaagtcaaattaaatcatgaaatagaagaggccattggtgttacccaggcagcaggcaggagtggcctggaccaattgttggtgctgtgattttccagtgcttcatgtgtttcatatgtgggctctacggtgtggtagagaaaccttatggccacagcaccttacagttgccattaactgaaataatgaggactctgatgaacttcggttaggatatgttaaatgcaagatgccagtgtggcatttagaaggagacaatggccggcatctcagctcccatgtctggagttaaaagagtctttataagagtgcctttggtgagtcatgggcaaagcctggttgcatggactcaagtaaagcgttgaagggctcattctccagagcctttctcatatagctgcagcagcaactctagaaggtggggcctggaggaatgacaagcacgtccacgtgcaggtgaagtgtcctggagaaggtgacagtagcatagcgggcgagttgtcctagagacttggtggaattttgagagcatggagaaaggtgcccttggctgggaacagagatgagatggaggatgctgcacagatgcagaaagaagagtgtcttagtctgtttgctgtgactgtaaggaactacctgtggctgcacactttatcaagaaggagggttattttgactctggcttctggggctgaggctaagagatgaaatccacggatggccctcccactgactgagtcctgaggcagcggagactggtgtgacaagaacagggagcatgcgtgcatgtgttcagatgtgcttcccaatgtgagtcaccagggtttactcatggcgccccactctgatgacccaaactcaccccgatcatcttaccagctacagaaaaatgataatattgtggcaatgatatcatggaaaccttcaatccccttttggatttttccttctcatccataaaacggatctgataggccagatatcgtggttataagattcgtgtacatatgtaggaacatgaggtttggcaattaattgcttgcttctagtgacataaaccttgctaagccagtgatatgtttaaacttctttaagatttgaaaatagaacccttagggctaacctctcaccaaagtcttaactgatctgagtgtttgtttgcgtgtgtgtttctttttacagcacgagcccaaagtgaataatgtcactgggaacttcacatttgtccttagagacttacttccaaagacaaactactgtgtatctctttattttgatgatgaccccgcaataaaatctcccttaaaatgcatcgtccttcagcctggccaggaatcaggtatggctaggtttttaaaatttgcactattgttttgatggaaaacttgctgaaaggaaaagaaaaaatctcaagttctagcacactaaatgtactcctgccaataaatgcacaccactgagctgcccctatggctctgtctctaatgtcttgtcctgccgtcagaataatcaaatacctgtcttagaagaacagacccctgtagcactttccttttaagggaatctgggtgagattcagcattgtgtgccctttggccattgcttgtgccgagtgctagaagatcagaagttgcttgaaaagccagcattaaaagcctgggagggaacagtatggaagtggtgtgagtcctaagaatatttgttctgcatgtatcagaaaggggccttgtccgcagagaggagatgaccactggtgacgtcagaaagccttccagttacagagacattgagacagccaatactgtgaccccaacctttctttatctgagaaaccctgtgcggccaggacaaaggaacctgggatgtggtggtgcctgcctatgctctaccccccagaaggaataggtgggctcatcataaggttgaggctgtgtagtgagtttccagccagcctgggttacatagcaagaccctgcctcggaaaaaaaaaagcaggaaatggaggttagttgagtccaggagccctccccgtttttcagtcactacctctcccacagtctcactaaaagaaaaaggctttgaaactcctcttctaagatagctctctaaattcctcagtcccaaagacagactcctaagcatcaccattcatcagagtaaaattaagtttgggttggcacgggaatgaagaggtgatcctctgcagatgggctcctagatttgagctcttgacctccagctaatggcaccagtgtggatctttctggaaacgctggagtgaagtaggtcaccaagaacagggctagcctttgacttgggaacagcctttgaaggtcacatccaccccctggttcctgctgtatggcatgctctctgctctcgcagccaccacttgaacagcttccagaacacactccagccatctaactgagctcctccaccccgcctctcctgccagaatggactctctctaaaatggtgagccaaagttaatcctgttacctgacatttcttctgctaggcagtctgccacaatgttgccaaaggaagctgttaacaaaggacttagctagtgtgggatgcagcaagctacactacatggggcctggcacctagggtaccctgatagcagtgtgtcctcacggcctaatgtttctcaaagctgaaagatacacagactcatagtctggccaaaagccagccttagcttaacttgtgttttagtctcttacaaaactgctaaactgttaacataagccccaaacaaatcagtattggcatgtctgacaccagagctcttaactccaagtagccaatacttcaggccatttctgactcaaaatcagagcagactgggcaggataagggtctgtttgcaaaagacatcccctacttcggatgctagccacaagtttacggtcttcagaccatatcgattcttgtccaaattggctacaaaataaaaaactcctccaaatttctctcaggtccaatcatttgatgaagtgcttcacagaactggggagagcatagacttatgagactatttggataaagctgaagaggtgggtgggacaaggggcagaagggtctgagctttgtccatggagtcagcctgcatcattctcccaagaacctcagaatgctcactaaacaggaagagcatcaagtccacacgtcctgggattacctgggacggaccaagtcattgcccacagcgcaagggttaatctcctaaggtcaggagggcgggactagaaggaaccacacctccctgatcatagcagttcctttctctgcaggtcagcccccagcttaagactgtcccgctgctccccaggacccgcttcattagcagaaaatcagatacagttgctagcttagtcccttgtctcctactatagtggaataccccctcccccccccaccccccacccccattgcatgactatataaaaaagagatatttatttctcctagtattggaagctgagactaaaagtgggaaggcttcctggctggaccattgtgggaggtgccacatgtcacagaagggaggtggcaagccattttatgccaatgccatatttgcagtgtctcacttgttcccataatgacagcattactccacacatgagggcagcgcctcctggcaaaaacatcccacctcccagaaccttctcagaggacgccaactgcaagagacatattccaaccatcacagcccccacactcagggaatttcatgaagtttgaagccctgagcctagaaccaggagtaggagagaggggggcactattacatatatatgtgtgtgtaaaatagcatgatcttatatatggataaaactcccacaagcaataataattcaagtaagggttgatgagatggctcggtgggtgaaggtgcttgctgataagcccgatccccagagcccacatagtggagaggagactggactccatgaggctgtcttgaaacctccatgtgcacactgcagcacagcatacacgaataaatgtgattaaaaagtaaagtcaaggtggctggagagatggctcagtggttaagagcactaactgctcttccagaggtcctgagttcaaatcccagcaaccacatggtggctcacaaccatctgtcatgggatctgatgccctcttctggtgtgtctgaagacagctacagtgctctcataaataaaataaataaaacttaaaaaataaaaattaaaaaaaaataaagtcaagttagtaagaccacagaggaaggtttcttgtgacccaggggtgctgaccaagcagctggccattccatggaggctggccttccctccccacccccacgccccacccccatgctccaccagttaagacagttaagactcggtctttgccatagcatgctgtgagtccatcccaccgctatctagtgataacacgtccttttgcacatcgttgccctcccccttctgtcattagccgagacagttaaggggcaaggagctccagctttccaaatggttgtgtttttttttttttttttttttttgtcaggcactcagaaatcaaacggatggaggtaattcactattatttcttctcttactcttcagctgccatctgaactacccttaaccagtaaaaccaaaggtcatacgcgtgcagtttggtggacagcctcccctagttaatccctaaatgcatccattggctcttaggagacccagtgaaccctgtggggaatctctccatctgataaatacagcagggctgaaggcagagagttctgacttttgtgcaactcccactgaagtaggagacaaaaaaatgaggttaaaggatagaaaggcaatgacagaaagaaaaaaaacggggggggggataaagaaaaaggtgaagaagtgactgggggaggggaggggctctccaaagcagaaaaggcatagatatggatctctgatgtcaccctgggcttcatctcagtgaagttcattttggacatctaaacctcggaactgtaagccagtctgagttaaggtcaaaaaggctgaaggacactagacactgtaggtgaccccaaaagccggtcggagagatggggacggggtggggtgggggtggggggcgggaacttatggatctaggaggaacttgggtgtgccacaaagtgggggatccaggtgactccccgccaggcactgcaatcatccaagtggttatcacccagagggcctggcaaggaagtacgttgtcttgcagagaagaacaaccataaaacactgtccttgctgcccagggctcctgggtttcaaaaaaaagacaagacacatccaagggtgaggtttgaagataccagtttggtctgcccttcccaatatgagatgatctaatccctcttttaggaagatgatccacaatgataacacacatgaatgatcggccacagcccaagacagattgtatgttgttacccgctttaggttacacaaattcttcaagtcataaattctctgagactgatgacagaatcaccatttgcgaagcaccgctctagctagcggactatgattagcataatgtgctttgtagcatgtctgtggagttcaccgtgctgctccgtgtagactctagaagttgggtagacctgtgagtcattcgtgagtcagaatcccagtgtcatgttcacgtcaatgcttcaccccagggttacgtggggttgccttccccttcttaggaagtgtgtaaagatttagtgtgtctgaaagctgtgcccctgagcctagacctgatcctgggtctttcacggatgggaggagcctgcgtcgttcattcttcatgggcaggagactgggctccaaaaccagtgtcagccaccaatcctctggtccttgcttagctaattgtgtagtccttccccttttaaaagacgtcgagcatttgatccattttagcccttctcttctgtatcctatgtcatgttctttatccttcttaaaaagagaaagaaaaaaaaattaattgtcccagaagctctggatatggggatcatactcttatagctctttttttgaaatgtaagagagctttgcctgcggtggctcactgcttctcagccccactgtacctacaagaagcagctactttcactgcggagacagaactcaaaaaggaaatttggcaagaggctaagggaagttcttcacaagcaagagctgcatttgggaaggccaagcctcagaatggcccagttggttctccagcccggttctctgtcttctaaggttcccacctgggcaatgagtacccacaggcatttgggctatggctagtggggtggttctgattctgtccagatttgatcgttgaaatttaaagagccacagacagacagcaactactctattgcaactatagaacataaaggttttttttttttttactttgaaaatctaaatacggtttatttaaaatatatgcacttagattagcttccattctttggtatttagcaaattttttttcttcttaactttcgcttcctcttctttgatttctgtcaccagaccaatatgggtgtaccccacccgtgaccatgtattatatttcttttgaataaagtcatttgtcttttcattaacaggattatcagaatctgctatagtaggaataactacttcgtgtttggtagtgatggttttcgtgagcactatcgtaatgctgaaacggattggttatatatgcctaaaagacaatttgcccaatgtcttggtatgtagtttttctgtctttattttttttaacttaatattttttgttacagacataatattttttttttaggaaagaatctcattttccaatagcatctgtcagtttggccatcctaaattctttgttgtccctgcaagtgtcaaatgtatatgacattttatattttctgtgtgtctgcctattctctctgtgtgtgctctctcatgcctgtgagctttctctcctcccccctcctccctctctttccctctgtggtagggatttgttcatgagttcattgtgtgggagtcatacgctgccttaaggcgtttatcccagtgactctccgcctaatttttatgtatttatttttttaattcagtctttgacagtttcatacagtatcttttaccatgttctttcctggatccaaactcctcccattacaccccccaccccaccctctagactactacccacccaactttgtgttcttcttcctccttaaaacaaagaaaataaaacaaaacaaaacttagctacacgcatttctttgtgattggggagggagcatctttgagggcatcctgtggcgtcggagggcaactttaaggaagagtcagctctctgtggtgtggctctggggtgggctcaggtgggcagctttatgtccgccgcttttaccctctaagaaccctttccactctatcgtttgcttgcttgtttgtttatttggctggttttgttttgttttttaaacatgagtaagatgtgttttatttttattaaaattatttgatttttttctattcaaccatacaatttctcaaaaataagctaatgattgctttataaagaactttacgctttttacattttgagattataatgtaatgacatcatttcccccttccctgccctccctcccacagactctcctctctctctttcacactcgtggccccttttttgttaattattattacatacatatatatccctaaatgcataagtacagcctattcagccttcacagtgttgctttgattcgtgttgttgtggccgaccatttggcactggataaccaactggtgtacacttctctggtgaaggctgatttccccattgtgacttcggggacgactcagttgcctgtggatctttgtgtagggttgagccctcctggctttcccagaccccagtccacatttgagtgtccattgttacccatggttaggcactaatgttggtgagaccttacggatgtaacacgtgacattcctaggagacacaatctccccgctaactccctgaacctctggttcttgcaaactttctgttctttcttctacagtgttctctgagccttaagggtgtgtctcccccccccccatatctttttagactaggtctctcactctcactgaacctggaggccatcagttcagctaggctggctagcttcagggctccctatgcctctatcccaccctgtccaggctgggattgcagatttaggctactggccccatggtaattagaactcaggtagttatgcttgttcagcaggcaccttactgacagagccttctcaggcctccacctatcatattttatgatcaggcaattacattattatccagacactatttttcccagctgtagggcatttgggtcaattctcttctctctttctctcattccaactaggagtagtacaatggaagtttttatgcaggtcatctatttgttttaatttacttcagcagatcatatacacaccccaggtttgtcttatgtcagacccggctgacagtgctttcttccctgtgatggcagagcacagtccgtctcacctgtggctttccttagtcacaaagaaactgtctgcttacctttcttctaagcttccacttagagctgggagcccttacagactctgactattgatcctacagctttctacaccgtcggatgcagctgcctttcccaacctttagtctctgtttctatcccactgccccacccccaccttgcgtttgtaacaacatttcaagtagaaataccttactctctcttgttgcagcttgcctgccttattctgttcagctggtagagttttagtcactttgttttaatgtcacttggggtctgtctctgttaaaaattgtagctctccatctaagaaaatcctccagcagtaggaaaatatgacactgtaagcctagttgagcttatagatgaatttgttggccagtttggggaattgagctcagcatcttaaacacgctaataacatgttcaagtggttgctgctttgcatttaactctactgaatggtgagacaatgtattccaagtattggcgtgtggaacaaggctgccacagggctctgtttgaagagctgggcagacagtaaaagtttatagacaatatcactaagctcatattactctggagctaaattttagtttcagcaatctgtcctacagagtgagtagctaggccagccaaggctatacaatgagaccatctcagatttagggttggcaacgtcatgcatacttaaattactgtgttttattagaaaatcggggtgatgctgtttccagcctcaggaataaagtacacaagccatctgtggaatgctcatggaattttgcccaaccctgaacaatcatttaacttatacccagaccgaggaagaaaacacagccagctctcccagagtcctctcttgccaccttccaaagaaccaagctcaccatgattggcccagattactagtggcataggttattttcccggtttttaaatttgtaggaatagaatatcatttttgatagccctgatactcgtacaattacagaaacagcaaattattttcttaatttaaggaataaatgtattaaacttagtgaaaaggataacaatccaccgaggagcccagaaacccaggcacatgcacagagaccagggacagtgacagtggctgtgcaaactggtgggggacctcagtggccagggatagtattatctatactaggaatcataggatcctgctgaacctcataccacacatggctaaatgcatagtaagtctagaggcaggatgtggaggtattgagtccagtagtgtggggtgtgcttatagcatgcaagaggccaagtttagtcctcagcacacacagatacacatacacacacacacacagagagagacagacagagaggacagagtgagagagtaaaacaagcctgcttcatagagcacttctgagggcaaagggacttaggaaatggcttgcatccacagactccatctaacaatagacagagtatctaaatgggcttgttcttggcagtatccctaagccatgtggtgtgtctatatcgtattgaatactgtaagcaatctggaggtgattgaaagctaaagaatgtacagaggtgacatgcaagtgctgtaacattttatagggaggaccctagcatccttgggtttggagggtcatattatgaaatgcagcagtgcccagcatctagcaagtgccagacaaccatcagcttttcttattacagatgggtgttattacacatgtgtattattacacataggtgttactacacgtgggtgttatacacatgggtgttattacagatgggtgttagtacacatggatattattactacacatgggtgttactacacatgagtgttactacacatggatattattactacacatgtgtgttattatacatgggtgttactatacataggtgttactacacatggatattattactacacatgggtgttataacacatgggtattattactacacatgggtgttatcacacatggatattattactacacatgggtgttatcatacataggtattattactacacatgggtgttatcacacatggatattattactacacatggtgttatcacacatggatattattactaaatgtgggtgttactacacatgggtgttatcacacgtggatattattactacacatgggtgttataacacatgggtattattactacacatgggtgttatcacacatggatattattactacatgtgggtgttactacacatgggtgttatcacacatggatattattactacacatgagtgttattactatacatgggtattattactacacatgggtgttactacacatgggtattattattacacatgggtgtcatcacacagggatatggatgtcacttgtatccacacttcacagtgaatactaagggtttgttgttgttgttgttgttgaagacctaatacgagtgaaagactttttctctccctccctcgtgccctccccccttctctagaacttccgccactttttaacctggataatccctgaacggtcaccttcagaagccatcgatcggctggaaatcatccccacaaacaagaagaagagactgtggaattacgattatgaggatggcagtgacagtgacgaagaggtccccacagcaagtgtcactggctacaccatgcatggactgacgggcaagcctctgcaacaaacctctgacacctcagccagccccgaggatcccctgcatgaagaagattcaggcgctgaggaatctgatgaagctggagcaggggctggagctgagccagaactccccacagaggcgggggcggggccttcagaagaccccactggcccctatgagagaagaaagagtgtgctcgaggactcattccccagggaggacaacagctccatggatgagcctggggacaacattatcttcaacgtgaacttaaactctgtgtttctgagggttctccatgatgaagatgcctcagagacattatctctcgaagaagacaccatcctcctagacgaaggtccccagaggacagagtcagaccttcggatagctggtggggacaggacacagccgcccctccccagccttccttcccaggatctatggactgaagatgggtcatctgagaaatcagacacctcagattccgatgctgatgtgggggacggctacatcatgagatgactccaaagaggttcactgactggcgctgggcacctacagggtttctcttcagagtccgacttgatgccttgtggtctccaggtgtctgtcatggagggactagagaactctacagccctcttggcccttgctgattggccttctctatgcagattgacaatttgggcatcaggattgtttacaggggtcatgagcgtgatctgcccaccccctttccactaatgcactaaggtggtttgtgttacatttcccagggaacaggttcagtgtggttttcagaggcagcccaaggtctcctatccctatgttgtttctaggaaatgattaaattggggggagagaaagggaaagaaaaactggccaagcagtgttcaggaggactccaggaatgaacctgaaagggggcggaagggtcagaggtaaggcatgctgagctggctgctggcacaagaaaagccatcaaggtttgagcccctgctgtctgggcccttcccagatgtcaacatctgtctcctctactctaggaagttcattcacccataaagccccgcacagtgcacgtgaggagggggagaagccgcaggaataattctaggatccaacgcgtgactcagagagagggatatcatggccatattttaaggtcatttctcgtcacctctttaaccttcagttttctcaacttatgaaataaagggactgagcaggtagccttgggagagatgcccaaagtggatgaagggtgtagggtcctcccatcttactcttctcacccccaaaccagtgtttcacattttcttcttttcaaagaagaactggtacatgggtcctggctcaaagacttccaatggatcacccatgtaaagcggttcaaaagaaacccttgtgggactgataaaacccttgtcggactttttatcctgtgtgataaaaatcccacaggaaggagacacccccccccaaaaaaaaaaaaaaaaaaacacagagcaaccctttctctgccctctgaatacagctatcctcattctcccggagcagcagctttcttttaagctttgcataattgctgggagttggctttttaatgcttgcacttcattgtttgtttgtttgtttttaaattttatacgatgtttgaaattgtcagtgtaatacaaaagtacttttcatacaagactttatagtctttttgaatcgtttctctctggaatgctttctacagcatttttgtggttctgataccattacaagattgtactagctttctctaaatctgccgtggcctgctgggatggtcccctccgactctcgtgacctgttctaacttagacatgtctcaatatgtagtcagccgaccttcggtggggtttcccacctcgccacctgttctctttaagaagaggaaattaaacctttctcagcagccttgtgtaagaagcaagctaccaagaaatgaacaaactggccttgtgccatgtccttcgggtggggaggggcactaaaacttcccgagctgggctggattcagcttttgtttgggagacaagactttggaggggtgatggggaaaaacaggggacactgagtgatccaaagaaaagcaactgcccagcagcagggaagctgaggcaggaggatcacttcgaattccgggctacgtgacccacccaccaaggaagagagacagaagggaacactggaggggagagaaacagaagcgcggattgggggagggacagcactgtaacccaggatggcttcttagtgcacttagcttgaggccgccctcgaggctccggtcctcagtggggctgcgggcggagggagccagaggggagtggcctggccgcccggcggaggttccggaaagggcgcgggcggccgcggggctgccgcacggggccatgtcctgggcgccgagcgtggcgggctggctgggtggcttccttctggtgccaggtgaggtcggcgagcaggggccccgggcgggcaggctggcaggcttgggaactcggaggcggggcgtccccaaggcttggcccatgggctccccgaaagggacctgtgcggcgcccagcaccaggaagggtacccctcgccatggtcggggcggggggtgcacacccgcggcgatgcgctgccgctggctagatcctgggtggacccttcccgagcccgcagctgtttccaggatgtctagaaggtaaagtaaagcggggtgcggggacagttgttgacagcgcccccagcctgcccccgaagttctaactgaaaccagattttctgagcacccccgcagtggctgtctggtccttagggacacacaccggagtcctcccaggccccagcactccttcctctccccggtcctctgcagcgccagctccccttcaccacatctccctcttcacatgtccacaccctaaaatctgaattctgcccttcagctccccagagagctgctggggactcttctccacaactggctttccgttggctgagctctcgggattccccaactggttctcagtgggattctcttcctgagcccaaacttcccaggcagcctggtgttgagtaattaccaccacacttcgtctctgttggcaacagctgggtgataagtggtttagagtttactgcgtcaaaacttaataagtgatttctgcccttagcccaaagctgccctctatgcgacctcaggctcactcacccagaggtctctctgacagtccttcttgggtcttcagggagacctattctgctgctgactcaagactcccaggttccctgccccagctccagccagggttccaggggcttcggccagaaatccttctcattatagcttcaaataaaacctagcctccccggcatagctaacacacacacatacacacacacacacacacacacacacacacacacacacacacatccacacaacatttgaagacatggatctgagagacccaaatattggatatagtcgttttcttggatttagtgtttgtttgtttgtttgtttgtttgtctgtctgtttggttggttttggttttgttttttgttttttttttttttttttcgtttttgtttcattttgatttggtttggtttgggtcttgctttgtttttatttttgttttgttttgttttgcataaacattgctacctctcccgtcctcctcctcatctttttcagctctaggaatgattccaccccctgagaaggtcagaatgaattcagttaatttcaagaacattctacagtgggaggtacctgctttccccaaaacgaacctgactttcacagctcagtatgaaaggtaggtctgggggctgttcttaagtcagaaggcccctccttctaattccaggtcttgatctgcctactgtgttgttacccagggtagtatgacagaagtcactatgtagcccaggctggccgcaagctgaagtatttgaaaaggaaagcaggtgccgctgttactcccagttatacacctagggctgtaaaagtcagccctgtgcaaaggggggggggggcacctgaaaatgccaagtgtgcacaccggtcaggaaggcacttgcttcgtaccacctaccctccactgcagaccttctagaccaatctgggatctgccaccaccactgcagggcctctacctgtccttcctgtctgcaagtccccatatccggtgaagggtgcaggccagccttcccttgacagcctgtccaccttgcctattggctggatgccaggtaacacaccagcagcagaaggaggcccagggcccatgaaccagcacacctggcctggcctctcggtgactcagaaacgtggccagacagacaggccatagagaacatgcctttccagatctcggtagccctgccctgtttgtcccagctgtcattttacatggaggctgaagggctctacatatatacataatatatacttattatataatatatactatatatacaccatattatatactataaaaatgctatatcatataataagtatatatgtatgtgtgtatatatatgtgtgtgtgtatatatatatatgtatatgtatatgtgtatatatatatataggctcgagcacctacgttgagatttaccaatatttagcatttcctttttttttttctccctgaactctctgacttagaaactgtattaatttcttttctcgttgctgtgacaaaatgtctgatgaaaggaacgtgaggaaggagaggggctttgtttgtttgtatgtttgattgattggttggttggttggttggttggttggttgggtttattttggggggggtgggggcttgggtaagaggttgcagtccagcacagtggcagaagcagctggtcacacacagggcatccaccaggaagcagacagaaagctggcactcagcttgctctctccttcttatttagtctgagatgccagttcatcagaaactgctgctagcatccaggcatccaggacatcataaaccttcttgctctgttgaaccttcctcgaagctctcacagacctactcaggtcatttccttgctgattttaaattccatcaggttgacaacgaaaattcagcatcgtgcacacatacattccggtctgtgtttcataaaaacagtgtgtcctgttatacctcagtgtagttgccgacagtccagagaccagtgtgtcctgttgtacctcggtgtagttgccgacagtccagagactgtagttgataaaagaccatctgcagcagccctagggtggtgctcctatgacctcatctccttgtcttctccactcgggtctggaaagacacagcaatttcactgtggagattaactcccttcttctatcagtggctgttgctgttatgaaatgcctgagcctggttacaggtatctagctctagatggcagaaggacaaaacaatgcagggagggtgtcctgagtgagtgacaggacaggacactccagcaggagcttaagagggacaaaccacctctctctctctctctctctctctctctctctctctctctctctctctctctagctcttctctgtgtctggctggctttccagggttgggtgattccagctgtctgtccttgagatggaaaggcctggtggcttcttggaggcagagaactggaggtggttattaactaagggttagtaccttgcctccagggttcctctccatagaaccacagatgggtacacggtacataaagaatatgcagccatgtccttaggaaagacactgggcctgagcggtcaggttgttatgacttatatgagtccataaggttcgctttgacttcagcccaggcaggtgaatgctgcttacaaggtgcaataaaccctctgctgtgtgcgaagtttacctttgtcccttgtcacttgggcaacagagggaggctgtcatccaggggtcaggttgtctaaaataagacacttcaaagggtgtgttggtgatattcctacagaaacatccaaaatgtaagtatgagagacactcctatcacacacttaccagaaaaaaaatactcatctatgacaaaaaatgaaaagaggagttgctacaagatgtcctctgacatgcagcatggtcgaccaccaggtgtggtaactgaatactgctctacggtagccgaacgataggcggccagccagaagagttattcggttggcaaaatgtaaagcctgagtttttcttcccaaccacttaattcccagcaataacaactcagagactgattattgatcagtaaatgcctagcttcagcttattctccaactagctgttaactattatccctgttattccaagttcagctatgtgcctggtttcttctctttaaccttcaggggcaaatcttccgcaggcctcactatttcccagaattctctctgtccctgctggatatcacgcctcctactccctgcctcagttcattggccataagcttttttattgacaggcaatacttataagagatatgctctacagcaaaatgtgcatatatattaagtgggagaggcagatggtacaagactgggttctcagtagtccttacctaccttttgcaaagctctgggcaccaataacaatggagtgagccacaatgtggtccctagagccctaaaggcaacagaactgagtgtattgagggcgcttgctgcttttgcagagaactcaagtttagttcccagtacctgtgtggggtagcttgcaggcacctgtaactccagccccaggggattcaatgtctttttctgtcctccaatggcacatgcacacatgcacgtgcgtgtgcacacacacacacacacacacacacacacacacacacaaacaaagtaaaccttctttaaaagggcaaaggtgatccagacacacacacacagaggcatgggtttcttgtgctcttttaacctcagacttaatataactatttgcttcaggctcctggtgccttctgttcccttccataacacactgcaacctggacctgtgaacgagaataaactttctgcctcgaattgactttgccagaatattttatcatagcaacaggggaaaaaaaaaatccatgacagacaaaaagggtggccgagattggctttcacaactagacaggaaggtgtagtgggaaccagtcagacagctccttacttacaggaagggagctcctattttcttaggctgggggcagctaattacacctctccaggctgctgtgggcgagttaggaattctatttgccaagattcctgccatgcttcctgctgctctcattctgagggtggatgaattgttttagaatttgtccaggatctttgcaatgtgagtcactcttgggaagtgatttgaaatcatcttattatttcctagttaatctgtgtatgtcaaccatagcccaatcgtagcccagcgttttcagaaatgcacactcaggaaggaagctttctcagtcagaagtgttgaatatacaacctggggtgtggagccatgaaagcttatttagatattaaagtttctgctgctaagataccaatttttgtttaactcaatttctccacaaattactgagtataggatggattgtattttagatgccttgagatcattaagatcttagggaacacatagtttggaagatattaatttcctcatgcgtactatttatccaagctagtggctactgggcacagtggtacacagctgaaatcccaacgtcggagattttaaatcggcaggaagatttttaaatcagaggccaacctgggcaagaggaggaggttctctaaagcatgaaataaaaacaaagaaggagaaagatgagaagtctttcttttacctttgccataaaagggaataaagcaaccatcttcccagaagcagcaacctcactgcctttgtctttctggttgtgtagttacaggtctttccaagatcactgcaagcgcactgcctcgactcagtgcgacttctctcatctttctaaatacggagactacactgtgagagtcagggctgaattggcggatgaacattcggagtgggtcaatgtcaccttctgccccgtggaagacagtaagccatgcatgtttccactttgttatatcaagtcatcttaccttgcttctgtccccatcagtaagaatgtttagtaggcctacagatgaaatggtccgtgccatgaagcgtggggtacagcagggatgctgtgtctgtaagttcatggattcatggatgaagcagaggaaaatacacatgtgctgaataaaataaatgaatataaacttggtggcttcgctactcacaaatatggcaaattaaggccagtgctgttaatgagggaatggaaaactctagaagaaagtcagtgtgagactatgaattaagccaagagataggggcctggaaaatggctcagcgcttaagagaactggctgctcttccagaggacttgggttcaattcccagcacccacaagtctactcacaacagtgtataattccagtcccatgggatttggcaccggttctggccgctttgagcacctggtacacagagcatacatacaggcaaagcaccatacacctaaactaaaaataaaatgcaaaataagttttaaaatatgggagaagtggagagaggtagatgcagagagagaaagcccagtgcagagagaccactgtcctggagaagggtggaagaaatacactcactgatggtagactctgctgaggctggctggtaagctttggaaagaagataccctggttagaagtggaggctagggggacccagaggtcctgagatgcacatgtttaaagtatcaggaattgaaaaccagttaagctgccatcaagcatctgggagaattagaggttacaaaaacatcagggacaaagctcaaataaggccctcccaggggcatcagagggaatacccgggtctgggggccagggcttatacaggtccttacaggtgggttctgtagcttccacagagagatgctcactcagacagaatgaggcgaaagtcccttgttctctttccagttctgtcttaggacaagcaccaaacttagaattctgcacctggaaatggccagttagtcttcttcgctaaatgttcctttctgaaaacaagggaaggaaatgaccgttgcaaaaagacagttcactgagagtcaggctctaaaactaaaccggtcttcagtggttaccaagggttcctgcaaacccatctcgagcagaagataccataaatcaagagtgcatttggcacgcctagcctgccatgccacaccctcctgatcccatgactgatggggaggtaacagactacagccatttccttgaactgaggggatatagcaattcaaaggtcaaaggtcaaaggtcagtctctgtttcctgccagtatctttcacacaaccattataagttggggaccgtttgatagataagtttccactgtagtaatttcttattgggcctggctggttctaagtcttacattatgtcccagggaagccagttctctgtagactcagatcaaagagcatgactcaaggttacacgtgtaaaagtgagagagcagagacgctgacacaggcccctgtggcttagcaagaggcccccctcaggagtggcgatggtcagagaggagaacacaggccaatcttcctcagagtcttttgttattccttctgtggttatttttgagcacctactgtgtgcgaggcatgttcttagcactgaagctacaacaacaaacaaaaacaaagtcttgccctcatcgagtgctctagactcataggaagactggcagcaacccaagaggcagatatttgacggtacagagtgaatgcggctctcaaagtggaaaaatcaacaggaaagaggaatatattcttaccagagagccacagtatacaggctccccagagtgacgtttgaatggatggagatggagaaggggtgaagggcctagctacataagcaaaagaaaagttgtaaactatatatagttctagatgataaatatttatgagtaatccctacagttacagaaatatcatttgtagctttaaggctagaaaatgaaaaagaatccaagccagtagaaggcataaaacaaagagaaagagaagaatttaataaaataagaaatgtaaaaacatattgtgtgtgtgtgtgtgtgtgtgtgtgtgtgtgtgtgtgtgtgtgattgtgtgtgaagcatggtgatggtgacatgcctttatgtcatgtctgtaacaacagtgttgtcaagacttaggcaggaagatcgaaagtttgaggctaacctaggctacgtactgggatgacccctccctaaaaatgccatttttacaaacaatataaaacaataggattggaataatcctaaatttattagatattactgtgaacataaatggatttaattcaattattacagacaaaggattttggatcttttgaaacaagcaaaaaaaaaaaaaatccatccatcctcctgaggcactgtagatggtgtatcaagagccagcgttatccttcagtagatagttgcacatatatatgaggaattcgtgttcgagtgaagtgtttaaaatgtggttttttgattgtcattctggtgtgttcttatactcagccatcattggacctcctgagatgcagatagaatcccttgctgagtctttacacctgcgtttctcagccccacaaattgagaatgagcctgagacgtggaccttgaagaacatttatgactcatgggcttacagagtgcaatactggaaaaatgggactaatgagaaggtaaggccgcctctcgagtgcatctgacatgagtattgtgctctccgctcagtttggtaagctgtgatgagagagaggaatgggcacccagggaccacgcggggaaggctcagtgggtaaagtctttgctgtgcaaacatgagggacagaatttggattccccaacacccaagtttaaagccagggatgcgcagcggtagtcacagtgctgagagatggggacaggagaatcctgggatctcactggtctgctgttttagtcctttggggagatccagattccgggagagactctgtttcaaaaacaaggtggccagtgacgcaggaaggcactgatgccaacctctgacgtgcacacatacacatattgatgtgtgctcacacctatgcatgtatacatatacatattgatgtatgtacatatccatgcatgcatgcatacatacacatattgatgtgtgcacacatccatgtatacatacatacacatattgatgtatatgcacatttccatgcaggcatacatacacatatgggtgtgtgcacacatccatgcatgcacatatacacaaattggtgtgc

SEQ ID NO: 379 - DNA, 2586 bp, Mus musculus
gccagcggagactcttcgggtcgcggggcaccggccatcccgccgccgtccctttcgcctggctcggctcccgcctgcctccactgctcgccagccgcgcgcagctgcgcctgatgcccagagcagctcggaggtggccccaggacatcccagagggggattcacgagacccggcgattcaggtgtgagagcagaaaaacggacttaagagctgagcaggatgcgttcacggtgcaccgtctctgccgtcggtctcctcagcttgtgtcttgtggtgtctgcgagcctagagactatcacaccgtctgcttttgatgggtatccagatgaaccttgcactataaacataacaatacgaaattcccggctaattttatcctgggaattagagaacaagtctggcccacccgctaactacaccctctggtacacagtcatgagcaaagacgaaaatctgacgaaggttaagaactgttcagataccacgaagtcatcatgtgacgtgacagataagtggttggagggcatggagagctacgtcgtcgccatcgtcatagtgcacagaggggacttgaccgtgtgccgctgctcagactacatcgtgcctgcaaacgctcctcttgagccgccagaatttgagatcgttggctttacagaccacataaacgtgacgatggaatttccacctgtcacttccaaaataatccaggaaaagatgaagactacaccctttgtcatcaaagaacagataggggacagcgttaggaagaagcacgagcccaaagtgaataatgtcactgggaacttcacatttgtccttagagacttacttccaaagacaaactactgtgtatctctttattttgatgatgaccccgcaataaaatctcccttaaaatgcatcgtccttcagcctggccaggaatcagaacttccgccactttttaacctggataatccctgaacggtcaccttcagaagccatcgatcggctggaaatcatccccacaaacaagaagaagagactgtggaattacgattatgaggatggcagtgacagtgacgaagaggtccccacagcaagtgtcactggctacaccatgcatggactgacgggcaagcctctgcaacaaacctctgacacctcagccagccccgaggatcccctgcatgaagaagattcaggcgctgaggaatctgatgaagctggagcaggggctggagctgagccagaactccccacagaggcgggggcggggccttcagaagaccccactggcccctatgagagaagaaagagtgtgctcgaggactcattccccagggaggacaacagctccatggatgagcctggggacaacattatcttcaacgtgaacttaaactctgtgtttctgagggttctccatgatgaagatgcctcagagacattatctctcgaagaagacaccatcctcctagacgaaggtccccagaggacagagtcagaccttcggatagctggtggggacaggacacagccgcccctccccagccttccttcccaggatctatggactgaagatgggtcatctgagaaatcagacacctcagattccgatgctgatgtgggggacggctacatcatgagatgactccaaagaggttcactgactggcgctgggcacctacagggtttctcttcagagtccgacttgatgccttgtggtctccaggtgtctgtcatggagggactagagaactctacagccctcttggcccttgctgattggccttctctatgcagattgacaatttgggcatcaggattgtttacaggggtcatgagcgtgatctgcccaccccctttccactaatgcactaaggtggtttgtgttacatttcccagggaacaggttcagtgtggttttcagaggcagcccaaggtctcctatccctatgttgtttctaggaaatgattaaattggggggagagaaagggaaagaaaaactggccaagcagtgttcaggaggactccaggaatgaacctgaaagggggcggaagggtcagaggtaaggcatgctgagctggctgctggcacaagaaaagccatcaaggtttgagcccctgctgtctgggcccttcccagatgtcaacatctgtctcctctactctaggaagttcattcacccataaagccccgcacagtgcacgtgaggagggggagaagccgcaggaataattctaggatccaacgcgtgactcagagagagggatatcatggccatattttaaggtcatttctcgtcacctctttaaccttcagttttctcaacttatgaaataaagggactgagcaggtagccttgggagagatgcccaaagtggatgaagggtgtagggtcctcccatcttactcttctcacccccaaaccagtgtttcacattttcttcttttcaaagaagaactggtacatgggtcctggctcaaagacttccaatggatcacccatgtaaagcggttcaaaagaaacccttgtgggactgataaaacccttgtcggactttttatcctgtgtgataaaaatcccacaggaaggagaca

SEQ ID NO: 380 - protein, 247 aa, Mus musculus
MRSRCTVSAVGLLSLCLVVSASLETITPSAFDGYPDEPCTINITIRNSRLILSWELENKSGPPANYTLWYTVMSKDENLTKVKNCSDTTKSSCDVTDKWLEGMESYVVAIVIVHRGDLTVCRCSDYIVPANAPLEPPEFEIVGFTDHINVTMEFPPVTSKIIQEKMKTTPFVIKEQIGDSVRKKHEPKVNNVTGNFTFVLRDLLPKTNYCVSLYFDDDPAIKSPLKCIVLQPGQESELPPLFNLDNP

SEQ ID NO: 381 - DNA, 2714 bp, Mus musculus
gccagcggagactcttcgggtcgcggggcaccggccatcccgccgccgtccctttcgcctggctcggctcccgcctgcctccactgctcgccagccgcgcgcagctgcgcctgatgcccagagcagctcggaggtggccccaggacatcccagagggggattcacgagacccggcgattcaggtgtgagagcagaaaaacggacttaagagctgagcaggatgcgttcacggtgcaccgtctctgccgtcggtctcctcagcttgtgtcttgtggtgtctgcgagcctagagactatcacaccgtctgcttttgatgggtatccagatgaaccttgcactataaacataacaatacgaaattcccggctaattttatcctgggaattagagaacaagtctggcccacccgctaactacaccctctggtacacagtcatgagcaaagacgaaaatctgacgaaggttaagaactgttcagataccacgaagtcatcatgtgacgtgacagataagtggttggagggcatggagagctacgtcgtcgccatcgtcatagtgcacagaggggacttgaccgtgtgccgctgctcagactacatcgtgcctgcaaacgctcctcttgagccgccagaatttgagatcgttggctttacagaccacataaacgtgacgatggaatttccacctgtcacttccaaaataatccaggaaaagatgaagactacaccctttgtcatcaaagaacagataggggacagcgttaggaagaagcacgagcccaaagtgaataatgtcactgggaacttcacatttgtccttagagacttacttccaaagacaaactactgtgtatctctttattttgatgatgaccccgcaataaaatctcccttaaaatgcatcgtccttcagcctggccaggaatcaggattatcagaatctgctatagtaggaataactacttcgtgtttggtagtgatggttttcgtgagcactatcgtaatgctgaaacggattggttatatatgcctaaaagacaatttgcccaatgtcttgaacttccgccactttttaacctggataatccctgaacggtcaccttcagaagccatcgatcggctggaaatcatccccacaaacaagaagaagagactgtggaattacgattatgaggatggcagtgacagtgacgaagaggtccccacagcaagtgtcactggctacaccatgcatggactgacgggcaagcctctgcaacaaacctctgacacctcagccagccccgaggatcccctgcatgaagaagattcaggcgctgaggaatctgatgaagctggagcaggggctggagctgagccagaactccccacagaggcgggggcggggccttcagaagaccccactggcccctatgagagaagaaagagtgtgctcgaggactcattccccagggaggacaacagctccatggatgagcctggggacaacattatcttcaacgtgaacttaaactctgtgtttctgagggttctccatgatgaagatgcctcagagacattatctctcgaagaagacaccatcctcctagacgaaggtccccagaggacagagtcagaccttcggatagctggtggggacaggacacagccgcccctccccagccttccttcccaggatctatggactgaagatgggtcatctgagaaatcagacacctcagattccgatgctgatgtgggggacggctacatcatgagatgactccaaagaggttcactgactggcgctgggcacctacagggtttctcttcagagtccgacttgatgccttgtggtctccaggtgtctgtcatggagggactagagaactctacagccctcttggcccttgctgattggccttctctatgcagattgacaatttgggcatcaggattgtttacaggggtcatgagcgtgatctgcccaccccctttccactaatgcactaaggtggtttgtgttacatttcccagggaacaggttcagtgtggttttcagaggcagcccaaggtctcctatccctatgttgtttctaggaaatgattaaattggggggagagaaagggaaagaaaaactggccaagcagtgttcaggaggactccaggaatgaacctgaaagggggcggaagggtcagaggtaaggcatgctgagctggctgctggcacaagaaaagccatcaaggtttgagcccctgctgtctgggcccttcccagatgtcaacatctgtctcctctactctaggaagttcattcacccataaagccccgcacagtgcacgtgaggagggggagaagccgcaggaataattctaggatccaacgcgtgactcagagagagggatatcatggccatattttaaggtcatttctcgtcacctctttaaccttcagttttctcaacttatgaaataaagggactgagcaggtagccttgggagagatgcccaaagtggatgaagggtgtagggtcctcccatcttactcttctcacccccaaaccagtgtttcacattttcttcttttcaaagaagaactggtacatgggtcctggctcaaagacttccaatggatcacccatgtaaagcggttcaaaagaaacccttgtgggactgataaaacccttgtcggactttttatcctgtgtgataaaaatcccacaggaaggagaca

SEQ ID NO: 382 - protein, 511 aa, Mus musculus
MRSRCTVSAVGLLSLCLVVSASLETITPSAFDGYPDEPCTINITIRNSRLILSWELENKSGPPANYTLWYTVMSKDENLTKVKNCSDTTKSSCDVTDKWLEGMESYVVAIVIVHRGDLTVCRCSDYIVPANAPLEPPEFEIVGFTDHINVTMEFPPVTSKIIQEKMKTTPFVIKEQIGDSVRKKHEPKVNNVTGNFTFVLRDLLPKTNYCVSLYFDDDPAIKSPLKCIVLQPGQESGLSESAIVGITTSCLVVMVFVSTIVMLKRIGYICLKDNLPNVLNFRHFLTWIIPERSPSEAIDRLEIIPTNKKKRLWNYDYEDGSDSDEEVPTASVTGYTMHGLTGKPLQQTSDTSDEDPLHEEDSGAEESDEAGAGAGAEPELPTEAGAGPSEDPTGPYERRKSVLEDSFPREDNSSMDEPGDNIIFNVNLNSVFLRVLHDEDASETLSLEEDTILLDEGPQRTESDLRIAGGDRTQPPLPSLPSQDLWTEDGSSEKSDTSDSDADVGDGYIMR

SEQ ID NO: 383 - DNA, 87320 bp, Homo sapiens
cagctactcgggaggctgaggcaggagaatcgcttgaacccaggaggtggaggttgcagtgagccaagatcgcaccattgaactccagcccaagcgacagagcaagactccatctcaaaaacaaaaacaaaaacaaaaaaatcagaaacaaaaaacagatgaagagggctgagggctgggccctgggccaatttggtatgcacctttggtggaagcatcacacatgaggtgctgccttgttttcatcacttcctgttgcatgatgcacagctctgctttgtctcattattgatgacgttcaattttaccatttaagatgacctcaccagggtttgccactgtaaaattattcttttcccctttgtaattaataagcatttttgtgatgagacactttgagactatataaatgtattgttcttcatcaaattttctatttattcagtatttaaaaaggaaaacacaggtgtaaactcccaatacgtagcttgtcttttcattatcttaacagtgtttttcacagagcagaactttttaatttaaataaaatccaatttttttttttatttcatggattgtgcttttggtgttggatctaaaagtcatcaccaaactcaaagacacctagattttcccctttgttatcttgtagaattttttgagttttgccttttacatttaggtctatgatccagttcaagttaatttttgtgaaaggtataaagatgtgtgtctcaatacatcttttcacatattcagttgttccagcaccatttgttggaaagataattctttctccattggattgtctttactgctttgtcaaagatcagtctactgtatttttatgggtctatttctgggctctctattctgtttcttaggtctatttgcttattttttcaccaataccatactgtcttgattattatagctttatagtaaatcctgaagtcagatagtatcagtcttccagctttattctacttcagcattatgttagctatctgggtcctttgtcttttcacataaacttgagaatcagtttgtcgctattcacaaaataacttgttgggattttggttgagattccattaaatgtatatcaaattgggaagaattaacattttaacactactgagtcttcctatccattaacatggactatccctctatttttttttgatcttttatttctttcattaacgttttatatttctcctcatacaaatcttctacgtattttgttagatttctctctctctctgtcactctgtgctagtgtaaatggtattgtacttttaatttcaaattctaattgttcattcttgatatataggaaagcaattgacttttgtatagtaatgttgtatcgtgcaaccttattaccatttaaaacactaactatttctaggagtgatttgtgagggttttttttttttaatcagttctttggaatttcctatgtagataattatgttatctgcaaatttaaaaagttttatttattctttcccaatctgtacatctttctttttcttatcttattgtattacctagtacttccagtacaatgttgataagactaatgaaatggatatccttgctttcctcctaatcttagggaagatgcatccagtttttcacaataaagcataatatcagctgtagggttttttgtagacattctttaacaagttgagaacattctctcttcctagtttgctcagagtttttatcacaaatgttagattttgtcaaatgctttatcttcatctattgataggtgatttttcttctttagcctgttgatatgatggattacattaattgattttcaaaggatgagccagccttgtgtaactagaataaatcttatttaatcatggcctataatttcttttatatatggttggatttggcttactaatattttgttgggaatttctgcgtctatgttcatgagagatattggtctatagttgtcctttcttgtattgtctttactggttttaccattagggtgatgctggcttcacagaataaactagaaagtgttccctctacttcaattttctagaagacataatagagaattgctataaattcttccttaaatatttggcagaattcaccagtacaatcatctgagcctagtgttttctttttggaaggttatcaattgttgattcagttctcttttttttttttttttttttttttgagtcagagtctcactcttattgcccaagcaggactgcaatggctaatttttgtgtttttggtagagacagtgtttcaccatgttggccaggctggtcttgaactcctgatctcaggtgatccgctggcctcagcctcccaaagtggtgggattacaggcatgagccaccacgtctggccttgattcagttctttaatagatataggactattttgactatctatttctccttgtgtgagttttgatagattgtgtctttcaagaaattagcccatttcatctaagttaataaatttgtgggcacgaaattgttcataatatttctttattatcctttgaatgtccataggattagtagtgatgacctctctttcatttctaatattggtaatttgtgtcttctctctcttttttttcttggttagcccacctagaggtctatgagttttactgatctttcaaagaatgagcttttggtttggttgattttctctattcattttctgttttcaatttctttgatttctgttttaatttttattaattcttttcttctgtttgttttaggttacattgatcttctttctctagtttcccaaggtagaagcttagtttttgattttaggtctgtgttctgtcaacaaaaagagtcaaactctgtaaaatatttgaagagatttattctgagcccaaatgtgagtgactaatggcccctaacatagccctcaagagatcccaagaacatgtgtccatggtggtcagggcacagcctagttttttttttttttttttttttttttttgagacggagtctcgctctgtcacccaggccggactgcggactgcagtggcgcaatctcggctcactgcaagctccgcttcccgggttcacgccattctcctgcctcagcctcccgaatagctgggactacaggcgcccgccaccgcgcccggctaattttttgtatttttagtagagacggggtttcaccttgttagccaggatggtctcgatctcctgacctcatgatccacccgcctcggcctcccaaagtgctgggattacaggcgtgagccaccgcgcccggcctcacagcctagttttatacattttagggagatatgagacatcactcagatatgtgttagatgtacattggttagatctggaagggtgggttaatccgaagtggggtgaggcttccaggtcacaggtagatttaaatattttctgattggcaatttgttgttattatcaatagaaaagaatgtctgggttacagtaagggattgtggacaccaaggttttatcacgcagatgaagcctccaagtagctggcttcagagaggatagattgtaaatgcttcttatcagacttaaggtctgtgttgatattaatgctggtcagcttttcctgaattccacaagggaagagggtataatgaggcatgtctgaccccacctttcatcatggcctgaacaaatttttcaggttaactttggaatgcccttggcagagaggacagatccattcagatggttggggggagggcaggggctgcttataactatattttttggtttacacttcttttcttgtgtattcatttaatgccatacattttcctctaagcactgctttcattttattccacaaattttgatgttttattttcatttttattcagttaaaatattccaattcttcctaagtcttcttctttgacccatgtgttatttacaagtttattgtttaatctccaaatattttgggactttttctagctatctgttattgatttcaagtttaattccataagatctaatagtatattttgtgtgatttctattctttcaaatttgttagcatgagttttatggcccagaatgtggtctattttaattaatgtttcacaagaacttgagaatgggtattctgctgctgttagatgacatattctataaatgccagttagatcaaattaattgatggtgctggtcatctcaactatatccttactgattctctccctgctggctcaatctgtcaattactgataaacagatattgaaaactccaactgtaatgatggatttgtctatttctccttgcagttctattaatttttgcatcatatatttagacactttggagttgggtgcatatacactaaggactgttatgctttcttggaaagccgactttcttatcattatataattgtcttttaccccagataattttctttgttccgaaatctgcttgcctgaaattaatacagctactccagctttcttttgattaatgttagaatgtcatatatttctccatttttcttcttttttttttgaaactggatctgcctctgttgcccagcctggagtgcagtggcacaatcatagctcactacagccttgaactcctgggctcaagtgatcctcccacctcaatctcctgagtaactaggactacaggcacctgccactacacccagctaaaatttttttgttttttgtttttttggttttactatgttggtcaggttggcatttttaaaaatgtaatctatcagtgtctctatatttaaagtgggtttctggtagacaatatatagttggcccttgatttatttttaaatccactctattagtctctgtcttttaattggtacacttagaccattcacttaaatatactattgatagttagattaatatctcccatatttgtaactgttttctattcaatgcacttgttctttttatgtttattgttgttgctgttattgtttttcttccttctctttttctgccttctctgttgttgttgtttttttgttttttttttttcttttgagacggagtctggctctgtccccaggctggagtgcagtggcacgatcttggctcactacaagctctgcctcctgggttcacaccattctcctgcctcagcctcctgagtagctggcactacaggcacctgccaccacgcctggctaattttttgtatgtttagtggagacagggtttcaccatggtagccaggatggtcttgatctcctgacctcgtgatccgccccctcggcctcccaaagtgctgggattacaggtgtgagccaccatgcccagcccttctctggttttaattgaatattttatatgattccattctcccctcacttagcacattaattgtattagtcaggattctctagagggacagaactaataggacagatgtatatatgaaagggagtttattgggagaattgattcacatgatcacaaggtgaagtcccacgatcagccatctgcaagttgaggagccggaaagccagtccaagtcccaaaagctcaaagtagggaagccaacagtgcagccttcagtctgtggccaaaggcctgagagcccctggcagatcactggagtgaagtccaagagtctaaaagccgaagaacttggaatttgatgtttgagggcaggaaacatccagcatgggagaaagatggaggccagaagacttagccagtctagcctttcccccttcttctgcctgtttttatcctggccatgctggcagctgattagatggtgcccacccagattgagggtgggtctgcctttcccagtccactgactcaaatgttaatctcctttgacaacaccctcacagacacacccaggaacaatactttgcatctttcaattcaatcaagttgaaactcactattaaccatcacattaattatacttctttttaacaaatctttagtgactgccctagagtttgcaatatacattataactaatctaagtccattttcaaataacaatacactaattcatgggtagtacacaagtatcttagaaaagagtatccccaatttctccctctcaacccttataacattgttattatacatttcacttattcataagctataatcaaccaatatgttgctgctattattatttggacaattattctcaacctgataaagaacatctacagaatccctacagctactcacagaactcaggaaagcactttacttactattaccggtttatataaaagatacaattcaggaacagccaagtggaagagatacctaggacaaggtatgggagaaaggggcactgagcttccatgccgtctctaagtgtaccaacctcccagaactttaatgtgttaaccaacccagaaactcttcaaactctgttggttgttcaggggttatttatggaggttacatcatgtaggcatgattgatcattaactcagtctctagtccctctctccttcctggaggttggggtggagggggtagggccaaaagttccaggctttattgattattgggcttggtctttttggtgaccagcctccatctaaaagctatccaggggctcaccaagagtagcctcattgctgggcgcggtggctcacgcctgtaatcccagcactttgggaggccgaggcgggcagatcatgaggtcaggagattgagaccatcctggctaacatggtgaaaccccgtctctacaaaaatacaaaaaaaaaaaaaaaaaaattagctgggtgtggtggcgggtgcctgtagtcccagctacttgggaggctgaggcaggagaatggtgtgaacccgggaggtggagcttgcagtgagccgagatcgcgcagctgcacttcagcctgggaaaaagagcgagactcggtctcaaaacaaaaacaaaaacaaaaacagtagcctcgttataacgcctatcacccctattactcaggaaattgcaggggatttaggagctctaggcaggaaccagaccatatatttttctatgaaaaaacaaaacccttagcatagcgatcatcatgattttaaattcctagtctgatttgcaaattctctgccatctccgagtcttatttctaagcttgctttgtctcttccaattgtgcttggtgttgtctgcctttcagcatgccttgtaattcgttgttaaaaactagatataacatatcaggtcatgggagctgagataaatggccctttaggataaggtgttaggtttatctggctaagagttaggctgtgttaaatgtttgctgtagttgtaggtgtcagaggcttcagttttatttagtgtcctcatttttgtctcctccattgtctttgggttttcctagaaatgccttcttaaatggagttgtaatccaccgttattatactacagagtcctgttgatgtggtggtaagatactgtggaggcaaaacattctacaatcttatgattaattcccagagttttctttaatgggcctgagtctctgggctatgaccctccgagaagtttcttaacttttgcttttttcctccagtcatgatagacaggaaggctagagggggctgagttgtctaattgcccttctgctaggtcagtttaggctccagtaatgtaattgccctgaggacaggtttttgttacagaacactctgggcatatctcaaaatgtttacttttcccctcccaccggccagtcaggaatttttctgtggtctttaccatgagaacttggtagagcttcttggagtaaacctttaacaatttggggagcatccctctaagactgagtacccaacagtgtttaattctcaagctagtccacactcagtctccagcaattagtcaattacaatttaagttttgctatgatttcagaggcttctggtccctgtaaactgtgattctttgcatttgtctgtctttcagtttttgcagtttgccctgtgactcaattcactgatactgaaacaagaagagttgttaatcttcaatttgttcagcttttctcttgttgtggggagtggagtgacagctttcaagctcttcacaccttggcatagactgcatttgcttttgttttgttttgttttttgtttgtttgcttgttttgagacggagtctcgctctgtcgcccaggctggagtgcggtagcgcaatcttggctcacggcaagctccacctcctgggttaacgccattctctcgcctcagcctcctgagtagctggggctacaggcgcccgccaccacacctggctaatttttttttttttttttttttttttttggtatttttagtagagacggggtttcaccgtgttagccaggactgcatttgttttttaaaaaatctttttcctaattatataagtaaggatgtttactgtagaatgtttggaaaggaaacaaaataaaaatcacctactatcatccaatctgcaataagtcatagttaaggttttgacatagttttatttttaatatatatgtttatataaaagagtgcatgcagcacatggagtttggtattggatttctcccattttcagaggctatttctgcaaattctctaaaactgtggctgaaaatattttcaatgttgaatgtcttttataagaaataggatcctagataagttcccttcagatcgtatggggctggtgggaattctgccaagggtcacataagaggcaggaccgtgacatcctctttatgatcacccttgtgcctagccttaaaggagtatcagcaaatgttggttgacttcatagattaaaaggctcatttttcccatctacaaaaagtatgaaacatcctcctcctccctttcctaggaggccagaaagctgaacgagagattaaatactcagttaaaacaatttaggtggttagtgtatcttttccctctccttcaaaaagatattaacatttccattttagtagctgtaatgtttagaatatacatacattttacttgaaagctgcctcatagtctattttggttttggattttcttttttttttcgtttttcttgagacagagtttcgctcttgtctcccaggctggagtgcaatggtgcaatctcaactcactgcaacctccacctcccaggttcaagcaattctcctgcctcaggctcccaagtaactgggattacaggcgcccgccaccacgcccagctaatttttgtatttttagtacagacagggtttcaccatgttggtcaggctgggtcttgaagtcctgacctcagatggtccatctgccttggcctcccaaagtgctgagataacaggtgtgagccaccgctcccggcctcatagtctattttagaagttgacaggctataaataacaagcagacaaattaatgaagaacatctgtctttctgcctatcccgaaacacgttgatcagtggggggtcgagggaagggtaggagtatggagaagagacccgcggagaagaggggagaatctacaacggataatgttgtagatatttacaacatttactcaatggtaggtatttttatcctcgttttactagttggagaattatatcatgcaggtttatacaattaacaagtgggggagccaggagagaacccattcactctttagttcattcattcattcagtcagtcaacacatctttgggtgtcttctaaatgccaggcactattctaacccctaaggatacttcagtaaacaaaacagtcccaaattcttcccctatggagctttctcggcgaaggcgggattggttaggagctgacaatcggcagcagacgattgtaaatgaccggaccttttttctattctcctgcccagcccccggcccggcctccgcctccggccctgctccagccccgccagcggcccaggacccgcccctggctccggccccgcccctggctccgcccccgcccccgcgccggcggcggcgcggcgcccgcgcttccgtatcgctcctcgtaggccggggctcggcgcgcgcacccgcactaaagacgcttcttcccggcgggtaggaatcccgccggcgagccgaacagttccccgagcgcagcccgcggaccaccacccggccgcacgggccgcttttgtcccccgcccgccgcttctgtccgagaggccgcccgcgaggcgcatcctgaccgcgagcgtcgggtcccagagccgggcgcggctggggcccgaggctagcatctctcgggagccgcaaggcgagagctgcaaaggtaacgcagcgtggcggggtcgcgggagcggagcgcgtggccagctgactggagggaaaacgccgcctccctgcagcggttcccggaatcccctccggttccctctcgctctccccgactcctcctcctcctcctgccctccctctgcgtcttgagtatgcggctagtgcgcccttcctctctcccggggccgcacctgcgaccccaggacccctcccgggccctgtcctgcgccctccacgcgtcgcccctgctgggagtccgctttcgttgcacccctccgcgtcccaccccaccccaccaaggatgcccaggataccgggcatttgccactgcaagatgtgagtcgttgctaagtttgagggtcacattcctccaggtccaccccgccttgcaaaaccggctcaccagctgggtgctcaggttcgggatctccagcccgcccccttgaggtcccctgggattagcccccctcgacctgcgtcagggtcacagactgcagccggggctggagcggcctacacccctccggatccgctgcgtggaggcaggagggggaaggggcgaggggacgtggccgcggagacagaagggtgcaccctcccagggtcggagaggggagatactgggaagatactccgcgaatatggagaggcgatcggcacttgcatttcaaccctgagcaaatcaatccgttacacgcagtagcgagttgactccatcagcccgtttatttggttagcgatggttatattgactctgagtattcccacctcctttcttttaacatttttttttttatttccttgttttgtttagcaagaagtcttagaaacgaatatagcatgcttgggcgttgattcagtggtgagaagtgccggagctggctcagggagaggtggagtttcccatgtgtgctcactggcccaggggctaagtcccactgcttgccaaggtttctcagtatcctgtccacccaccccctatccacctgtgcaggcttgagggggtgagggggtagcagatactctatcaaaatctaccctaaggaaaatattcgataaacactcctagcaattagggcatagctgataaggcttgatctgtttgtcgcagaaaatgacttgaacttgtaagttctattgttcataaagttgttttccacaattttagataatcaaaaatgtacatgactcatttttcttacctattatttcctctaaagtttctcatgtatttattgaaaagttaaagaaaatctgattttggttcacataatttgacaatggtgatttgtctaaaagtcatttcaaaaagtagtatgaaaaggatcataaccctagaggtactgtcatagacgtgaaacatttattaaaatatatattccatggctcacacttgcacactcaaagccacattggactcattttttctgctacctttataaaccttcaaactgttcaagagtcaatggtatgtatcatcttccgttatcaatcatcatgttttgttttgtttggtttggtttggtttggtttggtttttgacaaagtctcgctctgtcgcgcaggctggagtgcagtggcactgtcttggctcactgcaacctccccctcctgggttcaagcgattcttctgcctcagcctcttgagtagctgagattacaggcgtgtgctactacgcctggctaattgtatttttagtagagatgggatttccactatgttacccagcctggtctggaacttctgacctcaaatgatccacctgctttggactcccaaagtgctagtattacaggctcaatcatcatgttttatcaaagctaaaacccaaactaaaatgccattgcttataagatgcactttcattttatgtaatgaagtaagaaaaaacactgtcaatcatgctatgccatgccaccagaatgaaagcattctgatttcagaaattctcaaatgttaaaagaaaatgggcattttataatttgtgaaatattagtgagttagagcagagcttgacggcactggccctgagggtccttcttcttcctttggaagaatgaaactgggggctatgcaattcagggaagaataaaggaaaaacaggtaattggcagaggaggttggctgacttagaggtatggaaaagacaaaacaaaggagggaaaaagagaggtatgtatgatggggaggagttcagagccactgaaaattttctctggccctaacaggaaaacgagttaccccacaagccagggttttatcatctggtacgtggagatatccatcagcattgtcattggttttcatttgtttgtttttaattctcaagtttaaaaaaaaatttaaaatttaaatgtgtctcaaccaccagaaactatagtgagatttctctgtaataaataggaaagaaggagactgatccagtccttgttaaaaaaaaaaaaaagaggaaactgaatcacaacatactttgcttttttcttttctcacaaaggaacagtgggccctttatgctgggtgaaggtgagtgagatgggggaaggttcactgggcaccaaccttctgggctagagaaattgcccaggctttacagaacaagctggaatcagataaagttgtggaaaggaagtcgaggtttcactctgccatatcagtaggaggtactaaagccaaactagtagcagcaaagtgaacagaaatggtaagggggaaaaataggaaaggaaagaacaacgtggattgcaagacgtcttactaaaaacaaagaattacacttggaacagaagaaattcattaccattgccttacactgtgcaacaacttgataaaaatataaatccaataaaacaaactcaaagatgagaaaattgtaaactggagatgaaaagggagattgcagacctaaaggaaaattgaagaccgtaaaaacatagtgacagaataaataagtcaggagaaagaacagaagcaatactgctgaaaataaaagtattttaatagaagaaagcccagtaaggaagcccagtaaattcaactgaaaagggacaaagattaagaagaaagaagctattatgaaagacaaaatacaatcaagaattgggaccactgaagtcccagatgtagagaagtcaacaaatgggacagaaaattcaaataaaaataagtccaaagaaagcttattgagatgaagaaaaaatggtctgtaggccaaaggaacatgccatgttccagaaaatgtcatgtgggaatacggaagcactacgatatcttaaactatttaaattcaaagaaaaagatttaggaatctaagaagaaaaagtaaaggagggaaaaacaaaatcaagctcgcctcagacttcagtgcagcactaaatgccagactatgatggttgtgaggaaacagttccaagggaaagaaacttttccgaggggcatattttttttccggaagaacaaagggaattcagcacccatgaaccgtttttggaaaaacaaaaacttgctgagtaataaaatccaggaaatagcaaattaagagataaatcaaaataaagaacttaagagtagagaaaggtaaaaagacttggtgagtatttattctatttaaatatagaagtaatacatctatagaaattgtgggtaagatagaatgcgattgttattaatctagacaaaaatatacagccaaaaaaaaaagaagtcagagaggaagatggaaggaaacatgagaataccaatattctcttctttcaaagaatggaatagtaaatatggtataaaattaaaagatgctatgtgaatatataatactgcaacttttaatatctttcataagttttatttaaaaccttagagggatatcataggaaattatactttcttatggacaaaaaaatttaaattttaacaactcctttgactttattttagtcttttcccaagtaacattaaacagaaacactgtgtgtgtgtgtgtgtgtgtgtgtgtgtgtgtgtgtgtgtgtgtttatgcatagaaagatctgtgggattatgttcgcctaatattaatgatagtaatagtttttacagaagaaaaaagaaagatgtttgaaaaataagctagaatcaaatatgccaagatgttaacaattgttgatgctggatggtaggaataaggatgagtgttactttcttatttgtactttttcatatttttctaatttccagaaaaagatatgtaattgtttttgtctaacatttctgaatccacttcattcattattcattgcctccttgacaatgtgcatcagtctatgtcaaacagaaggaaagacacagccatactttaccaggagactatgaggcagcgagttcctggagggttgtttgtctgtctaggaggagttggaattcaaagaatcacttcactcaatccatccattttatctgggccttgaaaattggcagggtttgtctggtctcagggtgaatagcaggtagagctcttctttcagaatggagaaggccacagtgtcacagggtgaacctgtgacaaaattggggttcagcctgggaagccacatgagttgttggcttcgcacaggatggaattaaagagcaagctgacagaattaagtgaaagcaagtttattaagaaagtcaaggaatgaaagggtggctactccataggcagagcagcagcatgggctgctccactaagtatacttatggttatttcttgatcatatgctaaacaagtggtggattattcataagttgtctgcaaaaggggtgggagttctggaactgagggttcctcacttttttcgatgatatagggtaacttctgcatgttgccatggcatttgtaaactgtggtggcactggtgggagtttcctttagcatgctaatatattgtaattagcatatgataagcagtgaggacagttttgtcaccatcttggttttggcaggctttggccagcttctttactgcgtcctgtcttatcagcagggtctttgtgacctcctgttttatcacataactaagaatgcctaaccccctgggaatgcagcccagcaggtctcagcctcattttacccagctgctactcaagatggagtcactctggttccaacacctctgacaagagcagggggtgacctgtcacctggggctcagcaggacaataactctaggaaaaactggaaaggctgatagccttgaatttaacctaaggagcttggtgcattgtcaggcaacagtgagctacagactgagctcactacataattcacagggcccacccagagccaaataaaaatgcctgagaaagtaccactaaaggtactaaaatataaagccttttcttccacagtctctctctctcaacacgtaatgtttttttgtttgctatttaatatcattctaagtaaaaaaataggccgggcatggtggctaacgcctgtaatcccagcactttgggaggccaagtcaggtggatcatgaggtcaggagatcgagaccatcctggctaacactgtgaaaccccgtctctactaaaaatacaaaaaattagctgggtgtggtggcgggcgcctgtagtcccagctactctggaggctgaggcaggagaatggagtgaactcggaaggcggagcttgcagtgagccaaagtttgcgccactgcactccagcctgggggacagagtgagactctgtctcaaaaaataaaataaaataaaaaataaaaataaaaacttgaattattagcatgaatattgcagttctttatattatgcaaaaccagatttaaataagagcatttaattcatatatggaattgccaagttataccattagtactttacagcacatcttgggaggttcccttgaactagccagaagaagcaaactgaagccagacagaggaagattgcaaagaggaagagagggtctccaccaggcacagagccacccaagggagccctccctcaggctcagggataccgagggagccagagcagattcacacaggtccctggggcccctctgccctggtgactctaggatgcatgtacttgcacctgacttctaggcatccccctcctgctagcttcccctcgatccagcctggggcaggctctgtggaagtcaagccttgcatctccctttcccaagcacctaccatcctaacccacagtgtagtggccacgtccaagggtctttacgtctctgcctcagatatgctaggtacctgggtcaagagtgacccagagactcatccctgccagacccaacctccagccagtcaccctctgactccagtccatggggcgaggctggagtgctggccctgacctctccagcatctgcaccaggagggcttcagcggaatgtggtcccagttgatgccccatgccaacagtagcagcagcagttgttaggcatagagattgaagccagacagggcctgggattcctctgctgggagcctaaactgcaggagatggggaaggatccaagtgtgagctggggctcctagcacaaaactcacattgaaagataaaatggttaagaatttcaggatagccacaggagaacctcaagccaagtgtaggatccttctagctgcagggcctgggggtactgagactagccctgttgacaggagccatgctttaggaagactgatctatttgtagtcagcaagagttttaaggagctccattaacaatttaggcacgatgccaagatgggatattatattttccaagcaagaagaatctggtaatcaggcatatggttccaagtgaagtataagtcaccagaaagcaaggaaggaagccatcccctggcccagagggggagaatggggtgtgtgtgtgtgtgtgtgtgtgtgtgtgtgttttctcggctgctgaagagactgagtgttcctgcagatatataacaaagatgaagatgtgccaccgttggagacaaatggggaccagaggccacatgtcagaggtcaggtcaggtgttcaaatataaaggggttgccctggctgggcatggtggctcacatccataatccaagccctttgtggggctgaggccggaggatcacttgagcccaagagttcaagaccagcctggacaacatagcaaagccccatctctaaaaaaaaaaatacaaaaattagccaggtgtagtggcaaatgcctgtagtcccagctacttgggaggctgaggtgggagaatcgcttgagcccaggaggcagaggttgcagtgagccgagatcacaccactgcactccagcctgggtgacagagtgagaccctgtctcaaaaaataaagaagttgcccttctacaatctggatgtggtggtatctaggggaatgttcacaactaggcaacgcctctgctgtggattgattatgggagatgacatcacacatcaagatatctcagcagatgtttctcaatgggtacagtattatgggattagttccaggcagtcgtgcttggatatctcatgggtggtggagtctgtagcaaggctggaaattttgacttggaatcacttggatttctctaagagaataccccaggttggatgtgttactgtggcagcagagaagacttaaaaattacattgtttttagcttgaacttcgtcttgtgaagtcctaattagggaagaggagtcaggctgggggtctaggggaaagcaaagagataaagcagataagccataggtctaccttgcttcatggtccaggacatacaaacaaaaagaagaagcagataagctataggtctgcctttctttatggcccaggacatacgaccctcctgcacacataactcacaatcttcctgcgtatcatcaaatgcttcaacttatcatcaaacatctcggctgaccgaaaaatgcaagttagctccctgctaccttggcgttgtcagtcctccacatagcactcttcagcttaaattgcattttataaaatccccagcaagcctttgtctcctggcagtcaactcgtctcttactgacctgcccattgctcccttgcaatgtattttcctactttctctaataaatctgcctttcttgacctaaactgtcatggtaaattcttcttactcctatgtcaccagccacagacagtcgccacaagccatgacaagtctgcgatttcatggtctttttttattttgatgatatttccccagtgtttgggggacagaagaatgcccacaatctataggtcttagtcacatggatggggacagaatatctgagagagagagaaggaacaagatctactggggctccttaaaattcttcttgaagaactcctttctcaccttggagtagggaagactttctgattatgactcaaaatttagaagctaagaaagaaaatacctttaaatctgaaaacataaaactcaaaaacttctgggtgtttttttgggggggttgttttttttaaacagcacaagcaactcaaagggcaagtgacaaactggggagagaagaaaaagatgtgactcatatcacagtttcccttctacttaaaaaaaaaaaaaactgcaaaccagtaagaaaatagcaacagctcaacagaaaaattgccaaaggcacgaacagttaatgagaaggagatgcaaatcgctcttaaacctatgaaaagatgaaggtgttccatcacaaagagtaagagaaatacaaattaatattaatgtgaaagacaacttttcatttatgaatttgagaaaaatccaagaacttgatgatatacctctaagaagcaacggtagggaaacgaaaattctcacacattgcaggtggttatgtaaattggtatagccccgcgggtggtcagtgtgacagtttctatccaaattacagatgcatagtttcattgccaggtctcttctgtctgcttcttcagacccaccctcccctctccccactgtttagttggcccaggaccctgtctggtaaggatacaactccaggccccttgccctatggcttctggttgtgttcagccgatggggagccccaaataagagaaggaagggacaccgtgagtgatatttatccctcagcttcctgcctgcactgtcctcttggtctggctgtgtccagtggtctcatgtcatagctgctcatacaggagtttctccttacaaattgcaatgttggcttctcttccccctccggcccagagtgattacagccatcaatgttgtgagctacaggttctataccctcccttctgcaggcccagaatggtaacagccctcaatgttgtgagctgcaggttctgtactctccctcctggggcccagagtggtcacagccctcaatgttgtgagctacaggttctatactctcctttctgcaggcccagagtggtgacagccctcaatgttgtgagctacagctctcaatgttgtgagctacaggttctataccctccattctgcagacccagaatgttacagccctcaatgttgtgatctgcaggttctgtactctccctcctggggcccagagtggtcacagccctcaatgttgtgagctacaggttctatattctcccttctgcaggcccagagtggtcacagccctcaatgttgtgagctacaggttctatattctcccttctgcaggcccagagtggtcacagccctcaatgttgtgagctacaggttctatattctcccttctgcaggcccagagtggtcacagccctcaatgttgtgagctacaggttctatattctcccttctgcaggcccagagtggtcacagccctcaatgttgtgagctacaggttctggagtctcccttctgggccccagagtggtcacaggcctcaatgttgtgagctgcagattctatactctcccttctggtttgcctacagccctctcacacatttgtaaatatagtcctgcaacccctaatgatgtcttgggcaaagatggaccttttatatgacgatagccccataagattataccatatttctactgtaccttttctgtgtctaaatatgttcagatacacaaatgccactgtgttgcaactgcttacagtattcagcacagtaccatgctgcacagatttatagcctaggaacaatagtctataccatataacctagatgtgtagttggctatgctatctaggtttgtctaagtatactctgatgttcatacaacaaaatagcctaacaatgaatttctcagaacacagcactgttcacagttgcaaagatatggaatcaacctaagtatccatcaacaaatgattggataaagaaaatgtggctaggtgtggtgctcacatctgtaatcccagcactttgggaggccaaggcgagaatccaggagtttgagatcagcctgggcaacatagtgagaccctatctctacaaaaaaaaggtttttttaattagccggtgtgtgatgacacatacctgtagtctcagctacttagggggacaggtgggaggattgcttgagcctgggaggttgaggctgcagtgagccatgattgcaccactggcactccaggctaggcaacacagcaagacccgtctcaaaaaaaaaaaaaagttacatatatatacacacagtatattcagccataaaaaagaatgaaatcgtgtttttgcagcaacatggatggaactggaggccattatcttaagagaaacaactcagaaacagtcaataccacatgttcttataagtgggagctattaataaaaaatgtgcacacattgacatatatataatgtggaatgatagtcattactgactgagaagggtggattgggtgtggggagttaaggaatgagaaattacttaatgggtataatgtatactattcaggtgatggatacactaaaagcccaaatttcaccactatgcaatatatctatctaacaaaactgcacttgtaccccttaaatttatttttttaaaaagcgtgtatcctaatttgaatgagctgtttcttgccagaaccctaactgatatgtcctttgtctagcaattctacttctggaaattttcccacacttaaactggcacatgtgcaaaatgaaagagatttccttgcagaagagactggaaataattcaaatgtctatagtaggggtactaattatataaataatggtgtgtctatagagtagaactgtatccagctatttaaaaaacaaggatagaaagatcttccaaacatatttttaagtggaaaaagcagggtggaacagggactatacatgctatctcttgtctaaaagatggggaaattaggaatatgtatttgtttttgcttatgcatgaagatactctgaaggattcacaaaagaaaaaaaagttttctaaagggagcaagacttttcacaattttttttttgaatgcttaaaattgttgaacccaacgactgttgcctgttcaaaagttaaatttaaaattcctcccagactaggtaggggattgggcccagaagctgagaccaggctcacttgaataaatggggtaaatgactaggaattttactattccttacaggtctctcattatcttgtctttgctcccatttttatatttgcagtttaattagacacttcagaattttgatcacctaatgttgatttcagatgtaaaagtcaagagaagactctaaaaatagcaaagatgcttttgagccagaatgccttcatcttcagatcacttaatttggttctcatgggtaagtgctgctttttatcttagctcttatagaagcaagctgtgatgccatcctcactgagagcactggcaggaagtcgcaaactcatttccctgactagaggacccagtaccaccctgcctagtgtcaggagttaagtggaaagcaaataggaaacctacactagtagtttagattcaatgtagattcctgtcctgttgttaattttaggaaaacaaatgagtgacttaaggcaataataatcaggactatcctcgccataatttgaagagtaatttctcctaacacgctttcttcctccccaatctttgataaatgtcttttacctctaaagttgattaattagcaacatgcttattcatattctgtgaatatttctaggatggacaattgcctctgaggacattccctcagccagcccaagtacttaaacaaaaacaaggaaattctttgatgttaaagatctcgtgtgtgtccgggcgcggtggctcgcgcctgtaatccctgcactttgggaggccgaggcaggtggatcatgaggtcaggagatcgagaccatcctggctaacatggtgaaaccccgtctctactaaaaaatacaaaaaattaggcgggcgtggtggcgggcgcctgtagtcccagctacttgggaggctgaggcaggagaatggcatgaacctgggaggcggagcttgcagtgagccgagatcgagccgctgcactccagcctgacagagcaagactctgtctcaaaaaaaaaaaaaaaaaaaatctcgtgtgcgtgtgtgtgtgtgtgtgtgtgtgtgtgtgtgtgtgtgtgtgtgtgttttgaggcatagtttcactctgttgcccaggctggagtgcagggtgtgagctcagctcactgcagcctccacctcctgggttcaagcgattctcctgccttagcctcccaagtagacgggattacaggcacccgccaccatgcccggctaatttttgtatttttagtagagacaaggtttcaccatgttggccatgctggtctcacattgctgacctcaagtgatccaccgccttggcctcccagaatgctggggttacaggtatgagccactgtgtccagccattttttttttttttagacagagtctccctctgtcacccaggctggaatgcagtgagcgatctcacctcactgcagcctccgcctcctgggttcgagctattctcctgccttagcctcccaagtagttgggactgcaggtgtgcaccaccacacccagctaattttttgtatttttagtagagacagggttttgccgtgttggccaggctgatctcgaatcctgaccttgtgtgatccacccacctcggcctcccaaagtgctgggattacagacgtgagccacgacgcccggccccagatatatttttaagtggaaaaagcagggcagaacagggaccgtacatattgttgttagtgtcagctcccaaatggatcttattttatctcagatcacagtccttgcaccatgtgctgctggcaccaatgtagagtaaaaaccatctatgtgggcatttttttggcacaagaaaaatctcaatctgataccaataaatgtgtgttaaagaatgtcagacttagagtaatcattgcaagttgagcccagataaaactattgcctctctaatgtgttttcttccttctagtgtatatcagcctcgtgtttggtatttcatatgattcgcctggtaagagatgttttttggcttcactaaattttgtataagagtgaaagtgttggggcaaccattcagaggtataaaatgtgggagatttgatttctgattgtacatctgttgcctgttttattgggattctttctctgtaaaaggagctaaaatgagctaactctggttttttgagagatacaaaactagtctaagaaatgaacactagagatcatttttaaacttctttaaagaatattcaaactcttaataatctcactaataaaagaatgaggagacacagactgtgccaaataaaaaatggcccagaaatatttactctttaatttacattcttccaccctgatgattccagacaaaggacaataatttttttttaactaaacttcttcctacgtatataaatctgtccacaaaacttcactaagtattaaatatgtgtccaaccttgtgctaagtgttggttgggggtgaagagttggcagttgagaaacaaaggcctgagtcctaaccacaggaaacttcagtgatctttaaaaatttaaccgtataaggcagaatttggcaagtctggctttaatgtctcatttatcactgccacttcccacctacatgacattgtataattcaactcagtttcacagtctgtaaaatgaatcttttcatagtgcctacttcagcattgttgtggggcttaaatgcttagaaagggccagtctgggctcatgttatactcccctgctctctgtgatccagggaataagtgagctggggaatccagaggaaggaaaatttgcagcgggctgagctacttaaggaggacttcatggaggagctgggagcagagttgagagaacggcttggggagggagaatgggtaggggagagtgaaaggaagtgcatcatgtgggctgggatggcctgggttattttggtccagtgaaccatggagggacagtccaagggcatcggagaagcccttctgtccagactctccttacacagtgcacagtccctgtttcccatgcttgcctgccctgacaatatgttgctcgttaattgacttactaatttatttcccatgtcctgtagacttcctgttttcaagacaccagggctctctggagaggttatctgccagaggtgtgggttctagatcccaagaaatgactgaacagtggccagaatacaactgtgggttccaaatttcaatgccctttttcttcttctctttagattacacagatgaatcttgcactttcaagatatcattgcgaaatttccggtccatcttatcatgggaattaaaaaaccactccattgtaccaactcactatacattgctgtatacaatcatgaggttggtttgatatttcattttctcttggtaaacatattattgttctgttatatggggagaggtgatcttttctctctctctgtctctccctctcccttttcctatctacctctccttctctctgcgtttcttattcagagccttaaaaagccaaagacaaaacaccatcacacatccatttttaattcagttgaatactttaataatccaaatctattttgacaaagcttgtatgtgtcatcaaagccaatttctacaggtcagaacctcacatacaaaataattcttgtgtatgggttaggcaatgatttctctaattcagtcagtctgaatgtttaaaagtcctgttatctgaggacaggaatccaaaggtctattgaccatattgatggtttatgttcacttttctttactctggtgggacaccagaaagctgcctggcctagtctgggacaggcctgggtccatagtctggtttggtcactaaccagcttgacacttggcacggacctcagcccctaagctaatgcctctgctgaggggttgctgcaaggattcgtgacataatggatggagtcctgcttgtcttttgtcttcccacacctaccaatcgcccttagaagtcattgctttgatccagcagccccttggagtgtccttttgatggttatttatttggcctagagctgctgctgctactgcttattgactgagccagtgggagacctcttgtgagtttctcttcggtgcctgctaaaaagtttttctctgcattgagtggtcacatgtatcatccaactaactgaagcttggtagatgagatatctgcattgtccctgaaatagcccaggtctgacttaggactggatcatctagtcttagccagagagggagggggtctcagggaaggcattcataattgtcccatagaggaagggagatctgaggcttccaccatgagggcccaagtttcattcattcatttactcatccggcaattttttttttttttttgagacggagtctcactgtgtcaccaaggctggagtgcactggtacgatcttggctcactgcaagctccacctcccgggttcacgccattctcctgcctcagcctcccaagtagctgggactacaggcgcccgccaccacgcccagctaattttttgtatttttagtagagacggggtttcaccatgttagccaggatggtctcaatctcctgacctcgtgatccgcccgccttggcctcccaaagtgctgggattacagacgtgagccactgcacccggctcctccggcaagttttactgagcacctactacatgccagggggtccaactgtgaaccaaagtccctgccctcctggagcagacattatgtaaatggagacatcagtaaacaaaggtataatgtgacaggtgtgggtaaatgctacaatcaagaaaagagagggattgaaagtgcaggggtggggagggcataagatgttccattttcaataagatggttggggaagatcacttaatacaatgatatttgggcagagccctaaaggaaacaatgaagtaaggcgcccaaaaatagactctcattacatcaatgctaacaatttcctttttccatttttttctttccaaagtaaaccagaagatttgaaggtggttaagaactgtgcaaataccacaagatcattttgtgacctcacagatgagtggagaagcacacacgaggcctatgtcaccgtcctagaaggattcagcgggaacacaacgttgttcagttgctcacacaatttctggctggccatagacagtgagttttatctctgtttctccacttcgtccccatcatcaagatctttattatttgctattccatgaaataggaggtctacaaaggtgttttagacctggggctgggctcacctcttggccctgccacttcctagctctgtaaccgtggactgctttgcttctctgagccttggttttctaaatctgaaaagtggaatgataatttgtactttgcagatttgccccgtgcctgtataaggcagtaggaactgctgttttcggttttgcagcctgacaggaagtctggagccaggttcaggtgggctggatctagcgctctcatctctctggcccaggattttctttctttctttctttctttctttttttttttttttgagatggagtttcactctgtcacctaggctagagtgcagtggtgcgatcttcgctcactgcaacctccaccttccaggttcaagcgattctcccacctcagcctccagagtagctgggattacaagcacacaccaccatacctggctcattttttgtacttttagtagaaatgtttcaccatgttggccaggctagtctcgaactcctgacctcaagtgatccacccgcctcagcctgccaaggtgctgaggttacaagcatgagccaccacacctggccccagtgttttcttaatacagcaactccaccccctcattataacccaatgttcttttgtgtgtgaacaccaagtgtgcatgcacctagtacccaaagctcagaggagaagactagaccccaagaacaggcctaccccttctttctttccctgtgactcaagtcagttccctaacacactgtgttaacagccccagctgtgttactttttcaatttcccactttacaacgagtttccaagagaaccatctggtctcagcttcctgttgtaggctatgcgggtgtgcacgtgctcatacatgattagcaaagtggtaaggataactgaatccccctgtggcaaacaattcggatacgacatttgctggatttgtgtgcatgtttacgtatgtgtataaacagacatctgtgtgtacacacagaaaagaaagaaaatcagaatttatagttcatggtatttgggttgttaaagaatgcatattaaagtaacagtgagatatgtttcatggctcaaatgataaatatgaaaaatacataaatatccaggtttagagggaatacaaagagtgtgctttggcatggtccatctgaagtaattggcagcatgtattaaaaaccttaacatgtgcttactctaatccagaattctttagtaatttgtcccaaagaaattattaaggccaggcacagtggctcacacctgtaatcccagcactttgggaggcctagaccagtgtatcacttgagctcaggagttcaagaccagcccgagcaacatggggaaaccctatgtctacattaaaaaagaaagagagaaagaaagaaagttaggggggagggagggagggggggagagagagagagagaaagagaaaagaaagaaagaaattattaaggacaaatgcaaaaatttagttccaagaatatcccatgatacattaagtctttaataaaaatcagagacaatttaaatgttcaaaacagtgaatcagttaaatcatgatacagtcacttagtggaatagcattagcaatgaaaaattatgatgtaaatcaggacttggcagattttctatacagggccagagaagaaccactttagactttgtgggccacatatggtctctgtgacatattcctgtctgtttttgttttttgcacagtgtcttttgaaccaccagagtttgagattgttggttttaccaaccacattaatgtgatggtgaaatttccatctattgttgaggaagaattacagtttgatttatctctcgtcattgaagaacagtcagagggaattgttaagaaggtaagtggcttctcctgttaggatcaaaacagttctgagtgggcaatcaatgcacttgactgtctcttttgaaaggaaatttgcagttgaacaattaaagctaaaacgtcaggcttcagtatggtccgacttagggaagaagtcactatggttcattcactattgatctaaacctgcagcacagtgttctttaaaagaataagccacggctgggcctggtggctcacgcctataatcccagcactttgggaggccgaggcgggcagatcatctaaggtcaggagtttgagaccagcctggccaatatggtgaaaccccatctctactaaaaatacaaacattagctggatgtggtggcaggcatctgtaatcctagctactccggaggctgaggcaggataatcgcttgaacctaggaggcagaggttgcagtgagccgagatcgcaccattgtgttccagcctgggtgacagagcaagactccgtctcaaaaaaaaaaaaaaaaaaaaagagtaagccacatgcacaacatcaaggaacacacaggagagagggtgtgggagggagatgcagagtacagccaaatttcagtgaaccctggagagatttatttgaaaaggagagtttagctgagccacccgtgaaaagcatctgtcgctgcctctctggccctcacacacagtaaggaagtggcttatctggcaggttctgtcctctcctaatttctgcaaaggacctgactctcagtaacctcagggttatctggtatcagacagccctgcatcttcaatttttgttgtccctagccctccaaatgctggaataagtggaaatggacaaattgctctcaccggtgtagcagcagcttatgtctgtagagccctttgccaagtataaaacccttgcaagtgagaccagcctgagagataatcagggtagatgcatttcaggcggagggcacaggaagttcaaaggctctgaggctggagtgggcccggtgtatttcagcaacagcgaggagaggtggctgaactggagtgaccaggcaggagatgaagaggaggtgaggtcagagggtaaatgtggctggacctggtaggagtttgtgggtctgggtcttctgagtgtgatggaagcctgtggaacccaaggcttaacagagcatcctggctgggctgttaaaaatagaccacaggggcaaagatgggagttaggagaccaactaagacacaatccagggtggcagtcacttaagaggcagtaacaaattatatgattattatcatttttcttttaatatcgacatggattataatcagtactctaggaaaaggagcaaaaatgggtgaaaaataagtttatgtggcctaaggactatgtggagtgtcattaaatctgtttcaatcatgtctcgtttgtgttcaccccataagcaactaactctatgttttagattatgattcctaaaataagagactgttgcttattaggatattgactactctataagaggaaaaactgtagttaataggcatcttcttcataaggaaaattagcctttaaatccagaaaaaaaaataagctactagtataatctaagcaacagatggtggtggcttggaccttgatagtagaggggtaatgagtagtgagaggccatcaaattctgcatatattttgggttttgtttgtttgtttttgagatggagttttgctcttgttgcccaggctggactgaaatggcatgatcttggctcactgcaacctccgcctcccgggttcaagccattctcctgcctcagcctccctagtagctgggattacaggcacccgccagcacacccagataattttttgtatttttagtagagacagggtttcactgtgttggccaggctggtgttgaactcctgacctcaggcgatccacccacctcagcctcccaaagtgttgggattacaagcatgagccaccatgcccagctcataattctgcatatattttgcatgtggagcaagactaacttccccattaactatggaagatgatgaatgaagcaggtgagggttagatagggttagagggtttgggacatgttaaattccaggtgtccgtaaggaatctaggaggagacgtggggaaggagctggatgtgccagtctgttgtccaggagagaacccgcagctagagagagagcctgggagtcactggcttcttggtgcatgttgaatgccctaagaccagatgaggtcacctgggaatagacactcagagagaaaacaagacatccagtgacagagcccaggaacattccaaaatttggagatctggcaaatgaggaagaaacagcaaaatcgactgagaaagagcaaccagcatggtagggagagaagcaggtgagagtgatgtcccggtagctgagagaagaactttccagaaggtgaaagtggtctactgagtccagtgctgtaaatgggacaattgaagaggactgactattggatttagcaacattgtgtccttgataaaagtagttttaatagagttaggggcaaagagctggttggagtagattcaagaaagagtgggaggagaaaaattggagacagtgaagagagctcattcttccaaggaatttttccaaacagggaaggagattgtgtgctggccactggaggggaagcttttagtttgttgggtcgtaagtttgtttgtttactaactcctcctcccaaacagaaatttacagaaaaacatcattactgaaggctgtatttgagctgctaggaatcctcatttattaaactgctagtaagaatgtattttaaaaactgtaaaacatgatacaaaagttattattcatgaaagagccttcatatcatcttttaaattctgaagtgaaatgcaactacaggaaagaagaggcaaggtgtttaaagggagatggctgggcacagtggcttacgcctgtaatcccagcactttggaaggccaaggcaggcagatcgcttgcggtcaggagttcaagaccagcgtggccaacatggtgaaaccccatctctactaaaaatacaaaaattagccaggcatggtggcgggcatctgtaatcccagctactcaggagactgaggcaagagaatctcttgaacccaggaggtggaggttgcagtgagccaagatcatgccactgcactccagcctgggcaacagagtgagaccccatccatctatctatctatctatctatctatctatctatctatatctgtctattgataaagggagaagatgagaaactagacatcagtcagttttgtcacagacaagctctgtgaccttggagaagttacttagccacactgagctacagttttctcatccgttgaatggaggtaatgcctattttgcagactgttttgaaagtcaaaagggttaatgtttatgaaggcactttctcaagtgtaaagtagacacacactgtccatgagagaagataatcttgtaaaaatgacgtcacagagacttttattcctctttgaagacttttatctcatttgtaaaatgaaggcgctagactagatgtcatggttataaaatatgtgtgtgtgcaggtgtatattaaaagtgcatgtaggtgtagttttctgataaattacttgctccagatgacttataaatcctttttcttaccaagcctgtgataaatctaaccctgtttgagatttgaagacaaatcccaaaagagattaaggcctacctctaaatgaaattctcagtcttactgattttttgcttatgtttacagcataaacccgaaataaaaggaaacatgagtggaaatttcacctatatcattgacaagttaattccaaacacgaactactgtgtatctgtttatttagagcacagtgatgagcaagcagtaataaagtctcccttaaaatgcaccctccttccacctggccaggaatcaggtatgttcatttttttaaattcatgttttgagtattcatgcttttactctgagggcaagcctatttaaagaaaagaatctgaaaagaattcatggagcactaaaggtctttcttccagtaaacacctcacagagatgttttctgttggttcgtgtgtatgatctggtagagtcacttttatattgtcataccaaaaaacaatcagatactactcgatgagatcagaaatcttgaaatggaaacgcttttgtttcagggagtcaggattaaattcagcactgtgtgccctttgtgtggccattgctgaagccaaatgccagaagaggtggagttgcttgagacagtggtatacagtggcattaaggggtgaaaaggtggaagcagcgaggttgggtgcagttcatggatgtgatctggcatcagctctcgctcatagatgaaaggaacccttgccagggtgtacgagaaaatcactgatgaaggctgaacacctttctgttacacagacatcagaacaataaacagtgtgatcccaaaccttcttcccctttggagtgagaacaatcaagcctcggaactccctgctgattgttttctcaggaagtagccaagtttccacctgttttaccaaaagtgagaagctatgcaagtctccctcaaagaagcccttctaaatgtcccaaccgcagtgttaggggaaagaggtcccaatccataccccaagagagggttcttggatcttgcgcaagaaagaattcagagcgagtccgtaaagtgaaagcaagtttattaggaaagtaaaggagtaaagaatgactactctatagacagagcagccccgagggctgctggttgcccatttttatgattatttcttgatgatatgctaaacaaggggtggattattcatgcctcccctttttagaccatgtagggtaacttcctcacattgccatggcatttgtaaactcatggtgctggtgagagtgtggcagtgaggacgaccatcttggttttggtgggttttggccggctttactgccatctgttttatcagcaaggtctttaccaacggtatcttgtgccaaccccctatctcatcctgtaagttacaatgcctagactgtctgggaatgcagcccagtaggtcccagccccattttacccagctcaagatggagttgctctggctcaaatgcctctgacaccaatggaagtatctttaatgttctgatttaccagaataaaaataaggtaggatctataaagaaattactttagttgtaaaccaaaataaaattctaagccccccaaccaactgaatggatccctcctctcagccaagggccgagtaaagtaaagtaaacctgaaacactagttcaggccatgatgggagtgagtggtccagacgtgcctcacgggaccttcctacctttggaattcaggcacagctggccagcactaatattaaaacagaaaccttaagactgacaaaaagatgctttgtagcactaataccagcatgatggatagcaggccctaaaagaaaccaaagtgttttaccccaaaatacatttctttgacatattttgaaatggccctgcaaagctgtctcttgcagggaaaatctgctttctataaagaacccccttcccagtccaggtgttcttcctgatccaagagagaattcactaagagtctggcacttttttaagtccagtaagaaacatttacagtctgttctctctgaagcctgctaccagaggcttcatctgcgtaataggaaccgtggcctccgcaaccctttgtcttaacccagatgcttccttttattaattccaagtttttaatcagaaaatctttgaatctacctatgacctggaagcccccccacttcgaattgtcccacctttccagattgaaccagtgtacatcttacatgcattgattgatgccttatgtctccctaaaatgtataaaaccaagctgcaccctgaccaagggttctcgggatctcctggggctgtgtcatgggccattggtcactcatatttgactcagactgaatctcttcaagtatgttactgactttggctcttttcattgacaaagtgatatggtcacttgtgaatgaagtgagccacggaacgttgcctggcacataacggtgctctgtgttggcttcactacagggcaatatgatttgattctctagtgttcctcaagaccagatgatgcacaggctggttctaaaggaaaaaacatgtcaaacacctttagcgtaagttatttttatgtcagcaaatacaggcaaacttaaaactgcatatagattctgactatagctctttcaaaaatataaatccaaaataaatgtgcatgtctttgttctaacaccagctatctgacactaactagttgtccaatgattccattcatttctgatactaccccaggttagcacagaccccacaggttaaaggctcagtcccacaaaactgcctgcccccacttcagatgccagccacaagtcatgggtgacaaggttccctgcacttccacctgacttggctacaaattcaggagttcccatgacctccctttaggtttgataatttgctaaaatgactcacagaactcaggaaagtgttatggcttatgattaccattttattataaaggaattgatggacagccattgaagaggtgcacaggacaaggtctgaaagggtcccaagtgcaggagcttctgtccctggggagtcaggtgtaccaccctctctgtacattcatctgttcatgaatttggggactccccaacccttggtgttcacagtttgtattgggtttcattatgtatgtgtgattgattaaattactggctgcaggattgaactcagtctccagcccactcccctccttggatagaggtcaaatgggggagctggaagttccaaccgtctgatcatgtggttagtttttctagggaccagccctcatcctgaagctatccacaccctgccccatcacctcacaagcataaactcatatgtggcccctaaaagaggcttgttaacaaaagacactcctaacgttcaggaaattccacaggtttttgaagctctgctccaggaactagggacaaagactggatatatatgtatattttattatatcattgattttacatacaaacgaaactcttatagacaataaaaactgaaattagtgacctggcagacagatggtggtttattgaaactcagtccccagttccaaggtgaatgtgttgctgatgagaaggcacaagctccttggaggttgatgaattctgtgatgactcactttctcccctgactcttttccatttcacctactaagatgttcatgtaacaacatcctctcaggtcattccatttttacttggcgtgaatgcgtcatgttgcacatcaagtcagccctcattctttgattattacccgagataggtcaagtaccgctctctttaattatccaaatactgtacctgatgtcaaattcttgtttgaaactcaggaagcaaataggttcagataacgtggcctctgtcactatctgcttgccatctgacgtgccctcaaccagccaaactcagaaaccagacaggtttggatggtgaggggtcttggaaggatagcctgagaccagcattaacataggctcagcagtaagcactgtgacccaatcctagggcagactgatatggggggattttagcccagacatctggagaaacaccttccccttgtcaagccttaaaactaatggtttgtctcttttattaatattaaggccctaaggaaaagctctattcattcatttgacaaatgtttattgggggcctgttatgagccagattcttttctggatattgaggatttagcagtgaacaaaacagattaaaaacttctcaccttgtggagcttacattgcagtaggagacagaataacaagatcaacatgtaaaatagacagtatgttaagtaagtaccatggaaaaaaattatgcgggaaaggaggtgagggggatgtcaggttgaggagagcaggttgctgtttttaataggatagtgtcttgatttgcatttgctagaagcagagcctgggatgtgaattcatattcaagtgtgatttattggtgggggcatcttaggagaaggggaaagagggaacaggtaggtacagggagagagaaattaagcaggcatgtggctctcagctgagcctgatcccaaggggttctcggaagcgtgaactgtatcctcaagtcagcagccagtcagttactggtggtgatctatggcatggcctccagatgaggcagcccccttttgggcaagggcagttccttatgtgtccggagttggttcctgccaatgggttcgtggtctcgctgacttcaagaatggagccgcagaccttcctggtgagcgttaacagctcttaaagatggcacagacccaaagagtgagcagtagcatggtttattgtgaagagcgaaaggacaaagctttcacaccctggaaggggacctgagcgggttgccactgctggctggaggtggccagcttttattcccttattgtcccttcccgtgttcgtttctgtcctatcagagtgcccttttttcagtcctcctcgtgattggctacttttaggatcctgctgattggtgcattttacagagcgctgattggtgcgttttagagtgctgattggtgcgttttacagaatgctgacttgtgcattttacaatcctcttgtgagacaggaaagtccctgattggtgcgttttacaatcctcttgtaagacaagaaagttccctaagtcctcactccacccaggaagtccagctggcctcacctttcacttagagaaggatcagctctgagagatatcagcagacacgtgcggcagcagtagtgggtgtgcactgactggaaaaggggacatgggcaggccacccacagcatccaccacagatggccacagatggccttcctgagaaggtagcatttgaataaagacccaagggagatgtggtaagcagaataatggcccccaaagatgtctacatcctaatcccagatatgtgaacaggctaacctctatgccaaaggggcttgtgggtgtgatgaaattgaagatcttggccaggcgcagtggctcatgcctgtaattccagcactttggggggccgagccaggtgaatcacctgaggtcaggagttcgagttcagcctagccaacgtggtaaaaccccatctctactaaaaatacaaaaattagccaggcgtggtggcatgcgtctggagtcccagctacttgggaggctgaggcaggagaatctcttgaacccgggaggtgggggttgcagtgagccaagatggtaccactgtactccagcctgagctacagagcaagactgtgtctcaacaaaaagagaagcaggagactcagaggcagagaaggagctctcacagcagcagcagaggtcgcagagtgaggatgaaggagggggccatgagcaaaggaatgcaagtggcctctagaagctgggaaaggcaaagaaatgggttttcccctagagcctccataaggagttcagtcctgccaacatcttgatattttttatcccagtgaaacccattttggatttctgatctccagaactattaatataatatatttatattgttttatgacactaactttgcatcatttgttacggtggcaatgggaaacaaacacaaggtgagggagtgagtcacgcaaacctatcaggggaaggagttccatatgcggggttcagcaagtgccaagtgcccgaggcaggatatgcctggcacggcacggcaggagtgaactgaacaagggaagaatagtaacagttctggtcagaaaagatggaggagcctgaatgacatagaacttagaagccgttgcaagagatggggaccctcagagggttgtgagcaggttgctctccgtgatctgacgtgggatgtaaagggaacatccatccacatgccttgaagtgggagccaggtgacccctgggctgattactgcagtcacccaggggagaggcggtcttacttgttccagagaggtaagtacgggaggaactataagagactgatgttagtcatcgccagtcttttcataaagttctttatcttttccattaaagatcattgtgatcagatattaccaaccccgttgctcagttcagccctctgcttgtgaggtttcttattttttgcttaaaatatctccacagtgaatccagagacagacaggtttgtccaaggccaaatttttaagacacgacctggtctctccttcccaagatgggttgatctggtccatctttcatgaagaagatagttaacagcagtaacattcaatcacagcttctcctttctgagtcagaacattgatgggattcatctcttttcaaatatgaatatttaaaaatagcatgcatgtataattgtcatgaccccaagtgagatttctattttttagattatcatcaagctgaaaacaaacaaaaattctaagttctcctaaagaattctcagactcatgagaataccccaaattgaggaatattatcctagcatattaactacaatttacacaatttggtttggacatagagtgcattgtagctgttatatgcaagttggatgggtacatgagtcacaatctctgtattatgccattccttcaccagtgaaatcactttggtttacagtacccctttcaagaatgtaaacgctatacatgtcagaattttgtatcctaaaggcgtgcctctgtggctagatctgattctggaactgtcattgatatgacaatccaatccttcacactcttgatggaggtgagagtggattcttgaaccctgtgctatctaacagtgtttttactgaactatcaagggtttttactgaacttctttctattcattccttaaccttctggaagacttagagtacataatccatttgatttccttttttctcccctctatctatttttgcctgaggctatagttcgaggattaatactaatgaagacctttctggaagtgcaagagagccttagtgatataactactgatttttcagtctggtcgcacttcaggaaaataactatggtcagtcaaaaagctgaaattttccaaaaggaattttgatgagaaactaaggggaactgttaatagagcaaggcaggttctgcagagccctgacttgtggccccagcgtggctaaagtccagcctcagaatgacccagttggttgttttcaagcaaactttccttccccacttcttcctgcccgcagcgcatgctaaccagtgtggctaccgaacgtttgagatgtgtttcatgtgactgagagaccgagctcttaattctgtttaattttaatcatttaaattcagccagctgcagccagtggctactccactgtacagtgcagttatagaacataaactgaaggaaattttacttttaaaagctaagtctattttattgtttaaaaaatgcacacttagataattctccagtctctggtatttctcaatataaaactgttttttcaaacctttggtttcttgatcatcttgtaacaccaggccaatgtacatttatttccatctgcaattgtttattgcattttttgaaataaagtcatttaatttttcatcaacagaatcagcagaatctgccaaaataggaggaataattactgtgtttttgatagcattggtcttgacaagcaccatagtgacactgaaatggattggttatatatgcttaagaaatagcctccccaaagtcttggtaggtagtttttttgttttgttttgttttttctatctttgttttttattttaacttaagaatttgtatttatataaatattttcacagaagaaaatctcattttctataaacaccaaaatgctttctcactctgagttcttttccatatctataaatgtatattttgcagggtttttgttttgtttttgtttttattatacttttaagttttagggtacatgtgcacagtgtgcaggttagttacatatatatacatgtgcagttgtaagtgtatctgtgcatctgtgcattttatgttttctttcctttttttttttttttttttttgagacagtctcactctgtcacccaggctggagtacagtggcgtgatctcagctgactgtaacctctgcctcctaggctcaagcaattctcgtgcctcagcctctcaagtagctgggactacaggcgtgtgctaccacacctggctaatttttgcatttttagtagagatggggttttgctatgttggccaggctggtcttgaactcctgacttcaagtgatccacctgccttggcctcccaaagttctgggattacaggtgtgagccactgcactcagcaatgttttgttttgttttgtttttatacttcatcacataatttataatgatcaggtagaatttcattattattaacataccatttttcatttaaccatttctcagctaaagggcatttggatttcttttccttttcttttctttggtgatgatgaatagtacaataaacatttttatatggatcgtctttttgttttggattatgtcagtggaacatatacacaaagtggatttatcctataaaaagatttaaaaaggactaggcacagtggctcacgcctgtaatctcagcactttgggaggctgaggcgggtggatcatttgagcccaggagtttgagaccagcctgggcaatataaggaaaccttgtcttagagaaaataaaaataaattagccaggcatgctggcacatgcctgtggtctcagctactcaggaggatgtggtgagaggattgcttgagcccaggaggtggaggctgcagtgagctgtgattgcgccactgcactccagcctcggttacagagtgagaccctagctctaaaaatatataaatatcttaaaaatataaagaagcagccaaaggagaggaagttaagaggagtaagtcagaacatagtctatgtggccagcagcctgcctggtttgaaaggcagctgctcccactcactagtcacaaaccttgagcaagtttcttaacttctgcacctcattttctcatctgtaaagtgggcataagaatagtaagcctggccaggcgcggtggccacgcctataaacccagcacttcgggaggccaaggcaggtagatcacgaggtcgggagttcaagaccagcctggccaacatggtgaaaccccttctctactaaaaatacaaaaatttgccgggcatagtggcgggcgcctgtaatcccagctactcaggaggctgaggcagagaattgcttgaacctgggaggtggaggttgcagtgagccaagaccgcactactgcactccagcctgggcaacagagcgagactcccgtctcaaaaaaaaaaaaaaaaaaaaatagtaagcatacctcatagagcagttgcaagggaaaggtaaattatatataaagcaccaagagtcatgcccagcatatagtaagcatggtgtaactgttagctgttattattgctgtcatcatcatcaactgcatcatcattcaatctcattaagtttattttttatttttttagaggcaaggtctcgctaagggctggaatgcagtggctattcacaggtgcagtcataatgcactacagtctgaaactcctgagctcaaacagtcgtcctgcctaagcttccccagtagctgggattacaagcgtgcatccctgtgccccagtgattaagttttattatgtagaaaataaagagcaaacagtacagctgatacggactctctctctctttttttttttttttaagaattttcataactttttagcctggccatttcctaacctgccaccgttggaagccatggatatggtggaggtcatttacatcaacagaaagaagaaagtgtgggattataattatgatgatgaaagtgatagcgatactgaggcagcgcccaggacaagtggcggtggctataccatgcatggactgactgtcaggcctctgggtcaggcctctgccacctctacagaatcccagttgatagacccggagtccgaggaggagcctgacctgcctgaggttgatgtggagctccccacgatgccaaaggacagccctcagcagttggaactcttgagtgggccctgtgagaggagaaagagtccactccaggacccttttcccgaagaggactacagctccacggaggggtctgggggcagaattaccttcaatgtggacttaaactctgtgtttttgagagttcttgatgacgaggacagtgacgacttagaagcccctctgatgctatcgtctcatctggaagagatggttgacccagaggatcctgataatgtgcaatcaaaccatttgctggccagcggggaagggacacagccaacctttcccagcccctcttcagagggcctgtggtccgaagatgctccatctgatcaaagtgacacttctgagtcagatgttgaccttggggatggttatataatgagatgactccaaaactattgaatgaacttggacagacaagcacctacagggttctttgtctctgcatcctaacttgctgccttatcgtctgcaagtgttctccaagggaaggaggaggaaactgtggtgttcctttcttccaggtgacatcacctatgcacattcccagtatggggaccatagtatcattcagtgcattgtttacatattcaaagtggtgcactttgaaggaagcacatgtgcacctttcctttacactaatgcacttaggatgtttctgcatcatgtctaccagggagcagggttccccacagtttcagaggtggtccaggaccctatgatatttctcttctttcgttcttttttttttttttttttgagacagagtctcgttctgtcgcccaagctggagcgcaatggtgtgatcttggctcactgcaacatccgcctcccaggttcaagtgattctcctgcctcagcctccctcgcaagtagctgggattacaggcgcctgccaccatgcctagcaaatttttgtatttttagtagagacaggattttaccatgttggccaggctggtctcaaactcctgacctcaagtgatctgccctcctcagcctcgtaaagtgctgggattacaggggtgagccgctgtgcctggctggccctgtgatatttctgtgaaataaattgggccagggtgggagcagggaaagaaaaggaaaatagtagcaagagctgcaaagcaggcaggaagggaggaggagagccaggtgagcagtggagagaaggggggccctgcacaaggaaacagggaagagccatcgaagtttcagtcggtgagccttgggcacctcacccatgtcacatcctgtctcctgcaattggaattccaccttgtccagccctccccagttaaagtggggaagacagactttaggatcacgtgtgtgactaatacagaaaggaaacatggcgtcggggagagggataaaacctgaatgccatattttaagttaaaaaaaaaaaaagcaaacacaaagatgcttcaagatcttcaggagaagtatggtatacaagtttcagggaccctatttgacaattttcagagtgctctctatgctgattccgagtcgagtgtgtcagctgtgattacagtgcctgtggatctaggccgggttgggggggtgtgggcgggggaagggaagtctggcccggagcaattgctcctgccggtaaccccagcactttgggatgcctaaacaggcgtatcgcttgaggccagtaattcgagaccagcctgggcaacatggcaaatctgtctctacaaaacaaaattagaaaaattaactgggcgtagtggcatgtgcctgttgtcccagctacttgggaggctgaggtgggagaatggcttgagcccaggaagcggaggttgcagtgagccaagatcatgtcactgcacttcagcctgggtgacagaaccagaccctgtctttaaaaagggagttggtggggagaggttctagaatgtcatgtagcaaccagtttaaggactgggactcagggatccaactcccacagtttccctgtgtgaccctaggcatttgacttagcctttctgagcctcaggttttttgtttctgaagtaaaaggattggactaggtaatctccaagatcctaggaacccaggagaaagatgagaaaatgtacaagaatgaacactcaggtggaaatgctgcaatcctgagaagctcccaggatgaatgaaaggcacaggacctcttacccctcacccctgcccccctcaagagctggtttctcaaacctttctcttaggccccttcaaagggggaaaactaaaaattatacaagttatagttcaaggactttaaatagattatttatatgattgctcataaggatgaggctgtgaggagggaacaccttatttaatctaatgaaattccataggaaagaggccttttgtatattgaatcaatttatctgccttctcagtgcatctgtcatattctgaaagattctgggttgatcttttgcgataacctctatggctgtgagtgtgtgtgtgtgtttgtgtattttttaacattttgtataatgattggaggttggtaaaaagtaacacaacagtacttttttaatacaaacttggtgtggtcttgagttgtcttccattggagagcgtacgtgtgccacagattggtgcacctgccggcatctctaggattgcaccaactccctctagctcttcttggtggcctgcaggggcctagggcgcattcacttccctctgcttgactttacgtggtgttctagcgtcagacatcaggcgatgccgtgcattacccaagacactggacagctccggatcttcccgtctaaccactaatcaagttaaaaagaggaaattaacgctttcttagtagtctctgaaagaaactagttatttgcgtaaagatgacttggttttgtgttgtttatccctggggagaagggtaaagaagaccctcaaactggatttgctgctgaagtgcttttaactcacctgtgcggagagcggacttcaagagagggcgtgccggtgctccggacaaaacctggggaatactgaaagccaccaccaccaccgtcattccagcatgcagatctcagtcctgggttggtgttgtagggcatttatttatttgacttgacggcgcctttcaaagcttgcgaggatcccttcctcttcctcgtgtgcatctgccaagcctgtgccccgcgcctcgcgggtggacccgggctggtgggcggggcctgcagcggggtgggagcccggtcgcccggcccctccccaccccgccccgcccatctccgctggttcccggaagccgccgcggacaagctctcccgggcgcgggcgggggtcgtgtgcttggaggaagccgcggaacccccagcgtccgtccatggcgtggagccttgggagctggctgggtggctgcctgctggtgtcaggtgaggggtccgcggggagggggcgcgcttgggaaccgggaggccccgcgagatgccgcccctgatcccatccctgggcgccctgcaagtgacttaagagccttcggggcctcgggagagaagatgcaaacgccacggccggctgctgagacgcaactaggctgctgctgccgtcgattctgtaacaggagaaagccccatccgcgcccggattacagaccgtctgggccctaaactcagggggagactcccggcgtcttttgattccctgtcctcctgcagctctctgctggcgggcgtctaaataaagtagcttccccaaaagacccaagatcccaccgtggctgtcatctgacccttctggagactatcagttcaagtggaggcccccaccagtccccgagtgccctgacagccctccctgaccccaagtctgccccctcagtgccagccctccctacagatgtgcctcccatcacccgctgcacctcccctccttccggttcaggcccgagcaccctgaaatctggattctgtcccccagcgccccagctccatggcttctaaacctaaatccattgaaaccttttctgtcctctaaattgactgcctaggttccaataacaccatggtcacctccttcctttctcatgaactcttccctggccttccgggatacccctccggtttcccgccctgtcaggctgtctctgcttgggaccctcctgctctgtcaggtttctatgtagctaattgtgatgcccaaggccttttctctccttccctggcactgttcctttgggggatttcagccaaaccctggcattaaacacgggctataggcccatgactcgcacatttatatctctcttggtaccagttgggtgatgggtggtggtttattatagtcttctacttttctacttgcatgtaggtttcaaattttcttttctttctttcttcttccgtttttttttttgtttgtttgtttttttgtttttttgtttttttttgagacagggttttgctctgttgctgtggcccaggctggagtgcagtggcttgatcttgcctcactgccacctccgcctcccgggttcaagcgattttcctccctcagcctcccgagtagctggaattacaggtgtgtgccactacgcctggctaatttttgtatttttattggagatggggtttcgccatgttggccaggctggtctcgaactcctgacctcaggtgattcaccttcctcagcctcccaaagagctgggattacaggcgcgagccaccatgcctggccaggtttcgaattttctattaaaaggtttgaaaataatttctgtctctagcccacatctcttcttggtgtgacctctgggctcattcatctggctgtctccctgacattcctacttcagcctctctccagcatctccaacctaatgcagctcaaatgggactcgtgagttccccagctgagctccaatcggggcaccagctgcttaagcccaaaatggacattgacctcagcttttatgcatcaaatgtatcaggaagtctccagtttgtttttacgtctggaaatatatctgaaatccatgtgcccaccctaccccctcatagctttctgccaccagacaaatccaaggctcctttgtctgtccccattttactcctgcccctccagaaatttctcctcacggctgttcaaagaaaatctagactcctcagcacagccaacctgtctctccctccctcacccacgtggcctttgaagacatggagccatagaggagaaccaagtgctggatgtgggctttttcatgggcatctgttttgaggagaaaagttgtaaatgtttttgtcttattttcatagcattgggaatggtaccacctcccgaaaatgtcagaatgaattctgttaatttcaagaacattctacagtgggagtcacctgcttttgccaaagggaacctgactttcacagctcagtacctaaggtgggtctggcctcactattggcaggaacgcaccggaggagccagccctgggctggtcactgggttgggccacaggaggaagggagtctgactacggtcaccgtgtgactgtgacaaccctcagggagcctccctgccagccttttgctgtctgggaaattctcgtggccaccttttctcttttaggttttctagttgtgatggttgacgatttgactgttaatcacagggctgctggcagatacagacattttatcatgcgtatgtagatataatcagccatagtggtaacctcatgctgtgcccatcccagcttgtttgtcacagttgatatattttaaaagaaaaataccactgctgtcatctctaggtatgagtagtattgctggaagtcagcaatgttgagtggatgctacccaagaaactgagatatgcaaagcggtcaggaagccccttgctaccatatatcacctgttcccctccaatggattataacatcatgccccagtgccatgcgcgatgcacataatttgcataatgagtgctcagtttctccgtggttccatcctgaaattaaaagtaagacagctactgactgttaaaaaccccattctcggacaacagcaggggctgtgaaggaagagtgagtgtcaccctagacggtcatctcagtggtgatctgaacgccctctacctctcctgcctgtcagtgtttccctacgcctggtgaaggaagtcagtgccagcactcccttggcagcctgccaccatacgccacatgctggactgcaggtgacacacctttaggccaggcgcaaacagcagcaggaggcccaaggctgacaagccaacacacctgctttctgtgtgactcagaaacatacgaagatagacaagtccttcagtgaggcaggaggaaatttcttcccagatccagctgtcatttcacaaaaatccccaaggcctgctacatcagagaagaagtagaaaggtgaataagatagtcctcgtctgtgcattgctggcttttgttttttaacttttagttcaaaataattccagactaacagaacatttcaaaattttaagtagaatacaaagaatttccaaatagcctacaatcagattcaccaatttttttttttttttttttttttatgagacggagtctcgctctgtcacccaggctggagtgcagtggcgcgatctcggctcactgcaacctctgcctctcgggttcacgccattctcctgcctcagcctcccgagtagatgggagtacaggctcccaccaccatgcccagctaattttttgtatttttagtagagacggggtttcaccgtgttagccaggatggtcactatctcctgacctcatgatccacccacctcggcttcccgaagtgctgggattacaggcgtgagccaccacgcccggcccaggttcaccaatttttaatgttggtcacattctctcccttcctctctctctctcatgccctttgtgctgtaatatttcactgtgtatttcacaagaacaaggataatctcttacatcacatagtacagtgagaagctcaggaacttttacattcataaaatacttgtatctaatttacagtccatagtccagtactgtcagctgtcccaaggattgaaggagggcatactctataattaatttttttcctgatgtgcattttctagtactgattggctttatcatttgctttctgtgctgtctctactcagtctgaatagccacggagattttactgtggaaaattaaatttcttctctgtctgtctgtctccctgtagtttttcttgttctgtgctgtgcttttgggtttgtttgtttgtttttcttttttttttttttgagacggagtctcgctctgttgcccaggctggagtgcagtagcgcgatctcatctcactgcaacctccgcctcccgggttcacgccattctcctgcctcagcctcccgagtagctgggactacaggcgcccgccaccacgcccggctaattttttttagtagagacactgtttcaccgtgttacccaggatggtcttgatctcctgacctcgtgatccacccgccttggcttcccaaagtgctgggattacaggcgtgagccaccgcgcccagcctttttttttttttttctttgagacagggtctcactctgtcaccaaggctggagtgcagtggtacgacctctgctcactgcagcctccacctcctgggttcaagcgattctcctgcctcagcctcctgagtagctgggactacaagcacatgccaccgtgcccaactgatttttgtacttctagcagagatggggtttcaccatgttggccgagctggtcttgaactcctggcctcaagtgatccacctgcctcagtctcccaaagagctgggattacaggcgtgagctaccacacccagcccatgccatgcctttttgccattatagtcgaggcacttggctttgcatgtttatcttttatgttagcgatcccaatgacttcatgaagtgacttcatgagggtatccacacctgggttccaggtctcccccgcgtggaactacagagtgagtatggcatgtgctggagaaaacaaaatatgtgctggccgtgtccttggggaagatatttgatccctaaagatgtgattgcctcatgtggctctacaaaagagttgtttagagtttagcatgagcaattgcacagcacaaactctctgttgtttgcgtgcattggggcagggcgtccagagccgggggcacttcagaggatgtactggtgattttaatataaaaacatccaaaacaattagatgtaaatatgaggaatgggtcatattacctatttaatgcggggagaagtatttgtacatgcaataaaaataacctagtgaaggccaggcgcggtggctcatgcccgtaatcccagcactttgggaggccgaggtgggtggatcacctgagatcaggagttcgagaccagccttaccaacatggcaaaaccccatctttactaaaaatacaaaattagccgggtatggtggtgcatacctgtagtcccagctactcagaaggctgaggcaggagaatcacttgaacccaggaggcagagattgcagcaagctgagattgcaccattgcactccagcctgggtgacagagtgagactccatctcaaaaaaaaaaaaaacctagtgaaaaagatgttattgcaaaacaacttttgaaatactgcacatgctggacaattgatgcattagtttaaaagaaggaaatgggccagtaatcccagtactttggggggccaaggtaggataatcatttgaggccaggagttcaagaccagcctgggcaacatagcagccccttgtctctacaatttttttttttaattagctggacttgagttggaaagaaggaaggcggaagggaagaaagaaggtagggaggaaaaaaaatatggccacatgtgagaaaacccccttaatgaaatgaccgctggattttccaaatgatgggatgttaagcagccgtgaagaaatggttgattgacaaatatttgtggtatattaagtgaaaaaatagcatgatcccaatgatctctatctactttttgcaagggatttttctaggtatcactaagaatgctgtgagatgtgatgtgctaccttagactatgaagtcaaacagatctgagttcagttgggcagatttcttaggctctccacgcctgacccctgtgtacttaataaatgttggctgttgttatttttatcaccatcactttcatcatcacttctgggagcaaccaaattggttttggcaccagaagatgtcttgggggaccaatcagatagctcctcacttttttattttattttataaatttttaaattaaattaaattaaattttttgagacagtgtcactctgttgcccaggctggagtgcagtggtgcaatcacgtctcactgcagcctccacctcccaggctcaagcgagcttccctccttagcctactgagtagctgggactacaggcgcatgccaccatacccaaataatttttttattttttgtagagacaaggactcaccacgttgtccaggctgttctcaaactcctgggctcaagtgatcctctgcctcggcctcccagagtgctgggattataggcgtgagccactgagccgggccagctcctcactttttgcaggatgagagcctgggcttcctttgatcacgtggagccaattacacctccttggctgttgcgagcttagattcaggagattgtatttccctagcatccaacaggcatgtccaaatgtcatctcttttcttccacttcactttctgtcatgttccctttagcggttgctgtcggggctggtgttctgactgagactgatgaattgttttataatttttccagagtaattgcaatgatagtcatttataggacaggacagtcacgggtcacttaacaactggggtagattctgagaaatgcatcattagacagttttgctgtgtgaacgtcatgcagtgtacttgcacaaacctagatggtgtagcctcgtatacacctaggctatgtggtttagcctattgccccaggctgtaaacctgtacagcatgttactgtactgagtgctgtaggcaatcgtaacacaatggtatttgtatacaggcatatcacagagataaggcagttttggttccagactaacacaataaagctaaaaccacaatagagtgagtcacatgaatttttttgtttcccggtgcatctaaaaattatgtttatactgtagtccattaagtgtgtgatagcgttatgtctaaaaaaatgtgcacagcttaattttaaaatatttacttgcggaaaaatggtagcaatcatcagagccttcagcaagtcataatccttttgctcgtggagcatcttgccttgatatggatggctgctgactgatcagggtagtggttgctgagttgcagtgactgtgacaatttcttgaaataagatgacaatgaagtctgctgcatcaactaactcttcctttcatgacagatttctctgtagcatgagatgctgttcggtagcattttactcacagaagaacttctttcaaaattggaatcctttcaaaccctgctatcaactaagtttatgtaatattctaaatcctttgttgtcatttcaacaatgttcatagcatcttcaccaggaataaattccatctcaagaaaccactttctttgctcactcattagaaacaactcttcatctgttcaacttttatcatgagattggagcaattcagtcgcatcttcgggttccgcttctaattctagttatcttgctgttttcaccacatctgcagttacttcctccactgaagtcttgaaccccttaaagtcatctatgagggttggaatcagcttcttccaaacccctgttaatgttatattttgacctcctcctatgaatcaccagtgttcttaatggcattttgaatggtgaatcctttctgggaggttttcaatttaccttgcccagatccatcagagaaatcactatctatggcagctataactttacaaaatatatttctttattttattttatttcattttattttattttttaagatggagtctcactctgttgcccaggctgaagtgcagtggtatgatctcagatcactgctgcctccacctcccaggttcaagtgattctcctgcctcagcttcccaagtagtgacaccacaccaggctaatttttgtattttttttttagtaaagtcagggtttcaccatgttggccaggctggtctcgaactcctgacctcaagtgatttgcccgccttggcctcccaaagtgctcagattacaggcatgagccactgtgcccagcttcaaaatatatttcttaaataataagatttgaaagtcgaaataactccttgacccatgggctacagaatggatgttgtgttagcaggcatgaaaacagcattaatttccttttaaatctccatcagagttcttggggaaccaggtacattgtcaatgagaggtaatattttgagagaaaactttttatcctgagcagtaggtcttaatactgggcttaaaatattcagtaaaccatgctgtaaacagatgtgccgtcctccaggctttgttgctccatttgtagagcacaggcagagtagatttggcataattcttaagagctctctgattttcaaaatggtaatccagtgttggcttcaacttaaagtcaccagctacattagcccttaacaagagtcagcctgttctttgaagctttgaagccaggcattgacttctcctctgtaactatgaaagtcctagatgacatcttaatagaaggttgtttcatctacattaaaaatctgttgtttagagtatccaccttcatcattttagctagattttagctagatcttctggataacttgctgcagcttctacatgggcacttgctgcttcaccttgcacttttatattatggagatggcttctgtccttaaaccttatgaaccaacctctgctaacttccaacttttctttttttttttttttttttttgagatggagtctcgctctgttgcccaagctggaatacagtgacacaatctcggcttattgcaacctctgcctcccgggttcaagtgattctcctgcctcaacctcctgagtagctgagattacaggtgcatgccaccatgcccggctaatttttttgtatttttagtagaggtggggtttcaccatgttggtcaggctggtcttgaactcctgacctgatgatccgcccacctcagactcacaaagtgctgggattacaggcgtgagccaccacacccagccccaacttttcttctgcagtttcctcacctctttaagccttcacagaattggagtgttagggtcttgctgtggattagactttggcttaagggaatggtgtggctggtttgatcttctatccagaccactgagactttctgcatattttcaataaggctgttttactttcttattattaatgtgttcactggagtagcactttaaatttccttcaacaacttttcctttgcattcacaacttggctaactgtttggcccaaggggcctgttgtggcctgcaatatgccttcctcactaagcttaatcctttgcagcttttggaatagggatgcccgaggagaaggagagaggcaggagagtggacagtgggtggagaagtcagaacactcacaacatctattgattaatttcactgtcttatataggtgtggttcatggtaccccaaaacaattacaacagtaacatcaaagatcactgatcacagatcaccataacacatataatcatgatgaaaagttttgaaatattgcgagaattaccaaaatgtgacataaagacatgaagtgagcatgtgctgttggaaaaatggcaccaatagacttgctcaatgcagggttgctgcagaccttcgatttgtaaaatgcaatatctgtgaagtacagtaaagcaaatcacaataaaatgaggtatgtctacatctaaatgtatttaaacatagaaaaggtacagtaaaaatacagtatcattatcttagggcatcaacgttgtatatgtggtctgtcatctaccgaaatgtcattatgcagcacatgactttattgaaaatcattgtaatatctttattttggtaaatttttgtaaatcaatgtctcataaatcacatgcccctgttttcaaaaatacgtaatcaaggaagcaagctttcttggtcaagtatgctgaatactcaaccccttggagaggcacgtagtcattaagatgttcaagtctctgagaagttctgttttgaagacacgtatttctatgtttaacacagtttccactcccgcgccgcccccccctccaaattaagtaccagtcagcctcagggagactgaagccagaactctcctgattgacctatctttttgattgtgtagttataggatattccaagataaatgcatgaatactaccttgacggaatgtgatttctcaagtctttccaagtatggtgaccacaccttgagagtcagggctgaatttgcagatgagcattcagactgggtaaacatcaccttctgtcctgtggatgacagtaagccattttgttttccctttttttgtaatgtcatcatcttgccttgtttttttccacattggttggtccatcaacaagaattctttgagggcccacaaatggatggccttgcacaaggagcttaaggaatataataaagagagttgtatccctaaagaattcatgggagagacagaaaaagataggcatatcatcaatgcaacaattaaatataaatctaacaccttcagtgcctcaaggatgtgactatgttggggcccgtgctgttgaggagaagttctggaaggattcttgtggtgaattttctgggagaaagtcagtatggaattatgacttaaacaaagaaacataacgtgataggcaaaagaatgaaggcagatgtagagatggaaaatatgatgcggacagccggcttgcccagagcgaaggacagagggagggatagggctgatggcaggtgggttgggtcagactggttggtcagcatcaaaaattgttcccaggttaggtggagattgcagtgagccgagatcacgccactgcactccagcctgggcaatagagtgagacttggtctcaaaaaaaaaaaaaatattgttcccaggttagatttggagggtcatggtgaccaccagagtcccctaaatatgagatgagcatatttagaatatcaggaattgaaaactaattaaaccatatattagcaattgagagagtaaagaagattagaggttaaaagaacctaattcacaaaattcacatacagcccttcaaaactcacatagagaaaagcactaaaagaattgtctctggctaggcatggtggctcacgtctatgatcccaacactttgggaggctgaggtggtggatcacttgagcccaggaattttctttttttctttctttctttctttttttttttttttttttttgagacaaagtctcactctgacacccaggctgaagtgcagtggcgcgatctcagatcactgcaaactgcctccagggttcaaatgattctcgtgcctcagcctcctgagtagctgggacttcaagtgcctgtcactatgcccagctaaatttttttgtatttttagtagagacggggtctcaccatgttggccaggctggtcttgaactcctgaccttaagtgatccacctgcctcagcctcccaaagtgctgggattacagacatgaaccaccacacttgtccttgagcccaggaatttaagaccagcctgggcaacatggtgaaaccctgtctctacaaaaaacaaaaaaaataccaaaaaaaaaaaaaaaaaaaaattagccaggcatggtggagtgtgcttgtagtcccagctacttgggaggctgaggtgggagagtcatctgagcctgggaagtcaaggctgcagtgagccattatcacaccactgcactccagcagcctgggtgaccagagtgaagtcttatctcaaaaaaagaagtgtctctatatggggagtggtctttatgccggtccctgctctggacccccatgacccctacagttacatcctccctggtagagaatgatgctaggatgcctttcttccctttcccaattccatcccaagcctgggtaaaaacgtcttacttttggaatcataaattatcaaagttagattatattttctaatggtacctttacaaaaacaaaggaaagatgaacagaaaagtaagtttcacaatagttaaaagtacaagtttttgctcctataattgctaactggcttaccaggtcctaacttgtcccaaatcctgttagctcccatccatggaagttccctttagagcctaggtacaacacggttaagcagcttgtcaaaaagtcatacaggtcatgagtggctgagcaaggattcagacccaggctcttgcttctgtgctcttagcaactactacccaatattggagatttgcctcttgaagtctatgtattttagtgataggaaagtgtttccaggcatcatgcataacctatttatacttgctttggcaaagtattccaacaagttttcttgtctggttttcagacgagcactttagaatgatggaagcaggtccattaacagccctgaaaaagtaacagcagccaaagaagaatacaggacataactcaaacaccatgattgcctggaaccatttatgaatcattctatagctattattgagtacatctgtgtaacagctgcattctgagcactgaagctacaacaatgaacgagacaaaatacctcatggagcatatatgtgctaatcaggaatacagataataaataaatagatacatattacatgacaggtagtgactatggttcttaagaagactgaagcaaggcaataggacagaaagtaatgggagctgcacttctacatagaatggtaagatacagtctctctgaggaagtagcatttgagcagagacccatatgaagtgaaggagccagccacatgaatatctagtaaaagagcattcagaagggaaacagctttagacattgttggaaatatatatggttaattatatatgttaaacatgtaaaggtggccactaaaaataatagagatgccatctgtagcttccatcctgaaaaaggaaataaaattcaagccaacaaaaagcaggaataaaagaggagaagacaccaaaaacataaaatagaaatttaaaaagaaatccttatagaaaatacaaaatagcgtagctggaataattccaaatgtatcagaaaccacaataaacataagtggactaaacttcattaagaaagacaaagattatcagattttttaaaagaaactaaatccaactacccttcttagccatgtcaatcaatgtcatgacaatagtatatcaaagcagtgtacttccgtggactaattgttctgcatggttatgaaaaattaatgttgaagtttttaaaatgtgatttttgattgtcattttgcttgttcttctgcttagccattattggaccccctggaatgcaagtagaagtacttgctgattctttacatatgcgtttcttagcccctaaaattgagaatgaatacgaaacttggactatgaagaatgtgtataactcatggacttataatgtgcaatactggaaaaacggtactgatgaaaaggtaaggttggctaattgcatttcagaggtagtaggctttcatattctttgcagaatcttgcaaggtggcagcaccttatggactggtcctctgtaagccaagagcttcccagactgaggggttactggtatctctggctcaagcttcccagactcctaagggatatgtgtagagcagactttcaggacaaagtctgcacagtgacagcagacctttccctccctgaagggcagctgcaggggaaggcacagttgagtcagagttagctaagggaacttggagctggctgaattaggtgatcagcaaattgacaactgtcccatgacatcaacccctgtgtcccacacacaccgcaaatcagggacgtccgtggtcaagacagccccttgttgctctattcttcaggggacaatttctttaaaaacatgggcttggagtcaaaagatctgatcggaatatcacccgtgccaccatgtgccattggtcactttcttgaccccagcctcctcaagtctgcaaaatgggcataataacttactttattaataaaacaaggataataacctacttcgtaagattgttggggaatttaatgaaataatagaaaatataaactcatcccattgcctggaatgatgtatatatggtcagtacatcagtacatgaggtttccttcctctttgctagacatgttaaggttatttttattcatccttggtcaaggtttattctgacacctaatgcttctgagctgaatgccattcatggtcctaaactgacatatatatgttatgtatgtcatattacatatatgttatcccttccacattaaatgttgattttaccacttaattctcaaagtgtttgggaagaagggatcacccatgtttattatcttaggaatgatgtagttaaatttatatacacacactgcatagcccaaaaaatctcaagttaatttttttccccaaaaaatgttccattaaatgatgcagtgtcttagtcctttcctgctgccacaacaaaataccacagactaggtaacttataaacactagaaatttatttctcacagttctgcaggctgggaagtccaagatcaaggcaccagcagattcagtgtctggtgagcactggcgtgctctgcctcctagatggtggaaggcaaagggcaaggatgtaaacagctcccttgctgctcttttctaaggtcaccaatggcattcaggaaggctctgccctcattatttaatcacttctgaaaacctccacctctgagtcctatcatagtgacagttaagtttcagcatatgaattctgatactcacaatcactgatcaaatgcaggcatctctgctaagccctggggtataaagataagagcagattgctcccctccgggagctagcaacagacctcaattaaggatctagttttacagtgagcagggtcaggtgcctcctgaggcaagtgtgaatgcaaactccacttactgtttagcttcttttctcacacatgcccacaacatgggcatctggttacacatttgtcctctctcttcggccagttgtgtggcaaccttctgtgtgacttaccgagtgtggaaaggctgcctgctgcactgctcctctcacaggtgcctgtgatgccaccaatacaggttttttgggggtttttttgaggcagagtcacagtctgtcgttgcccaggctggaaagcagcggtgcgatctcagcttactgcaacctccgcctcctgggttcaagcaattctcctgcctcagcctcccaagtagctgtgattacaggcatctgccaccacaccccgctaatttttctatcaatacaggcttatatggttcccctctagaatgtagagattcctgaggcggtgccagactaggtccctaaactcacagcatgaagggcttttgagaattctttcttcctgttgggagaaagtgagaagataaaaccagaagttgcccagacgtgaaagggcagaaaaagccccagcagggattgagaaggtccctctactactatgccaccaccttacctgcttgcctctgagtttaatctttgaaaaaatttgcattgtaaggttttagaggcactggacttctggaactgcaagcccgccatttttttcagttgttgctttgatttgcttttggtcttttaatttacttattagaagttaaaccattttcttcatatattccataagtctaatccaattattgacctccatgggcttagctcctcatgcagtagaggcatataggcatgctgtcaacgaccccaaccccaaaaaagaactaaccaattgcgactgggtgtggtggctcacacctgtaatcccagcactttgagaggccaaggtgggcagatcacctgaggtcaggagttcaagacaagcctggccaacatggcaaaaccccgtctctacaaaaatacaaaaaaaaattagctgagtgtggtagtgtgcacctgtattctcagctactcgggaggctgaggcaggagaattgcttgagcctggcaacggaggttgcagtgagccatgatcgtgccactgcactccagcctggacgacaagagtgaaactccatctcaaaaaaaataataattaaaagaccagtttattttatttatttatttacttttttctttatttctgagacaaagtctcgctctgtcaccgaggctggagtgcagtgtggggtgatcctggctcactgcaacttccacctcccaagttcaagcgattctcgtgcgccaccacgcccggctaattttttgtatatttagtagagatggggttttgccatgttgactaggctggtctcaaactcctcagtcccccaaagtgctgtgattacaggcacgagccaacacacccggcctgctttatcttttttaaaaaagaagtgatggcttgtgtgtcatttaagctggagaattcaggaaccaaaatggtttgtgggcaccactgtcagtccttgatgcaccccctgagtggcctcagggtccctgaactgagaggagcacctgctacctgctccttcctattttaagtctaaaacggctattatcactgataaatgtgaaaaaaaaaaaggtggtgcccttccactgcttagtcatgttcttatttttgtctccattactagtttcaaattactccccagtatgactttgaggtcctcagaaacctggagccatggacaacttattgtgttcaagttcgagggtttcttcctgatcggaacaaagctggggaatggagtgagcctgtctgtgagcaaacaacccatgacggtaagccctgagatgcacctccgctaagcatcctaaacagctttatagacacctgccctagacatgattgcatccaactcaaattccagctcagttcagaaatctatcgccctgacattatctctcagccctgactgctcagcttcatgctaggaaggagaccacacccgcttctgaggcagctcattcactcttagatcaaaggagttgctagaaaccttttctgtctggtggagcgaggtctgcctccatgagccccccttggcagtacttattctaccatcccaggctccctaaagcaaggctcatcagtcctcccaagaccaccagcagagctcaagccctgtcacataccccaaaggtctttcctccccaggcggcacatctccagccactgccgacatgtgatgggaagcaagtgtcaggaaatctgaccacggtcctcagccagtgctgcctgattcagggccccttatatgcaggaatccaggatgtcaacacagtccttcacacaccatatggatcacttctagcttggaggaaggaacgggagaaggaaagagagaaggttcccatgggcctaaacactgcatatttatgtgcagacacattgcagttgcatgttggtgaaaactgaggcccaggtgtctgcatacaaacagcaggccttcctataatttaaagatgttggtgaagggttcagcaagctcagacaatggaaggatgaaacatggcatgcggcatgcagtttgatcaaaaagaaaaacatgtctgccggacgtggtggctcacgcctgtaatcctaacactttgagaggccgaggcgggcggatcacctgaggtcaggagtttgagaccagcctggccaaaatggcaaaaccctgtctctaccaaaaatgcaaaatttagccaggtgtggtggcgcacacctgtaatcccagctacttgggaggctgaggtgggagaatcgtttgaacccaggaggcagaggctgcagtgagctgaggtcatgccactgcactccagcctaagcaataagagtgagaccctgcctcaaaaaaaaaaaaaaaagaaaagaaaacatttcaaatagcttgcaaataccagtaatcacccatgaactgacaaaatccaaacattttacaaaacaaaagggtatgagccattgaaaacctgctttcatcaaacaccattttcattttttcttaaaacacacctatcccatttaaatcccacaagttttcaatgagagcattagaaggatcttctcccattttacaaactagaacatgaaggttcagagagtgatgcactttggatgttgccctcatccagatctcacgctgaaatgtaatccccagtgctggaggtggcgcctggtgggaggtgacgggatcatgggggcccatttctcatgaatggcttatcaccatccccttggtgctgtcctcccgagagtgagtgacttcctgagagacctggcggtttaaaagtatgtggcatcttgctctctcttgcccccacttagctttccaccatgattgggagcttctagaggcttccccagaaacagataccgctatgcttcctgtacagcctgcagattcatgagctaattcatcctcttttctttataaattacccagttttagttatttgtttatttgttttttggatggagtctcactctgttgcctaggctggagtgcagtggctcgatcttggcacaacctccgcctcctgggttcaagcaattctactgcctcagcctcctgaatagctgggattacagtgcccaccaccacacccagctaatttttttatttttagtagagagtggggtttcgccatattggccaggctggtctcgaactcctgacctcaagtgatccacccacctcagcctcccaaagtgctggggttacaggtatgagccaccatgcccagccatccagttttagttatttctttatagcagtgcaaaaacagcctaaaacagagaggttaagtaacttgcccaaatgctagtaaatgaaaaggatcaaccagaacacaggctcattcatctaagcccaggttatgtttcctgtaacttactacctatagattaattccataggtaaactgaggcaccgtgtccttgtggataaaacaggaaagagtagtctgcctcatggtgtggtcagatgaatctgaaacaagttagagaactttacacggaggatgtagattagtagattctcccacagttcacaacctatgcagagcagggtcctctctcctgccccctgtggaactctccatctggggtgagtaacaaaagcattccttgaatcatgtcaccatcacccagatgtgtccttgtttaagatgctaagatgccccagtttgagacaccaggagacccaagcactgccccagaggttcattacccaaaataaaataacagggcggggcccatggatccctgtttgaatgagtctccgggcgccaaattagagaactaccgaaatattaatggaaggatggatggatgagtaggagcctggaactttctcaagacctgggatgtcaaatcccaaggagacctcacgtgtccagctgtggtgtggactgggggccgctccagccagctcactgccgtatgaccctggaatcaccaagagcagactcacatgtttgagctgaacatgctggaagtgtgggccagacggcaccgcttctgggctccggtgcatgaaacaaacaagaaccaagaactgggataaggagtgctgaaacccgcaaggacaggagctggggagatgggaggccgcctgcgggaatgaaagcacaagagaacgagggccatggggttgggggcggcacaagtgctcaggtccttccagccgcttccctcatacagatgccacttccatccctcagacgtttaaggagtgtgcactgtgagccacgcactgtgacaagcaccatgtcgtgccagcaggtgactgcacttgctgtagctccagggtcatgtgctgtgtcagggctctttgatccctgtgtccctttaaaacgacatgatcttcatgggcagtgtttgttctcttggcccctctcagagccaaatgctgtgctcgtgagggcggtgctggttggcaggggatgggcacagagaaatcaggtggccagggcagctggaggagggacctggagccgaacaaggggagctgggaccacgagcaacccaggtgacatcctggactctgtcaaagataagcaaagcaggacgctaattaaagcagtcaaaacattttattcagtaatgactggagttgggaaaagggccgagttccatttactcagaggtgttttaaagggagaacgagggccggggcaggaggatcgcttgaacccaggagttcgagaccagcctggccaaaatagtgggacccccatctctataaaatattttaaaaattagctgggcatggtgacacatgcctgtcgtcccagctacccaggaggctgaggtgggaggatcacttgagtcctggaagtcaaggctgcagtgagctgtgtttgcactactgtactccagcctggacaacagaacaagactctatctcaaaaatgaaaataaataaaaggagaatgagggagtagaaagaaagaatgcgtggggagttgagcagaatcagggaagtgaaaaaaattttaaatcagctaaggggatgggtcagtgccgtgaggccctctgtgtctgtgaaccggtgtttatcaaggctaggcttctaccctcccacagagacagggagacagaggccctgtacttcctgatgatttcaaaagaatggctcgcagatcattgagaaaaatatccctgcgttgtgggagatacatacatgtctcaaagggacagaggaaggattcaccactataagccctttttaataaatgctctccgaaagagaggtcaaggcctcgcatcaggggctgggaagaacaaatggtaagttccttaggcagccttgggtttttccagacaggaattcaagggtgtggccttggcctgctagaagctatgctggggtttggccaagtctcttagtgcaggggtttgtttgttttggctttggttttggtttttgaggcggggtttcactctgtcgcccagtttggagtgcagtggtacaatcatagctcactatcacagcctcgacctcccaggctcaagcgaccctcccacctcagcctttcaaattgctgggactacaggtgtctgccatcatacccagctaatttttaaaaaattttttttgttgtagagaaggggtctcactatgttgcccagactggtctcaaactcctgggctcaagtgatcctcccacctcggcctcccaaagtgctggggttacaggtgtgagccaccacacctggcttagtgcaggggtttggatagagttgttcacgcagagtttctgtttttctcaatatagaacgagatggtgcctgtgtttaactcaggctcaggtgtccaggggagtatcacttgctgtgtcaaggcagaagtggtatatccagacctgggaggcccattgctacactgccagtagtaggtacagtggatcagaattcttgcttgttattcttttgatgtatgtcagcaataattccagaaaccaaactttggagaagataggaaaagggtgaaactcttcaaaaacctctgggtcctccaaccagttgctgtttctgagacgtcccccaagataaacgtacaggctctgttttcagggattgtgatggttaaaatgctcttgggatcactgtgacccgacctgtgacaagaatgtaacatgcccattacccctggcagaaacggtcccctcctggatggtggccgtcatcctcatggcctcggtcttcatggtctgcctggcactcctcggctgcttcgccttgctgtggtgcgtttacaagaagacaaagtacgccttctcccctaggaattctcttccacagcacctgaaagaggtaggtaggatggagtgagatgtggatttgaaaaccttgatcggaaagagctttcctttctagttagggctgcccaattccagacaacatgttttccaggaaaacacacacgcgcgcgcgcacacacacacacacacacacacagacacgcctcttgtgtgctggtccattctcttgtaaccatgtcaggtgaaggaacagccccgaggaaaggggcgcggggttgtccagtatccctctctgcacctagggcatcgctccttctccagccttcactgcccaaagccccaggtccctgaggagcaaaggtgatggttctagggcaggaggggaaaaacagagctcagtgtggaagaaagagaaaactggaggctaaatgccaggaaatcaccagagggagagaatgggaggaaagaaaggaacatttccagttttggaatatacgagagcgattgaaattctgggtagtgtttcctggactttaggaaggctatttgtaaaagggttaggaagaagaaacaatgcacctgactaatgataacaggactgaagaagccctaagaaatgaaactctggatagtcactgacactagagaatgaaaagattccaagcccggacccaaaggaactatctttggtctcatttcccaggaagcagactctaagatagagatttgtattcaaaaggcttgatggggaacatccttgggaataataccctaaaggagtgaaggtagccagatgtggcagagagaggttgagctgtcacacagccacaacagaggcctcagccaatcccatgtggcctctcgagctggggtggccctttagagatgtcctaagctgaggcaagagggatgggcgtgtgaactccacattggccatgcgctggatgtgggctactcccaggaaggggccctaagctagggtgagaggtgagacagcagcagccaggagctaggagcacgagtgcctcattcctgaaggcaccacagcctccattacagtcacccctgggaccacttggatctactggaagcagctcctccaggatctgagttgatctcgtttcctggggagggttacaggaggaagatgagtggaatgcactccagcccccaccgctgctgctggtgtcgggaccacaaaggaatgcttgtgggctggctccttcctccgctggccctgagggcccgctctcctctcccgggaggagcctgtgctgtaggggctgctgacctgattgggtgacccagccctcatcccagaaagcactgagcctccggtccccaagcccatctcaggcaatggcctgtccctgcacttgtcaatttgctgtcaaaatcgggcaggggagtcccaggaggtgcccagtgactctggcgggtacccactgtgatacagtggtgacttctctcttgcctgccagtctcttggcctgaggaggtggcttaaagtttatcgggccttgtttcatgtcccctggtagaaatgctcccactctgggaaccttctagaccaggtgtcagcaaactttttcttaaagggccaggtaaaaaatattttagaaggccaggcacagtggcttatgcctgtaagcctagcactttgggaggctgaagtgggtggatcacctaaggtcaggagatcgagaccatcctggctaacatggtgaaaccccgtctctactaaaaatacaaaaaattagccaggcgtggtggcgggcgcctgtagtcccagctcctcgggaggctgaggcaggagaatggcgtgaacccgggaggcggagctggcagtgagccaagatcgcgccactgcactctaacctgggcaacagagcgagactccgtctcaaaaaaaaaaaatacaaaaatacaaaaattaacccggcatgctggcgcatgcctgtaatcccagctactcgggagactgaggcaggagaatcgcttgaactcgggaggtggaagttgcagtgatccctcacaccactgcactccaccctgagcaacagagcgagactccatctcaaaatttaaaaaattttaaaatttatatatatatatttgaggttctgttggcaagaaataaaaatcaaaattatgtagtcacttatataaccacttaaatataatcatttaaaaatccgaaagccatgtgaaaaaacaagtggtaggccggatctgccccgtgggcctttgtttgctggccctgccctagacccacagagcctcaaatcacaaggccagggagcagcggtttccccagtaggtcactgggcatgatgagggtgaacagggccactcctgccctgcgcttgcttcctgacgcaggtgttccacctgctggggacacagccccacatgattgttggtcttgggtgcatgccaggggctggaggacaatgccttgccctcaccaggtgtcatctccaagctggcgcctcccctgcactttcaacaggccgctccgtccttcttccagtctggcagctgctgggtggtgcagggtgggatacgaccaggggggtcccgccttcactgtcagtgggcccattggtctggcaccatgtgatacggcgtctctactagtttgtcggggctgctgtagcaaagtagcactcgttgcgcagctgtaacaacgggaattgattctctcacggttctcgaggccagacgtccaaaatcaaggtgtcactaggatggtttccttggaggctgtgagggaggatctgtcccaggcctctaccctaacttctgagggttgctggcgatctttggcgttccttggcttctagaggcatcacccagtctctgccttgatcttcacaagccttctccctatgtgagtgtctgtgtccacattgcccctcctttatacagacaccagtcacgggaggagggctcaccctgctccactataccctcattctaacttaactgatcccctctgcagcaaccctatctccaaatacagtcacattctgaggtagagggattaggacatatgaatttcttttttttttggagacggagtctcactctgtcacccaggctggagtggagtggcatgatttcggctcagtgcaagctccgcctcctgggttcaagtgattctcctgcctcagcctcccaagtagctgggattacaggtgccctccaccacgcccggctaatttttgtgtttttagtagagacagggtttccccatgttggccaggctggtctcaaactcctgacctcaagtgatctgcccgccctggcctcccaaagtgctgggattacaggcgtgagccacagcgcctggcccagaacatgaattttgtaggaacagaattcaacacctaacaggatcctctaccaggagagaaaacacctgtgaaaccttgggaatcctgacaggccctgcaggacacgaacagcaaatcactcctaaactaaaggttagctccagccaggatgcaccactgccccttccagagtggtgcaagagtcgacgtcatcagcttgctaccaggtggctggtcagtctcctcggggaatgccgtcatatcaggggctcagcattgatctctgtcgcaggcaggttggacattccacagcagtggtggctacccagccgtgggagtgggagccccttctttcaggcccacgcgcagcctccatccctgccaccacggctgctgtgttcatgagccctgtgccatgtacaggtgaccagtggcagaggctggctgacatccactggctgtgtcatcatgtctccctggctgtctgctgtctatgatacatgctctcagtgggagttaatatgggatgcagaaatctccacgctccagctactccctcaggtccatccttcttcccaaacgtccttgtccctaaccttccagtcttccttccccagggcccctgaccaccaggcttgtcactaacccctgcctgggatcccacagctggcctgatcttgggctgcttttctttccacataaaggtgatgatcagacccacggcccaaagctctgcccgtggggacactttctccctggttggggctgaagtgcagcagcgggccactttcggtgtgtgcccacataccatgctaaccttgccatgaaaccaggccggcctttcctcctacttctgctaggcataattacccatccccctttatggtcatcatgtgagcagacacagacacggtgcgacaggggtagaggggacaggagtccgagccacctgcatgtggccaacatgcaccctctgaccccatctcaggacctactgggtctcaggcctcatgatggtcacttctgggcagcaccatcacctcgcgtccctcgtcagaagctctgtctctgccgggaccccatagcgtcccaggagctgctttttcaaacagagtacaattatctgctgcagatggccccgcctgaccccagaactctcgtatctatgttgtgactttcctcttgggatttgccataaactccacccagcatcttttcccaccccagacacttcaaggatatgcgaagtcacacattccccaggttggattcacaggccgtccctggtgggtaatgtaccagtcctgaggtgtgcatagggctgcaggctgcacggcccataccttctgcagggccctttcctgcctggggcccctccgtgccagcagcctcctgtgtggtttgataaacatattggaacagtcagtattcctaggcgtggaacatgctgcctccagaaccctgaggcctccacagcacaatgcttccttcctagtggtgggaggggcaagatacaataattggtcctttaaagaggatgtcctggcatgccccactgcaagggtcccctcaaatatcacagatgtggcaggtccctgaatctctacagggtgagtttctcaccctctgcagtgtgtgtgcctcaccaatgccttgccacttcttggcgtgtctggtcctattaatgtattgttgtgatagctaatatcaggcccttgtccccgcaccaccagtcagctgatgcaggctgcctctggcaagggcacagagccttgaccgaggcaactgccttctgggaagggcacagcctagaaagggactcagctgtgagccatttcagcctccgatattcctggaggctgggggaacaagcgcctcctccacaaaagggatctgggcaacatagcactgcatctaccctcgatggcaagtggggcacaggaccataggcaagtgtttcagagcgactagaaccccctacagagagtgccaggccgagcatggtggctcacacctataatcccagcactttgggaagccaaggctggcagatcacttgaggtctgaagttcgagaccagcctggccaacatggtgaaaccctgtctctactaaaaatacaaaaattagccacgcctgtaatcccagctactcaggaggctgaggcacaagaatctcttgaacccgggaggctgaggttgcagtgagcagagatcgcgccaccgcactccagcctgggcgacagagtgagactcgatctcaaaaaaaaaaaaaaagtaccaaggagactgcagcaccagcatgaactaagaatcctctatgagcttttgagaagccacagctgcagcaggaagaacaaagaatgagggtgggccctttgcttgggtaaaaggtgttgtgttaactgagaaccaaaaggaaacaaaattattcacctgctatttttgcttctggcttcaccatcagagaaactggtcagacaggaaagaacagacggaatgaacggtagaggggcctgctggcataagctctcacctccgaggctagaagactttgcagacttgaccgtggagccagcccctgtaagatctgagaaatcagagatgggagtggagggtgctggagaagggccaggcaactacggagcagttcgaggtcctcacatcacgactttctccagcttgactcataatgatagaatccattaaccaggatccagaggatcatttcgagttcagggagatttgctaggaatggagactttgagttaaaaaagcactagggaggttcatcctacactgatctattgagccagccaccagtttgtgtgtgtgtgtgtgtgtgcgtgtgtgtgtgtgtgtgtccaaccgggagactcagctgatactgcttccttgagatttaatacaccttcctttgatctctcctgtccccattatcccaggaaaatccagagtagcttccagtccattctcattaatccactggatccaaagtttagagaggttccccttccctccagcctccttcctggcccaacagaggagcaccccaccaccctccatcagctgctcaaaacccacaagggaaaaatccctacaggtccatgccaggaggtagtggagctaccctcaggttccattaagtcataccagaaggctgagtgtagaaatgacattaagaggggttccatctgtagggaaagggttcaagatgcaaagctttacagaaggttctccgtctaattgtgaagattaagagcactggtggacctaggaagatgaagaatggagagtgggaaaccagcagagatttcaggaaatgtataggggcatcttcatcgttcaaagcaccggagagacaaagattattagactgtggtccctgcccttaaggagccctggctacaggtgacacaaactgagaagagttggtgtctattaaaagtgagaaggcagctctgtctgatagagcatattgcaagccatgtgtgttttagatttgctagtagccacatttttaaaaagtccaaagattgggccgggtgcggtggctcacgcctgtaatcccagcattttgggaggccaaggtgggcagatcacgaggtcaggagatcgagaccatcctagctaacgctgtgaaaccctgtctctactaaaaatattagccaggcaaggtggtgggcgcctatagtcccagctactcgggaggctgaggcaggggagtggcgtgaacccgagaggtggaggttccagtgagctgagatcgcaccactgcactccagcctgggtgacagagcaagactccgtctgaaaaaaaaaaaaaaaaaaaaagtccaaagattggccgggcatggtggctcacacctgtaatcctgacactttgggaggctgagacaggttgatcacctgagatcaggagttcaagaccagcctggccagcgtggtgaaaccccatctctactaaaaatacaaaaattagccaggcatggtggcgggcacctgtagtcccagctactcaggaggctgagggaggagaatctctggaacctgggaggcaaaggttgcagtgagccaaaactgtgccactgcactccagcccagacgacagagcgagactccatctcaaaaaaaaaaaaaaaaaaatcttcgtttgtatagcagtgagtatccccacttgtaaaaaaataaaataaaaataaataataaatcaaaagatgccagaggccgtggctcacgcctgtaatcccagcactttgggaggccaaggtgggtggatcagctgaggtcaggagttcaagaccagcctggccaacatggtgaaatcccatctgtactaaaaatacaaaaattagctggcgtggtagcacatgcctgtaatctcagctacttgggaggctgaggcaggagaattgcttgaacctgagaggtggaggttgcagtgagctgagatcgtgccactgcactccagcctgggtgacagagcaagactctgtctcaaaaaaataaaataaacattaaaaataaataaataaaataaaatagattttccagccaggagttctgtgaaaaaatctttgtaaacccagaaaaagaaatggagaaaattgatcattaactgtcctctttccctccacagtttttgggccatcctcatcataacacacttctgtttttctcctttccattgtcggatgagaatgatgtttttgacaagctaagtgtcattgcagaagactctgagagcggcaagcagaatcctggtgacagctgcagcctcgggaccccgcctgggcaggggccccaaagctaggctctgagaaggaaacacactcggctgggcacagtgacgtactccatctcacatctgcctcagtgagggatcagggcagcaaacaagggccaagaccatctgagccagccccacatctagaactcccagaccctggacttagccaccagagagctacattttaaaggctgtcttggcaaaaatactccatttgggaactcactgccttataaaggctttcatgatgttttcagaagttggccactgagagtgtaattttcagccttttatatcactaaaataagatcatgttttaattgtgagaaacagggccgagcacagtggctcacgcctgtaataccagcaccttagaggtcgaggcaggcggatcacttgaggtcaggagttcaagaccagcctggccaatatggtgaaacccagtctctactaaaaatacaaaaattagctaggcatgatggcgcatgcctataatcccagctactcgagtgcctgaggcaggagaattgcatgaacccgggaggaggaggaggaggttgcagtgagccgagatagcggcactgcactccagcctgggtgacaaagtgagactccatctcaaaaaaaaaaaaaaaaaaaattgtgagaaacagaaatacttaaaatgaggaataagaatggagatgttacatctggtagatgtaacattctaccagattatggatggactgatctgaaaatcgacctcaactcaagggtggtcagctcaatgctacacagagcacggacttttggattctttgcagtactttgaatttatttttctacctatatatgttttatatgctgctggtgctccattaaagttttactctgtgttgcactatatgtgttcatgatactacctgtgtgtcattgttagatactgaaaaaggctctagtttgccatcttgatgtccactcattccacaagtacttcctagaccctgcctgctgttgaccaggcactgtgttaggtactaggtctcagtcatctgggagctctcagtctaaagcttcaaaaactagaattgcagtcaagggccagatccgttattaaaaaaaaaaaaacctagaaataaaaagtatagttgtggaagtttaaaaagccaggggacaggcttaacaacagattagacacagaactgagcaaaaaagggagtctccaggtacaatggctcacttctgtaatcccagaactttgggaggctgaagtgggaggatcacttgggcccaggagttgagaccattccaggcaacatggtgagaccccttctctacaaaaagttttaaaattaggcatggtggcatgtgtctgtagtcccagctactcaggaggctgaggtgggaggatagcttgagcccaggaggtcaagactgcagtgagctatgttcatgccattgccctccggccctgcctgggtgatggaatgagaccctgtcaaaaaaaaagaaagaaagaaaggaaagaaaaaaaagaaaagaaagagaaaaggaagggtattagggttctccagagaaacagaaccaatagaatgaacatagagatttatttgaaggaactgtggaggctggcaagttcaaaaactgcagggcagaccaacaggctagagacccaggtaagagtggatgtttcagcttgagcaaaagcagtctggaggcagaattaactcctcctcaagggacctcaggcttcttttctcttaaggccttccttcaagtgatagaagtgaaactcacccacattatggagggtaatctgctttactcaaaaatctatggatttaaatgttaatctcatctttaaaaataccttcacaccaacatcaagactcgcattttacctaatcagtctagctggttgacacataaaattaaccatcatagggagggtagatctgtgattgcttttttgaaacttttttcaatgtttgctgcatgtatatagaaataaaatttggccgggtgtggtggctcacatctgtaatcccagcactttcggaggctgaggcaggtggatcacctgaggtcaggagttcgagaccagcctggacaacatggtgaaaccccgtctctactaaacatacaaaaattagccaggcgtggtggtgcacacctgtaatcccagctatttgggaagctgagacaggagaatcacttgaacccaggaggtggaggctgcaatgagccaagatcgtgccactgcactccagcctgggtgacagagcgagactccatctctaaataaataaataaataataaaataaaaaattatttttgaaattgaattttaagatcttgttacacttttttaaagaaaaaagaagttattatccagggcacagtacagagaaacaaaagaatggaaaatatgagtggttaggatacaagcctgaaaaatcaagctgcaagcgtagattagcaagctggaagcttgcacaggtgaatgcggcagctgtgccaatagaaaagggatacctggaagccaagtacatccaatatggaggttcctcctcccttctctttgtcgtcatgtgtgcaggtgtcatggtgctggccaggtagagaccccatctgcagaataaaagattagggtgggatggccagcctctttgtgggctatgtaaatggcacagctggcccaaccaatccactatgccctatataaatcaaacactgcctcttcaagctcatctgtaaaaccaaccgtatcttgccccaaacccggaaacccactcggacccactcgcaccccctccctctgcacaaggaagctctctcttctttctttcaactattgaacttccactgttaaacccagtttttgtgtgtccatgtcttcgatttcctgtgtctgtgacttcaatttccttagcataagacaatgaatcttgggtatttccccagacaaaggatgccacttcaccaggaagtgactaagggaagaacacctgtgggaaaatgtccaagaattctgggaccagaaggggtttcagcagagcatctgtgggccaccaatcagacattctagcagaaaacatatgtccagttggtttgaaagattccctgaggggaagacagtgtaagccatcctcacccccttccacccttcctcctcgctctttctggctgcctcgccttgttgaaaatatctcacttccttttggggctcctgcccctcccctaacatacctcccacacccatccccagactggtttagcctccagggcacctttgttccttcctctcacaaccatgggtctcagccgtagctgcacactgtggccgccaggagagctttagaaatgtggatgcccaggccttaccatgaccaatgaatttcagctctctgcagagggatttttgcatcagcattttttaaagctcctaggtgattccagtttgcagtcaaggtggagaacagctgctgtagcagagcagttatgatagattgaaaggacgtgcttacctgcacttctgtgtgaccttatgttatctggctttcaaaggggtcgctttcttttaatacccagctaactgactccactcattaccttgtgcttccacaggaagatttctttcctgaggggttgtgagtgtctctgggaaacatgccccaggaatgcatccttcccatgcacttcagccttctcggctgctcaccactgaccacctgggaagcaattctccaagttgctacccctttctttgtgcctaataagataatcctaagtagctggtacaaagaaatatttgttgaattaatggataataaataatgatggctaggtgcggtggctcacccctgtaatcccagcactttgggaggccgaggtgggtggatcacctgaggtcaggagtttgagaccagcctggttaacatggtgataccccgtctctactaaaaatacaaaaaattagccaggcgtggtggcaggtgcctgtaatcccagctactcaggaggctgaggcagaagaattgtttgaacccgggaggcggaggttgcagtgagccgagatcgtgccactgcactccagcctgggtgacaagagggaaactccatctcaaaaaaaaaaaaaaaggtaaacaaaagccttcttgggatacatgacaattatacatgcagattaaacagagagctgtaagttaacaaatcaccataaaacatatgcaagcgaaaaacaaaaataaaacaaatatgcaaagtgaaagaaaacagttatgttctgtacaggatatccagatgctacagtctggatgtttgtgcctctccaaaattcgtatgtagaaatctttaggaggtggtgaatgggattaatgacctcataaaagaggagctgcccatctcttccaccatgtgaggacacagagaaggtgccacctatgaggacaggccctcaccagacactcaatctgctgatgccgttctcagaggtgtttgaaccagagcgactccatcttgaagaggggctgggtaaagtaaggctgaaacctactgggctacattccttggacaatttctgttgttttaaaccacccagcttgcgatcatttgttacttctgccgcaggaaacttaatccagcacggaaagactctgttgttttaccctgaccagttctaatatcttcttagtatctaaaatggggaagaagatgggcagagggtcattcagatttattttacgggaacttagtatcttactcttctcagcaagggagttagctgagaatgactgggcatgctgcctcactgtcccatttcctgaactctctagttcagaaaatgctgttgcaaatcaacttccttaaaaaacaaacgggaagtaaaaaacaaagtctattttatgaactagagactcagagactcaacatgatttttctccctgagtcaggtccatggttctgtctcctgaccacctcaccactcctgtttgaatcaagcagacaccaaacaatgtctttgtttccatgcccatgagaactcttaattaaacagccactgactattgggctggcactttacgaggtcaaatttattgctgttggattgtgataaaaaagataaccggaaggttaaagctgtgggagtaatatctctgagcaggaggagtcatggcaaggacagactttaaattgggttaaacaattcaatataaacaggaaacacaagccagctgcagttcccctcctcttggcctctgcctggggcctgcctgctactgggctgcccctgagggtcgcattgcacacctgccctatggagctgatggggtgggagcgatagccaacccttacttactgcttcctatgtgcaggtcttgttctaagcacttttacattttcatttaattcccacagcaacccagttaagcagatactattatctgcctcatttttcagataaagaaactatggcacagagaggttcaatcacttacctaagatcacacaggcaagaagtgacagagccaggacttgaacccaagtggtctggctccagactcaatcatctaagatagccacccatgatccccacctcctggtagccacacccttgagtaatcccttcctcttgagtgtggacagtgccaatgacctgcttctacccatggaaagcgacacaggtgacaggatgctgtcttagattccataggattgtaattctcatcttgccagcagactctctctgttgccttcttggacagcacacttgcatgaagcaagctgccatattggagaagtcacatggctaggacctgaggatgcctcctccagccaacaacgaacagggaatcgaggttctcaatccaacagcaacagggtgaggcactgttctaaaaacaagaggctggagctcaaggtggactttcagcgattccctgctcctcatccagggagctgccaatcaggcataagtcacgccccttctgccaggcaggagacttctttcatttctagggaaatggaagctgggggttccccgatgactgctccatgcgggagtgccaaggctgggcccccttgcgttaacttcaggcaactctgaatcatcatccatctccaacttctccctctgcccaatcctactttcctcactccttacaagtgttgtccccaagagcatttccagatgaatttcccacatgcaaattttccttccagagtgtgtttccagggaacccagcctaatctagagatcttgggaagacctgttgccgcagagtgatgacaataaagtctagacttcatggtattgaggagtgaacaggagggtgtggagaagctgggacagcaggtgtagccaactcctttgagaaggacggcttttgggctcagaagaagtgtgacagtgtctggaaggggcaagaagaaagtcgagggggggatatttcaggtgagtgatattacaccaccatggtatactgtcgcctgaggcctgtagacaggaaatgaggagtccggctcctagttagaatcccagggctggtttttcaggactgaccctgggcaactttaaggctgtaccaaggaggcctcacagggaggctccctctccagaccagaactggcatagccagtgcactgcagtccctggagggagctgcggtcaaggtctcaggcccctgctggccatgctcttatgcacacctgtgttcccagccttgcacgtgtgcccaaggccttcttcaggcacctcaactaaggcctccttattctcagggagtagggaagggggagccacgaagacattgttatcctctctgactcagttctttcctactcctggccctgtcctctctccctcccgctagttcccgggtccataaaactacagaagcctcaacagagagatgaccttcacccccacatctatactgattacttgactcttgactggagctctgttgcggggagggtggaatcctcttgcttctgcccctgcagtgagtgatgagggcttcactgttactttcttttttttttttttttttttttgagacagagtcttgctctgttgcccaggctggaatgcagtggcacaatctaagttcacttcaacctccacctcccgggttcaagcgattctcctgcctcaacctcccgagtagctgggactatagttgtgtgccaccatgcctagctaacttttgtatttttagtagagacggggtttcactatgttggccaggctggtatcgaactcctgacctcaagtgatccggccaccttggcctcccaaagtgctgggattacaggtgtttctgttactttcatttttgccttattgcttcaattagccactctctccagattagctgagcccttgacagatgcattgctgacacccatgagagaaggcctgatgtccctggaaaggacacaagagaagtgaccagacctacagcccccgctctggcctttggcaggaggagggatactcccgaggttgtcactggagagaacacaggccagggataggcaggtgatcccactaagggggtgaggggttaaggaagcctggtgtcttctatgttcctggcaaagtataggtcatcaacaaagggagggaagagaggggcttgggaggaaatgagtaggatggagcagctccctaggggaatgagaaagtgagcccacctgaccaggcagagggctgatggggcagtgccagagcccgctagaaaaccagtgacagaaaagctgcaaggtgcccagcttggtgaccagccagtagcagggtctgcaagatggctggctcctccttcccagcacaatgagcatttctgccacggcggggacagcacagcacagcgctgttggccaggaagggggctgaagaagagccctcccagggggaatgttggcattgttgctctgtttctagtttccacagcagtctggaggaaaaaaggacccagcctgaagatgcatcaaaaagtgattgacactaagcccagttgaacagccaaagcctgaaggcagggaaattcaaacaccgagtcagccggcaaagtacaagccatgctgactcggcctgctgagccatcagcaggatggctggattaccgctgatccagccaatatccatccagagattacacaccgtccctcaaggtgcaatcgtggtttctttttcttctggttctttcttcagcaccagctaacagagcatcactgatactgttttcctgaaagcttgcaaggatcccaaatgggctgccctgaaaggccccctacctttgagcatgcgcactctcctggggattttgtgagttccccagctcccaagtatacacagagccaga[450 bp omitted]gatagagtcttcctctgttacccaggctggagtggcatgatctcagctcactgcagcttccatctccccaggctcaggtgattatcccacctcagcttctggagtagcaggaactaccgatgcgcaccaccacgacaggctaatttttttttctttttatagagacagggtttcgccatgttgcccaggtaggtctcaaactcctgagctcaagtgatcctcccatctcggcctctcaaagtgctgggattacaggcatgagccccatgcccggcccttcaactgttaacctgtattgatcacctacactggtaagcaaaggtcactctcacttcctaggtcatgacctatcaataggtcagagtcctaacgggaaacccatgacacactccaacagagtaactgagaaaggcataatgaaggatcttattgtagcagcgtaggcagggtgaagggaaaccaaaaaacaatacagtagcaatagtgggaagctcactagctctaggcctgttgggaggcaggggaggagccattaccctggagagcacaggggtcagccacacagcccactaatggagaccctgcaggaagagagcacacctcattgtcccccaccctctgatcttgggctgatgcctcccactggtggaacccacccaaagtcagagggtaaaggactctgctgatgaatttttttttaatttttaatatttttttgagatggagtcttgctctgttgctcaggctggagtgcagtggcacaatctcggctcactgcaatctccacctcccaggttcaactgattctcctgcctcagcttcccaagtagctgggattacaggcacccaagaccacacccagctaatttttgtatttttagtagagtaagtgttttaccatgtgagccaggctggtctcggacctctgacctcaagtgatctgcccacctcgtcctcccaaagtgctgggaatacaagcatgagccaccacacccatttttgatgcattttatacaagaagtctcccagggcatggaacagggcaggcccagagaagaatggatctggagaggcagatggaaggcctacagcacccagggaagcaatatgagaaaagaatataagaacagagactgtgacaaagcaaatttagatccacaacattgacatttttataaaaaggtttttggaggtttatactgaaaagttttgtaacaattatattcatgtgtatcagatttgtaaggtgttcaaaccattttaacatatccatttggcttataattttcattacatttttagtttgaaagagtttaattgattaaatttttaatcattgtttaaatactcgaggaaccctagtttgtaaaattctagtttttgatataatagttatctgagcagaatgtgaatttacatcattgggtttttggggggtggggttgtttggagtgcagtggtgcgatcatggctcactgcagcctggaccccactgggacccagcggtcctcctgcctcagccttccaagtagctgggactacaggttcgtgccaccatgcccagataattttttttacttgctttgtagagatggggtctcactttgttgcccaggctggtcttgaactcctgggctcaagcaatcctcctgccttgactttccaaaatgctgggagtcaccacacccagcccaacaacattgttagctgtttaaaaacaatgatttagtgtgggttcccttcagtgtgtaaaaattattaaaatcgggtaagtttagcatctgtgggagccaggagggagctaagcgcctggtaaccttccacttcttctttccctaatttagatcatgtcattcctctgctaaaatctccatcatggcttcctatctggcccagaataaagcccaaatccttgccagaggctgcaggccccaccgactactcccctggcctccattcctctgcaccccttctctcctcattctgcaggggctcagcctacttgctgtgcttgtgtggagacaaacgtgactgcatcttggatgctaatccaccatgttgacttctgattcaccccagtccct

SEQ ID NO: 384 - DNA, 1943 bp, Homo sapiens
cccgcccatctccgctggttcccggaagccgccgcggacaagctctcccgggcgcgggcgggggtcgtgtgcttggaggaagccgcggaacccccagcgtccgtccatggcgtggagccttgggagctggctgggtggctgcctgctggtgtcagcattgggaatggtaccacctcccgaaaatgtcagaatgaattctgttaatttcaagaacattctacagtgggagtcacctgcttttgccaaagggaacctgactttcacagctcagtacctaagttataggatattccaagataaatgcatgaatactaccttgacggaatgtgatttctcaagtctttccaagtatggtgaccacaccttgagagtcagggctgaatttgcagatgagcattcagactgggtaaacatcaccttctgtcctgtggatgacaccattattggaccccctggaatgcaagtagaagtacttgctgattctttacatatgcgtttcttagcccctaaaattgagaatgaatacgaaacttggactatgaagaatgtgtataactcatggacttataatgtgcaatactggaaaaacggtactgatgaaaagtttcaaattactccccagtatgactttgaggtcctcagaaacctggagccatggacaacttattgtgttcaagttcgagggtttcttcctgatcggaacaaagctggggaatggagtgagcctgtctgtgagcaaacaacccatgacgaaacggtcccctcctggatggtggccgtcatcctcatggcctcggtcttcatggtctgcctggcactcctcggctgcttcgccttgctgtggtgcgtttacaagaagacaaagtacgccttctcccctaggaattctcttccacagcacctgaaagagtttttgggccatcctcatcataacacacttctgtttttctcctttccattgtcggatgagaatgatgtttttgacaagctaagtgtcattgcagaagactctgagagcggcaagcagaatcctggtgacagctgcagcctcgggaccccgcctgggcaggggccccaaagctaggctctgagaaggaaacacactcggctgggcacagtgacgtactccatctcacatctgcctcagtgagggatcagggcagcaaacaagggccaagaccatctgagccagccccacatctagaactcccagaccctggacttagccaccagagagctacattttaaaggctgtcttggcaaaaatactccatttgggaactcactgccttataaaggctttcatgatgttttcagaagttggccactgagagtgtaattttcagccttttatatcactaaaataagatcatgttttaattgtgagaaacagggccgagcacagtggctcacgcctgtaataccagcaccttagaggtcgaggcaggcggatcacttgaggtcaggagttcaagaccagcctggccaatatggtgaaacccagtctctactaaaaatacaaaaattagctaggcatgatggcgcatgcctataatcccagctactcgagtgcctgaggcaggagaattgcatgaacccgggaggaggaggaggaggttgcagtgagccgagatagcggcactgcactccagcctgggtgacaaagtgagactccatctcaaaaaaaaaaaaaaaaaaaattgtgagaaacagaaatacttaaaatgaggaataagaatggagatgttacatctggtagatgtaacattctaccagattatggatggactgatctgaaaatcgacctcaactcaagggtggtcagctcaatgctacacagagcacggacttttggattctttgcagtactttgaatttatttttctacctatatatgttttatatgctgctggtgctccattaaagttttactctgtgttgca

SEQ ID NO: 385 - protein, 325 aa, Homo sapiens
MAWSLGSWLGGCLLVSALGMVPPPENVRMNSVNFKNILQWESPAFAKGNLTFTAQYLSYRIFQDKCMNTTLTECDFSSLSKYGDHTLRVRAEFADEHSDWVNITFCPVDDTIIGPPGMQVEVLADSLHMRFLAPKIENEYETWTMKNVYNSWTYNVQYWKNGTDEKFQITPQYDFEVLRNLEPWTTYCVQVRGFLPDRNKAGEWSEPVCEQTTHDETVPSWMVAVILMASVFMVCLALLGCFALLWCVYKKTKYAFSPRNSLPQHLKEFLGHPHHNTLLFFSFPLSDENDVFDKLSVIAEDSESGKQNPGDSCSLGTPPGQGPQS

SEQ ID NO: 386 - DNA, 4120 bp, Homo sapiens
cccccgcgccggcggcggcgcggcgcccgcgcttccgtatcgctcctcgtaggccggggctcggcgcgcgcacccgcactaaagacgcttcttcccggcgggtaggaatcccgccggcgagccgaacagttccccgagcgcagcccgcggaccaccacccggccgcacgggccgcttttgtcccccgcccgccgcttctgtccgagaggccgcccgcgaggcgcatcctgaccgcgagcgtcgggtcccagagccgggcgcggctggggcccgaggctagcatctctcgggagccgcaaggcgagagctgcaaagtttaattagacacttcagaattttgatcacctaatgttgatttcagatgtaaaagtcaagagaagactctaaaaatagcaaagatgcttttgagccagaatgccttcatcttcagatcacttaatttggttctcatggtgtatatcagcctcgtgtttggtatttcatatgattcgcctgattacacagatgaatcttgcactttcaagatatcattgcgaaatttccggtccatcttatcatgggaattaaaaaaccactccattgtaccaactcactatacattgctgtatacaatcatgagtaaaccagaagatttgaaggtggttaagaactgtgcaaataccacaagatcattttgtgacctcacagatgagtggagaagcacacacgaggcctatgtcaccgtcctagaaggattcagcgggaacacaacgttgttcagttgctcacacaatttctggctggccatagacatgtcttttgaaccaccagagtttgagattgttggttttaccaaccacattaatgtgatggtgaaatttccatctattgttgaggaagaattacagtttgatttatctctcgtcattgaagaacagtcagagggaattgttaagaagcataaacccgaaataaaaggaaacatgagtggaaatttcacctatatcattgacaagttaattccaaacacgaactactgtgtatctgtttatttagagcacagtgatgagcaagcagtaataaagtctcccttaaaatgcaccctccttccacctggccaggaatcagaatcagcagaatctgccaaaataggaggaataattactgtgtttttgatagcattggtcttgacaagcaccatagtgacactgaaatggattggttatatatgcttaagaaatagcctccccaaagtcttgaattttcataactttttagcctggccatttcctaacctgccaccgttggaagccatggatatggtggaggtcatttacatcaacagaaagaagaaagtgtgggattataattatgatgatgaaagtgatagcgatactgaggcagcgcccaggacaagtggcggtggctataccatgcatggactgactgtcaggcctctgggtcaggcctctgccacctctacagaatcccagttgatagacccggagtccgaggaggagcctgacctgcctgaggttgatgtggagctccccacgatgccaaaggacagccctcagcagttggaactcttgagtgggccctgtgagaggagaaagagtccactccaggacccttttcccgaagaggactacagctccacggaggggtctgggggcagaattaccttcaatgtggacttaaactctgtgtttttgagagttcttgatgacgaggacagtgacgacttagaagcccctctgatgctatcgtctcatctggaagagatggttgacccagaggatcctgataatgtgcaatcaaaccatttgctggccagcggggaagggacacagccaacctttcccagcccctcttcagagggcctgtggtccgaagatgctccatctgatcaaagtgacacttctgagtcagatgttgaccttggggatggttatataatgagatgactccaaaactattgaatgaacttggacagacaagcacctacagggttctttgtctctgcatcctaacttgctgccttatcgtctgcaagtgttctccaagggaaggaggaggaaactgtggtgttcctttcttccaggtgacatcacctatgcacattcccagtatggggaccatagtatcattcagtgcattgtttacatattcaaagtggtgcactttgaaggaagcacatgtgcacctttcctttacactaatgcacttaggatgtttctgcatcatgtctaccagggagcagggttccccacagtttcagaggtggtccaggaccctatgatatttctcttctttcgttcttttttttttttttttttgagacagagtctcgttctgtcgcccaagctggagcgcaatggtgtgatcttggctcactgcaacatccgcctcccaggttcaagtgattctcctgcctcagcctccctcgcaagtagctgggattacaggcgcctgccaccatgcctagcaaatttttgtatttttagtagagacaggattttaccatgttggccaggctggtctcaaactcctgacctcaagtgatctgccctcctcagcctcgtaaagtgctgggattacaggggtgagccgctgtgcctggctggccctgtgatatttctgtgaaataaattgggccagggtgggagcagggaaagaaaaggaaaatagtagcaagagctgcaaagcaggcaggaagggaggaggagagccaggtgagcagtggagagaaggggggccctgcacaaggaaacagggaagagccatcgaagtttcagtcggtgagccttgggcacctcacccatgtcacatcctgtctcctgcaattggaattccaccttgtccagccctccccagttaaagtggggaagacagactttaggatcacgtgtgtgactaatacagaaaggaaacatggcgtcggggagagggataaaacctgaatgccatattttaagttaaaaaaaaaaaaagcaaacacaaagatgcttcaagatcttcaggagaagtatggtatacaagtttcagggaccctatttgacaattttcagagtgctctctatgctgattccgagtcgagtgtgtcagctgtgattacagtgcctgtggatctaggccgggttgggggggtgtgggcgggggaagggaagtctggcccggagcaattgctcctgccggtaaccccagcactttgggatgcctaaacaggcgtatcgcttgaggccagtaattcgagaccagcctgggcaacatggcaaatctgtctctacaaaacaaaattagaaaaattaactgggcgtagtggcatgtgcctgttgtcccagctacttgggaggctgaggtgggagaatggcttgagcccaggaagcggaggttgcagtgagccaagatcatgtcactgcacttcagcctgggtgacagaaccagaccctgtctttaaaaagggagttggtggggagaggttctagaatgtcatgtagcaaccagtttaaggactgggactcagggatccaactcccacagtttccctgtgtgaccctaggcatttgacttagcctttctgagcctcaggttttttgtttctgaagtaaaaggattggactaggtaatctccaagatcctaggaacccaggagaaagatgagaaaatgtacaagaatgaacactcaggtggaaatgctgcaatcctgagaagctcccaggatgaatgaaaggcacaggacctcttacccctcacccctgcccccctcaagagctggtttctcaaacctttctcttaggccccttcaaagggggaaaactaaaaattatacaagttatagttcaaggactttaaatagattatttatatgattgctcataaggatgaggctgtgaggagggaacaccttatttaatctaatgaaattccataggaaagaggccttttgtatattgaatcaatttatctgccttctcagtgcatctgtcatattctgaaagattctgggttgatcttttgcgataacctctatggctgtgagtgtgtgtgtgtgtttgtgtattttttaacattttgtataatgattggaggttggtaaaaagtaacacaacagtacttttttaatacaaacttggtgtgg

SEQ ID NO: 387 - protein, 515 aa, Homo sapiens [sequence omitted]

SEQ ID NO: 388 - DNA, 4352 bp, Homo sapiens
cccccgcgccggcggcggcgcggcgcccgcgcttccgtatcgctcctcgtaggccggggctcggcgcgcgcacccgcactaaagacgcttcttcccggcgggtaggaatcccgccggcgagccgaacagttccccgagcgcagcccgcggaccaccacccggccgcacgggccgcttttgtcccccgcccgccgcttctgtccgagaggccgcccgcgaggcgcatcctgaccgcgagcgtcgggtcccagagccgggcgcggctggggcccgaggctagcatctctcgggagccgcaaggcgagagctgcaaagtttaattagacacttcagaattttgatcacctaatgttgatttcagatgtaaaagtcaagagaagactctaaaaatagcaaagatgcttttgagccagaatgccttcatcttcagatcacttaatttggttctcatggtgtatatcagcctcgtgtttggtatttcatatgattcgcctgattacacagatgaatcttgcactttcaagatatcattgcgaaatttccggtccatcttatcatgggaattaaaaaaccactccattgtaccaactcactatacattgctgtatacaatcatgagtaaaccagaagatttgaaggtggttaagaactgtgcaaataccacaagatcattttgtgacctcacagatgagtggagaagcacacacgaggcctatgtcaccgtcctagaaggattcagcgggaacacaacgttgttcagttgctcacacaatttctggctggccatagacatgtcttttgaaccaccagagtttgagattgttggttttaccaaccacattaatgtgatggtgaaatttccatctattgttgaggaagaattacagtttgatttatctctcgtcattgaagaacagtcagagggaattgttaagaagcataaacccgaaataaaaggaaacatgagtggaaatttcacctatatcattgacaagttaattccaaacacgaactactgtgtatctgtttatttagagcacagtgatgagcaagcagtaataaagtctcccttaaaatgcaccctccttccacctggccaggaatcagaatcagcagaatctgccaaaataggaggaataattactgtgtttttgatagcattggtcttgacaagcaccatagtgacactgaaatggattggttatatatgcttaagaaatagcctccccaaagtcttgaggcaaggtctcgctaagggctggaatgcagtggctattcacaggtgcagtcataatgcactacagtctgaaactcctgagctcaaacagtcgtcctgcctaagcttccccagtagctgggattacaagcgtgcatccctgtgccccagtgattaagttttattatgtagaaaataaagagcaaacagtacagctgatacggactctctctctctttttttttttttttaagaattttcataactttttagcctggccatttcctaacctgccaccgttggaagccatggatatggtggaggtcatttacatcaacagaaagaagaaagtgtgggattataattatgatgatgaaagtgatagcgatactgaggcagcgcccaggacaagtggcggtggctataccatgcatggactgactgtcaggcctctgggtcaggcctctgccacctctacagaatcccagttgatagacccggagtccgaggaggagcctgacctgcctgaggttgatgtggagctccccacgatgccaaaggacagccctcagcagttggaactcttgagtgggccctgtgagaggagaaagagtccactccaggacccttttcccgaagaggactacagctccacggaggggtctgggggcagaattaccttcaatgtggacttaaactctgtgtttttgagagttcttgatgacgaggacagtgacgacttagaagcccctctgatgctatcgtctcatctggaagagatggttgacccagaggatcctgataatgtgcaatcaaaccatttgctggccagcggggaagggacacagccaacctttcccagcccctcttcagagggcctgtggtccgaagatgctccatctgatcaaagtgacacttctgagtcagatgttgaccttggggatggttatataatgagatgactccaaaactattgaatgaacttggacagacaagcacctacagggttctttgtctctgcatcctaacttgctgccttatcgtctgcaagtgttctccaagggaaggaggaggaaactgtggtgttcctttcttccaggtgacatcacctatgcacattcccagtatggggaccatagtatcattcagtgcattgtttacatattcaaagtggtgcactttgaaggaagcacatgtgcacctttcctttacactaatgcacttaggatgtttctgcatcatgtctaccagggagcagggttccccacagtttcagaggtggtccaggaccctatgatatttctcttctttcgttcttttttttttttttttttgagacagagtctcgttctgtcgcccaagctggagcgcaatggtgtgatcttggctcactgcaacatccgcctcccaggttcaagtgattctcctgcctcagcctccctcgcaagtagctgggattacaggcgcctgccaccatgcctagcaaatttttgtatttttagtagagacaggattttaccatgttggccaggctggtctcaaactcctgacctcaagtgatctgccctcctcagcctcgtaaagtgctgggattacaggggtgagccgctgtgcctggctggccctgtgatatttctgtgaaataaattgggccagggtgggagcagggaaagaaaaggaaaatagtagcaagagctgcaaagcaggcaggaagggaggaggagagccaggtgagcagtggagagaaggggggccctgcacaaggaaacagggaagagccatcgaagtttcagtcggtgagccttgggcacctcacccatgtcacatcctgtctcctgcaattggaattccaccttgtccagccctccccagttaaagtggggaagacagactttaggatcacgtgtgtgactaatacagaaaggaaacatggcgtcggggagagggataaaacctgaatgccatattttaagttaaaaaaaaaaaaagcaaacacaaagatgcttcaagatcttcaggagaagtatggtatacaagtttcagggaccctatttgacaattttcagagtgctctctatgctgattccgagtcgagtgtgtcagctgtgattacagtgcctgtggatctaggccgggttgggggggtgtgggcgggggaagggaagtctggcccggagcaattgctcctgccggtaaccccagcactttgggatgcctaaacaggcgtatcgcttgaggccagtaattcgagaccagcctgggcaacatggcaaatctgtctctacaaaacaaaattagaaaaattaactgggcgtagtggcatgtgcctgttgtcccagctacttgggaggctgaggtgggagaatggcttgagcccaggaagcggaggttgcagtgagccaagatcatgtcactgcacttcagcctgggtgacagaaccagaccctgtctttaaaaagggagttggtggggagaggttctagaatgtcatgtagcaaccagtttaaggactgggactcagggatccaactcccacagtttccctgtgtgaccctaggcatttgacttagcctttctgagcctcaggttttttgtttctgaagtaaaaggattggactaggtaatctccaagatcctaggaacccaggagaaagatgagaaaatgtacaagaatgaacactcaggtggaaatgctgcaatcctgagaagctcccaggatgaatgaaaggcacaggacctcttacccctcacccctgcccccctcaagagctggtttctcaaacctttctcttaggccccttcaaagggggaaaactaaaaattatacaagttatagttcaaggactttaaatagattatttatatgattgctcataaggatgaggctgtgaggagggaacaccttatttaatctaatgaaattccataggaaagaggccttttgtatattgaatcaatttatctgccttctcagtgcatctgtcatattctgaaagattctgggttgatcttttgcgataacctctatggctgtgagtgtgtgtgtgtgtttgtgtattttttaacattttgtataatgattggaggttggtaaaaagtaacacaacagtacttttttaatacaaacttggtgtgg

SEQ ID NO: 389 - protein, 331 aa, Homo sapiens
MLLSQNAFIFRSLNLVLMVYISLVFGISYDSPDYTDESCTFKISLRNFRSILSWELKNHSIVPTHYTLLYTIMSKPEDLKVVKNCANTTRSFCDLTDEWRSTHEAYVTVLEGFSGNTTLFSCSHNFWLAIDMSFEPPEFEIVGFTNHINVMVKFPSIVEEELQFDLSLVIEEQSEGIVKKHKPEIKGNMSGNFTYIIDKLIPNTNYCVSVYLEHSDEQAVIKSPLKCTLLPPGQESESAESAKIGGIITVFLIALVLTSTIVTLKWIGYICLRNSLPKVLRQGLAKGWNAVAIHRCSHNALQSETPELKQSSCLSFPSSWDYKRASLCPSD

SEQ ID NO: 390 - DNA, 928 bp, Homo sapiens
cccgcccatctccgctggttcccggaagccgccgcggacaagctctcccgggcgcgggcgggggtcgtgtgcttggaggaagccgcggaacccccagcgtccgtccatggcgtggagccttgggagctggctgggtggctgcctgctggtgtcagcattgggaatggtaccacctcccgaaaatgtcagaatgaattctgttaatttcaagaacattctacagtgggagtcacctgcttttgccaaagggaacctgactttcacagctcagtacctaagttataggatattccaagataaatgcatgaatactaccttgacggaatgtgatttctcaagtctttccaagtatggtgaccacaccttgagagtcagggctgaatttgcagatgagcattcagactgggtaaacatcaccttctgtcctgtggatgacaccattattggaccccctggaatgcaagtagaagtacttgctgattctttacatatgcgtttcttagcccctaaaattgagaatgaatacgaaacttggactatgaagaatgtgtataactcatggacttataatgtgcaatactggaaaaacggtactgatgaaaagtttcaaattactccccagtatgactttgaggtcctcagaaacctggagccatggacaacttattgtgttcaagttcgagggtttcttcctgatcggaacaaagctggggaatggagtgagcctgtctgtgagcaaacaacccatgacgaaacggtcccctcctggatggtggccgtcatcctcatggcctcggtcttcatggtctgcctggcactcctcggctgcttcgccttgctgtggtgcgtttacaagaagacaaagtacgccttctcccctaggaattctcttccacagcacctgaaagaggtaggtaggatggagtga

SEQ ID NO: 391 - protein, 273 aa, Homo sapiens
MAWSLGSWLGGCLLVSALGMVPPPENVRMNSVNFKNILQWESPAFAKGNLTFTAQYLSYRIFQDKCMNTTLTECDFSSLSKYGDHTLRVRAEFADEHSDWVNITFCPVDDTIIGPPGMQVEVLADSLHMRFLAPKIENEYETWTMKNVYNSWTYNVQYWKNGTDEKFQITPQYDFEVLRNLEPWTTYCVQVRGFLPDRNKAGEWSEPVCEQTTHDETVPSWMVAVILMASVFMVCLALLGCFALLWCVYKKTKYAFSPRNSLPQHLKEVGRME

SEQ ID NO: 392 - DNA, 3659 bp, Homo sapiens
gcacctgcgaccccaggacccctcccgggccctgtcctgcgccctccacgcgtcgcccctgctgggagtccgctttcgttgcacccctccgcgtcccaccccaccccaccaaggatgcccaggataccgggcatttgccactgcaagatatgtaaaagtcaagagaagactctaaaaatagcaaagatgcttttgagccagaatgccttcatcttcagatcacttaatttggttctcatggtgtatatcagcctcgtgtttggtatttcatatgattcgcctgattacacagatgaatcttgcactttcaagatatcattgcgaaatttccggtccatcttatcatgggaattaaaaaaccactccattgtaccaactcactatacattgctgtatacaatcatgagtaaaccagaagatttgaaggtggttaagaactgtgcaaataccacaagatcattttgtgacctcacagatgagtggagaagcacacacgaggcctatgtcaccgtcctagaaggattcagcgggaacacaacgttgttcagttgctcacacaatttctggctggccatagacatgtcttttgaaccaccagagtttgagattgttggttttaccaaccacattaatgtgatggtgaaatttccatctattgttgaggaagaattacagtttgatttatctctcgtcattgaagaacagtcagagggaattgttaagaagcataaacccgaaataaaaggaaacatgagtggaaatttcacctatatcattgacaagttaattccaaacacgaactactgtgtatctgtttatttagagcacagtgatgagcaagcagtaataaagtctcccttaaaatgcaccctccttccacctggccaggaatcagaatcagcagaatctgccaaaataggaggaataattactgtgtttttgatagcattggtcttgacaagcaccatagtgacactgaaatggattggttatatatgcttaagaaatagcctccccaaagtcttgaattttcataactttttagcctggccatttcctaacctgccaccgttggaagccatggatatggtggaggtcatttacatcaacagaaagaagaaagtgtgggattataattatgatgatgaaagtgatagcgatactgaggcagcgcccaggacaagtggcggtggctataccatgcatggactgactgtcaggcctctgggtcaggcctctgccacctctacagaatcccagttgatagacccggagtccgaggaggagcctgacctgcctgaggttgatgtggagctccccacgatgccaaaggacagccctcagcagttggaactcttgagtgggccctgtgagaggagaaagagtccactccaggacccttttcccgaagaggactacagctccacggaggggtctgggggcagaattaccttcaatgtggacttaaactctgtgtttttgagagttcttgatgacgaggacagtgacgacttagaagcccctctgatgctatcgtctcatctggaagagatggttgacccagaggatcctgataatgtgcaatcaaaccatttgctggccagcggggaagggacacagccaacctttcccagcccctcttcagagggcctgtggtccgaagatgctccatctgatcaaagtgacacttctgagtcagatgttgaccttggggatggttatataatgagatgactccaaaactattgaatgaacttggacagacaagcacctacagggttctttgtctctgcatcctaacttgctgccttatcgtctgcaagtgttctccaagggaaggaggaggaaactgtggtgttcctttcttccagcattgggaatggtaccacctcccgaaaatgtcagaatgaattctgttaatttcaagaacattctacagtgggagtcacctgcttttgccaaagggaacctgactttcacagctcagtacctaagttataggatattccaagataaatgcatgaatactaccttgacggaatgtgatttctcaagtctttccaagtatggtgaccacaccttgagagtcagggctgaatttgcagatgagcattcagactgggtaaacatcaccttctgtcctgtggatgacaccattattggaccccctggaatgcaagtagaagtacttgctgattctttacatatgcgtttcttagcccctaaaattgagaatgaatacgaaacttggactatgaagaatgtgtataactcatggacttataatgtgcaatactggaaaaacggtactgatgaaaagtttcaaattactccccagtatgactttgaggtcctcagaaacctggagccatggacaacttattgtgttcaagttcgagggtttcttcctgatcggaacaaagctggggaatggagtgagcctgtctgtgagcaaacaacccatgacgaaacggtcccctcctggatggtggccgtcatcctcatggcctcggtcttcatggtctgcctggcactcctcggctgcttcgccttgctgtggtgcgtttacaagaagacaaagtacgccttctcccctaggaattctcttccacagcacctgaaagagtttttgggccatcctcatcataacacacttctgtttttctcctttccattgtcggatgagaatgatgtttttgacaagctaagtgtcattgcagaagactctgagagcggcaagcagaatcctggtgacagctgcagcctcgggaccccgcctgggcaggggccccaaagctaggctctgagaaggaaacacactcggctgggcacagtgacgtactccatctcacatctgcctcagtgagggatcagggcagcaaacaagggccaagaccatctgagccagccccacatctagaactcccagaccctggacttagccaccagagagctacattttaaaggctgtcttggcaaaaatactccatttgggaactcactgccttataaaggctttcatgatgttttcagaagttggccactgagagtgtaattttcagccttttatatcactaaaataagatcatgttttaattgtgagaaacagggccgagcacagtggctcacgcctgtaataccagcaccttagaggtcgaggcaggcggatcacttgaggtcaggagttcaagaccagcctggccaatatggtgaaacccagtctctactaaaaatacaaaaattagctaggcatgatggcgcatgcctataatcccagctactcgagtgcctgaggcaggagaattgcatgaacccgggaggaggaggaggaggttgcagtgagccgagatagcggcactgcactccagcctgggtgacaaagtgagactccatctcaaaaaaaaaaaaaaaaaaaattgtgagaaacagaaatacttaaaatgaggaataagaatggagatgttacatctggtagatgtaacattctaccagattatggatggactgatctgaaaatcgacctcaactcaagggtggtcagctcaatgctacacagagcacggacttttggattctttgcagtactttgaatttatttttctacctatatatgttttatatgctgctggtgctccattaaagttttactctgtgttgca

SEQ ID NO: 393 - protein, 539 aa, Homo sapiens
MPRIPGICHCKICKSQEKTLKIAKMLLSQNAFIFRSLNLVLMVYISLVFGISYDSPDYTDESCTFKISLRNFRSILSWELKNHSIVPTHYTLLYTIMSKPEDLKVVKNCANTTRSFCDLTDEWRSTHEAYVTVLEGFSGNTTLFSCSHNFWLAIDMSFEPPEFEIVGFTNHINVMVKFPSIVEEELQFDLSLVIEEQSEGIVKKHKPEIKGNMSGNFTYIIDKLIPNTNYCVSVYLEHSDEQAVIKSPLKCTLLPPGQESESAESAKIGGIITVFLIALVLTSTIVTLKWIGYICLRNSLPKVLNFHNFLAWPFPNLPPLEAMDMVEVIYINRKKKVWDYNYDDESDSDTEAAPRTSGGGYTMHGLTVRPLGQASATSTESQLIDPESEEEPDLPEVDVELPTMPKDSPQQLELLSGPCERRKSPLQDPFPEEDYSSTEGSGGRITFNVDLNSVFLRVLDDEDSDDLEAPLMLSSHLEEMVDPEDPDNVQSNHLLASGEGTQPTFPSPSSEGLWSEDAPSDQSDTSESDVDLGDGYIMR

SEQ ID NO: 394 - DNA, 26500 bp, Mus musculus
  misc_feature (1)...(26500): n = A,T,C or G
atgttctgaaagccagcagcctgaagccactgcttttgggccagccgcgtaggcctcttgggttgcaccttcagggacagaggtcaggacctggctggcttccaaggactgcagcagccatggaggcagtgaggagcatgacacaatcatcatggccagaaaaggcatggccagggacaggacccgtgcgggggtggggcaaccgaaggagagatggacagatgtctgtccctggacctcagtccccttcctgttttgggatgcacagtgaacacactggtaagctgctgcaggagttaattcaggggctgcaaaggcaacttgggttgggccttgcacagaccaggcaggtataatatcacacctgtcatcccagcacttggaaagttaaagcaagagggttgtggcaaattccaggctagcctgggctacagagcgaaatgagaccaaaagataaaactcccagggctggccctaccactcagtgggcagagctcacccagctgcgtaagccctgagttccatcccagcaccgcagaaaccagatggggtggcacacagctgccgtccctgacttgggaagtagaggcagaaagcaggcatgcaaggtcatccttggctgtaaccagttggaggccagcctgggctacatgagaccctctcaaaagagaatctgtaaatatctttgtgactccccatcgtgtccccatcctgttctctccaacggccactattgccccaccgtggacggtgtgtgaactgtactgtaaggcctgggggctcctccaaggctgaagaggtgccctctccggcccacttctgttctcctcaagccatcccagcaagtcccctgtccagccccacatcaacctcagtgcaatatgccctccccgtggggtcccttggcacggtactgtctgcagccccttgtctctcacccctagctccactctccggtggttaaaaatcgcatcgcacatcctccccccaatcctgtttttattgttgaatccattctgtaaactacaaacctcgtgtgtcttactcatcaggacttgggatccctcgtcctcagcctatgtggtctggtgtttgacaatccaagcacagtgtcctcttggcaccaaccagaggggcctgtccctccagcgcagccggcaaatgtatgcagtccaggtccccgccccacctgtcacagcccctctttttgagatctgtaataaatctctaataagaaacagctcctctccggtgacttatgcgtgcgtgcgatgggagagcaggcgaagggtgggcaccacgtgttttgtctcccccgctctaaaccctccctggatcccacatgatgaatcccaattcgcagatgacttcctttctccaagcctaaacttccctatccatagattagccacaagttgagcgcagtacgcaagctggcgggcgtagtagtactcagactcgtcctggagtcagccagagactgtctgttcatgtcctgttgttttattagctcggaaccggttgctacaaggctaccctagaaaccgaggactcccgcgagcgcttgggtctccgggtttcaatttttagaagtacaccgggccctgcaggtttaagttccgcccactctagccacgcccctttgacgtccttttccaagcccagcaagacccctaagcgcagtttctgggttcattggccccgccctcagatccaatgtgtccatctcgcccccaaggtcccgcccaccgccgctctacttcctcccactcctcagtcggccactctcgactacatatcctgcccgtacccattcacagttcgtagttacagatgtcaatcttgcctcaatcagcccctcttccaccctctcaaatcctgatatgcactcctccgcccattggtctacgcctgtcaatctagtttaccagaccccgcccaccccggctcccgtaaccgccattcttgcgttccttctcaggccacgcccagcgcaggtccccggccgggtctcccgatctacagttgtcgatctccgtaagccccgcctaacccagccctattctttccccataagctcctctactaggctccgcccctagggcactgcccatgcaagtgcaggctccgcccactaggcgcctcttccgccctggaacaaccgcctcgtagctccgcctccctaagcacgctactcgccggtcacctagggcgcgagggagggcccacctaggtcagtctccttcactgcatgaatggagcgtcaatccgctagttctaacggcgtcccgttaggaatctactatgtgttcccagcttgagaactccggagaaatctcgggttatgttgtccctggagtcccggttagagggagtaagtcattccctgtgatcaggcgcactttggacagtccttagagcgccgcgccaaaggaaagcccccggcgccaagcttcctggttgtttacgcgcgcgcatgcgcggcgcgggccgccaaatgggtcgggactctcgctcgcgctcacggtctgtgggtcgcaggggtcggaagcagcggagtcgaagccggggccggagccgcagccggagtcggagtcggagtcggagtcggagtcggagccggagccggagccggagccatgggcggagcagccgaaggcgacgggaacacgagcggcggcgcgaacgcaagcggcgcagccgagggcgcaggtgagcgtcctgggggctgctcgggcctgggagccgagggacaggcggggcagtatccgagatgccgggctgcgccggggcaaaggagacttccggggaccgcgggccatgagcataggggaccgaatgactccactcgccacctctgcattcatagacattgtcttgtcccgggctggcctcctgcgtcagcctctggaatgctcgggattacaagccattgcctcacagttaaggttttttgcatttcctcatagttaattctgctcagttgacagcccttcttctcaactggcagtacttctaacaagttgaccaaagcctaatcaggacaccgttcatacagcactggagatacaagcccgaacagccacatctatcttttactgtgggtactggggattcgaactcatgtcctcaaaatactacctggtggtattcctctttcgtggttcctgggctgtcagagagtccatctattgggcctctcgtctgtcatttctcatcccttctacctgtcatctcagcaggacttgacggcactgtacacaccagtaaccccaacacttaggagacagataagaaccagcctggctgtagagggagttcccacctgatagcattgtagatgtcatatttaaaataaaacaagcactcagaaagcagagacaggagggtctctgagttccaggacagccagggctacacagagaagccagccctgtctcgaaaaaaatcaaaaattaaaagaaaataaaaactacataaaaaagaactactccctcacttttaaccttcatttctcttgctgtattgtctgttatggccctgggacttgtgtagctctactatgaaggacagcctagctcatgtggggagcaatgtgatttacaggccggtgaggctagaattctaggcaagtacctcagcacctaggatggtgcccagcagcagccagcattgaacaggtcttgatgtgtccttcccacaggtcagattcggaaggagagcagcggcagaagtctaggaggcgaagccagagccttcgaccaccccgatggcactcacagaaccagtcctcatgctctgactcgggtgaggagcgggctcagggctcctgggcccgtaagggtcacaggcgctcgtggtccccggggtcatcagcgtctagcttggactccccaagacgctcccggagtcccgggacagctaccctggccctgagccagcagcagagcctgcaggaacggctgcggcttcgtgaggagcggaagcagcaagaagagctgctcaaggccttcgagacgcctgaggagaagcgtgcgcggcgactggccaagaaggaagctaaggaacgcaagaagcgggagaagatgggctggggtgaggagtacatgggctacaccaacaccgacaacccctttggagacaacaacctgctcggcaccttcatctggaacaaggccttggagaagaagggcatcagccacctggaggagaaggagctgaaggagcgcaacaagaggatccaggaagacaaccgtctggagctgcaaaaggtaggccggcctcgcacgcacgcacacttgcatgggagctcacatcctcttctggaggctggatgtgcctggacacacgcctctcaccatggtggctccctgtgttgctgtccaggtcaaacagctgcggctagagcgggaacgggagaaagccatgagggagcaggagctggagttgctgcagcgggagaaggaggcagaacactttaagacgtgggaggagcaagaggacagcttccacttgcggcaggccaagcttcggtgcgctcctccctggccttctattggaaactacaatctcatgccaatctctgccaggcgtggcgtgtgaactcatgagacaaatccccggggagtcccgttaagacagtgatggggatatgggatccattgtccagagtatctccgcctcactgaaggaacctgagcacagacctggtcagatgtattgaggaccccagctcaaccctattgtcccaccttggggagggccaggctcacagggccatctgacactcctatcagtctgaacctgtttggctggttggggctgagggtcagctgtgccagcggaactctggccctgaccctgccaccctatttcctcctgcagctccaagatccgaatccgagatgggcgagctaagcccatcgacctcctggccaagtacatcagcgcagaggatgacgacctggcggtggagatgcacgagccctacaccttcctcaacggcctcactgtggcggacatggaggacctactagaagacatccaggtgctgcacatacttcggtctgggtagctgtacctggctctgccctgccctaccctgccctatattgcctcagccctcctccccacacccctccttcaggccccaccgctcacagccctgccccacaggtgtacatggaactagagcagggcaagaatgtggacttctggcgggacatgacgaccatcacagaggatgagattgccaagctccgcaagctggaggcctctggcaagggcccaggtaagcagtgtgggacatcttcccagctcctctgaggcctctgcagggcatggcagcgcctgaatgctggacaatagaatgtgtctcctaaggagcctcagggaatggccgcagcccgagacagctgctatccctgtctgcagagcctcagccttcaccagggcaagcagagtctaaattggtgtgctgcccagctactccctaccaggcaggcctgttcctgagccccgggtggggagctgggaacctcaggccatgctcaacaacctgacctacaggtgagcgccgtgagggagtcaatgcctcagtcagctccgatgtgcagtcggtgttcaagggaaagacgtacaaccagctgcaggtcatcttccagggcatcgagggcaagatccgggccgggggccccaacctggacatgggctattgggagagcctgctgcagcagttgcgtgcacacatggccagggccaggtgaggctttcacagggccttggcacctgtgtcctccctgaccagtgcttctttagtgattgtcacctcagcaccgggctgcctatcccgctgcttcacccaggcccctcctcctccctacccttatacacatttctttttcctccctctgtcccctcccaatctggcaagagaattgtatatagattctgtgcatgtttggcagtggtggctgctggatgtccccatgccccatggatggcaactgttggcttgccttggttcctctggatgtcccccatccaagtagaccaagcacctcagccagttggggccacactgtgtgaatgtgccctaccaagggactgagatagtgacaccctcctttttccaggctccgtgagcgccaccaagatgttcttagacagaagctgttcaagctgaagcaggagcagggtgtggagagcgagccgctgttccccatcctcaagtcggagccctcggccgcccacaggtgagcagcgtgacccggcaggtggggcacccttaggtgggtgaagaactggtacaagcctagcaggatgggcctcacctcttccttcaccacccgtacagccccgaacctgaggagcgaccccccagccccgggacttcagtggacccagtggagcctgtggaacctgaggaggccacagcaccaggagaagcagagggggaggcagaaggggaggcagtgctgatggaggaagacctgatccagcagagcctggcggactatgacgccggccgctacagcccacggctgctcacggcacacgagctgcctctggacgcacacgtgctggagcctcacgaggacctgcagcgcctgcagctgtctcgccagcagcttcaggctacaggtaggggctggcccagactggggaccttgtcatggcgggggcagggatgggtgtgggcagccccaggtgacccctctgccctcacaggtgatgcgagtgagagcgctgaggacatcttcttccggcgtgcgagggagggcatggggcaggatgaggcacagttcagcgtggagatgccactgggcggccgggcctatctgtgggccgacaagtaccggccgcgaaaacctcgcttcttcaaccgcgtgcacacgggcttcgagtggaacaaatataaccagacgcattatgacttcgacaaccctccacccaagattgtgcagggctacaaattcaacatcttctacccagacctcatccgtaagcgcgccacacctgagtacttcctggaggcttgtgcagacaaccgggactttgccattctgcgcttccatgcgggaccgccctacgaggacatcgccttcaagatcgtcagtcgtgagtgggagtattcgcaccgccatggcttccgctgccagttcgccaatggaatcttccagctctggttccacttcaagcgctaccgctaccgtcggtgacacctgtgggctgcctgcccctgtcaggctggcccctggacagctcccaggtgggaaggccaagaggaccaggaggcctccttcagaagccgtaggaatctgtggacttcagtcaccagcactgtgctggccgcagcccctctggcagatccctgcctgtcctgaaaggatttttaactgttcttgggaagactgcttggggtggcagaaaggtcttgtttccatggacttgttcaaccggggaaccccgtgtggttttgatacatttaatagaaagcttattctaaactggcttctgatctgagtcacagggcagataccacacccagatggctcagggaattggggtcaggactcagggtcttctctaacaagaccactgccgtctggggagacatggctgtcaccactggggtgggtcattgtttgcacccagtggaggccaaggataccaagtgtcacccattggcgaggctgagaggccaccctgtcatcccagcccctaaccccatggaatgtagcaagacacacacctgtccagataggactatactgcagcccaaaagtagccctgtcctgttagcccagggaggtgtgactaatggcctctgccgtggacactcactcatccccaaaagtcccaccaggacagagctgggacatctgagcttaggagatacttgtatgccttacacagcacatagcatgttgggcctccgtttctttacctgggctacaaggggtccatcccctcccccactacactatgaagtctccggcctgttggcttctcctgtgtgcagggtcccagcttgcaaagaggcagaactggggaaggggatgggggcatgcagctaagggcatcctgaggtgcccagcgttggagagcaggccccgccctccggaagggggtccagccatcccagggcactgaggagccataggtggtgaggcgggcatggatgcagacccttgctcagacctctcccaatgcacacaggactctaaagtcccggaaactgcctccagctcccacgccagttgtttccttcctttggctgtgtccatggctaagaataggccccatagcctggcccccagcctcggcggaagccacagccacagggggtacatcctgagcctcagctcccacaccaacccagcatccttgagcccaactcctgtccttgactgtggttgggagccttagcaggaaactgcagctccgggcctcacctgatggtcttgtgtgggctctacatcacactatgtttctgcctaagtttcaccatgcattctgagctctgtcacctccacacaacaaagatgagtgtccttcagccattacctgattctccagaccaaacatatccttatctcaggtcaagggacagaggaagaacatacaaccacctctctgtttcatccaccccaacccatccacatcaagagcagcctcagatcctcttcccaccacagctcctcaccctcaccaccaaacattcctgccaggacacctaggcagggtttctctgtgtagccctggctgtcctggaactcactctgtagaccaggctggcctcgaattcagaaattcaccagcctctgcctcccaagtgctggggttaaaggtgtgtgccaccacgcccggcttttttttttttcttttaagatttatttattattataaataagtacactgtagctgtcttcagacgcaccagaagaggccatcagatctcattatgggtggttatgagccaccatgtggttgctgggaattgaactcaggaccttcagaagagcagtcagtgcttttaccggctgagccatctcaccagcccccgaaaaaacccaatcttcataccccttacacccacagtattgatacctagccaaatgttgagaaggtaaagacatttgttttgcctcagcagcctgagatcagaaacgtgggatgatctgtgtccatttctgtccctagcttatgggatggatagacagggcaggcccagctaggaaatcagaggaactacaaacttcacgggggtagaggccagtcagggtcaggacctagtgttgggatgggtgggaaggcaggaagggtgggggtggtgcagcaggcaaggggcttcctgctgctgacaagagtctggctgaccctgggcagactatggaactgggagttgagtcacagccaggccagggcatctcaaatccccaccaggacctgtcagggccaaagagacccaaggtcacctcctccacgcaggcccccctcctccagctactaggcacaggactaacacccctgcctggctcagtcatcctgggcaactgtcagggcttcaggcagtgagtctgcaggggagggttccccaagactgctccatctctagaggacagcctggtctccgaccttacacctcccctaccccagccctctccttcccctccagctcttggtccctgcagtcaggctggagctggccttgctgacccaatatccctggaaggctcctggacagccttggcgaaggttagttgctgctgtgtcaggaccagccccatttggcctcccagctcttcccacatggcctccctctgggtccctgacctttcaacaactgatgtctctctctactctgtcacccttgtgccctgcttggttcccaccctagcggctgagaggcgaggccagcgccagcgcagggggtggggctgacgagagtcggcagaaagacagatggagacagggcgggacgggaaacagcctcacagtcccatccctccagccctggacgcctgagggtctccagtgctcccctgtacccacggccccagggcttctgttggggcctcccctcaaccaacgtgacttggtttccccagggaactcccctacctgctctctctgcctggcctggaacaccacagaggacacctaggtacaaacagcacaggtgagtcccttgcctccctactgtgactataccactgtacccaggtaagcctctgcatagatcctggggaacccagatccactaacaaccctgctgtggcctgcctacaggggggaatgatagcaaccaggtgccaaagttccctgaaggggatcctgtggtgtgacatttactccggtggtctagcctgggcaagtgcagtttccctggtggtacgtgggtacactggtttcctgtgtctgggtgaggccagtccaagatgctgtggcagtgatgaagttgggggtgggatggaatggagctgggagctacagtgtgtggcttggagctgggcatggtgattgtactcacataggctcagctcagaacctgggtcacatctcgatggcacatgtcctacccagagaggggcatccatccaacatgccagaaaacaggcctcggggcccctcccccagcccactgccacaggatgacacctgcaccctggaactgtggcacaaacaggaagcaggcagtggggggaacagcatgcggtgaaggtgaacctgagtctgtggggttgtgggcatgcacactgggtatttggggtgctggcagaacagcccactgggcacagctgcggccaaggctcagcctcaggagctcataagcagaaagtcaccagggaaggcaaattcgttacacggggaaaactgaggctgtgtagcgtggctatgggtgatggaggtgtggggagcccaggctgctctgaggcctggtgggggaggcttgttgcagatggaggagttgggagaaggaggaggggcctagcctgcagagcccagccacacaccacattccaccaaggctggaactcagccacccagcctgggcctcaaggaatgagctctagcgtcccagggcacacatatacaaggatgaggccccatcctagacagaataccactgccttccacccccaacggtgggaacatggctcaggaacgcaggaccatcccacatcccagggactcagggtgggagggttccagaatccttctgcttcctggtgtccaaagctggggtgtggtggcctgtgcctgtcaccccaacagaagctggaggcagatggagctcagtgagttccaggccagcctggtctacacagagtctgcatgaggacaaacagaattcctgagccttgaaattcccaggcccaaagctccctgctccaaagctgtggaacctgatggggcgcagagacgccaagtaagtctcctgagaccacacagcatgggctgctggccagcgtgggaggctgccaggtctgcctcaagtctcgcctaggcaacttgagctcaccattatcacttgaaccccaggggaggaaggaaggggctggaaaagccatccctccttgatgcttgtctccaaagagctggcttgtgagggacctggtggccttggtgaggctgggtcaaggactggacagagcagggggctgaccaccaatgacgcccaccttgagaaagggagcatatgagtcctggcactgaaactcagagataggcagagcacctcagaggcagggctatgccatccaccaggccgcccaccctgacctcatccctgagcctcaggttcatccctggatcttcctctggatggtgcaggcccagccaggcagtggtctgtagtaaggcctcctaaggggatcgtggaagcagcacctactaggctgcttatacctgcatggagcattctgggttgcataaattaaacacctactgtgtgccagatgtaggtgccagaaataattgttctcagcatcagctgtctttaccagaagaaaaactgaggctctctgtggggatctgggggcaagaacagatgatgcatcccaaaccttgagtggccaactgttaaaaccctggagctcaatgggagggaagaagggtctggaggtggggagggagaaagagaaagccaagggctagctatgtggctcagtgggtaaaggtgattgcagccaagcctgacagtctgagttcagtctcccaagacccacgtggtgaaaggtgagaactaatacccactaagtgtcctctgacacacacacacacacacacacacacacacacacacacactggactgtgcatgtgcccttgcacacccccacacgtaaatgaatgatgtgaattaaaaacaaaacaacaacaacaaaaaaaaaaaaaaaaaaaaacaaaaaattaagaaaaaagggcaaacatggttcacaccaagaatctgaggcagggaggatcagcatgaattgccagcctgggctgcacaggaacactgggtgactgtcagacttaggctactgcctgtctctggtctctggccttggacttgtctggttttctttccttttctttccttttcttttcttttcttttcttttctcttttctttcctttccttttctttcctttccttttttttcttttcctttcttttctctctcnnnnnnnnnnnnnnnnnnnnnnnnnnnnnnnnnnnnnnnnnnnnnnnnnnnnnnnnnnnnnnnnnnnnnnnnnnnnnnnnnnnnnnnnnnnnnnnnnnnnnnnnnnnnnnnngggtccttccgtccttcctgtcctgtccttccttccttttttaaaatctccctgtgtaccttaaattactgcctcagccttctgggtgttgcaaaggattttgttgttgaacagtctcactttttacgcaacctcggttctgtgatgtttgtctctgcatctccccgaaaacccccgcctgtctcacaccaatctctgctggaatcccctctcagccgccctgctcccccaacccccccagccccacaccggtctctgctggagtccttcccggggacatgccatcaggctgttttttcattcccaaaatggagcaggaacttctgggtccgtttcttattataaaaatgacgtcagaggagaggaggaacagcccacacccacacccatccagtgggagtgtccgggcaggtaccaaaccctggccataacgagtgtccccacaacctcacaggctagatggatgacagatagggaaactgaggccacacagtgagtacaaggactggaactccaacctggagtgcagggtgtcagaacacatctttgtcatttcagctcctcagaaggttgaggcaggactacttaagagttccaggctgagctgggcgtggtgtcgcacgcctttaatcccagcaactcgggaggcagaggcaggtggatttctgagttcgaggccagcttggtctacaaagtgagttccaggacagctagggctatagagaaaccctgtctcaaaaaaaaaaaaaaaaaaaaaagagttccaggctggctgggccacttcatggggtcagaagcagtcgcaggaccaacagtgatccggcagttgaaggctgcctcaaagaaagggtattttgttcctgaggcattgaagtctctgtaggagttctccataggcgctcgagtcccactgagcagcccaccttgtcttccaggtgcgctggaatcagcgccagcccaacgtccctgccattggtgtctgatggggtgctgaccccctcgccgcgtcaggcttaggagccatgtggcccaatggcacctcgctgggggcctgctttcgcccggtgaacatcacgctgcaggagcgacgtgccatcgcgtcgccatggttcgctgcgtccttttgcgcgctgggcctggggtccaacctgctggcactgagtgtgctggctggggcgcggcccggcgcgggaccccgctcctccttcctcgctctgctgtgcggccttgttctcaccgacttcctggggctgctagtcaccggcgccatcgtggcgtcgcaacacgctgccttgttggactggcgagccactgaccccagctgccgcctgtgctacttcatgggggtagctatggtgttcttcgggctgtgtcccctgctcctgggggccgccatggcctctgagcgcttcgtgggcatcacacggcccttctcacgacccacggccacatcgcgccgcgcctgggctactgtcgggctggtgtgggtggcggccggggcactcgggctgctgccactactggggcttggccgctacagtgtgcagtaccccggctcttggtgcttcctgacactcgggacacagcgcggtgacgtggtcttcgggctcatattcgcactcctgggcagcgcgtccgtggggctgtccctcctgctcaacaccgttagtgtggccacactctgccgggtctaccacacgcgcgaggccacacagcgcccacgggactgcgaggtggagatgatggttcagctcgtgggcatcatggtggtggccacggtgtgttggatgcccttgctggtgagtcgtccccgccctgcccccgccatcccctcccccacgccccccagcaacatgaggaccttctttagttgtatctcaggagaagggcaatcctggggttcaggtctttggggctttaggaatctgcaggatgtaacaggaaagactttcaggtgttgtgtgttctaaagtagggctttgaaggatgaataggagttcacctgctagacaatgttggggaaagcattctggccggaatggctggatagtccactcaatattgctgtgttccctggcaccacatagactccaggcttgtatagatgtcctcctgggaggttagagcccagctgataggactttaacgtgggcacaggtttttgttttgtctttgccttgttccgccagcaaacatttattgtgtaccatctgtatccaggctcccctagcacaaaggcgactttcctctgggagagaggaggtgtgtggttcccaggctccaaggtctgtcccaagctgctggggcaatttgactagaccctatctaaaataaaatgtagccaggcgtggtggcgcatgcctttaatcccagcacttgggaggcagaggcaggcagatttctgagttcgaggccatcctggtctacaaagtgagttccaggacagccagggctatacagagaaaccctgtctcgaaaaaacaaataataataataataaatgtaaaccgggcatggggggcacacacctttaatcccagcactcgggaggcaggggcaggcagatctctgtgagtttaaggccaggctggtctacacagtaatatcctgtctcaagaaacaaaagaatcaataagaaggagcagttgttggagactggcttagggtagattcctgcctcagtaagtccaagtttgctttttttgttttgttttgtttttttgagacaaggtttctctgtgtagtcctggctatcctggaacttactctatagaccaggctggcctcaaactcagaaattggcctgcctctgcctcccaagtgctgggattaaaggcgtgcgccactatgtccggctcgtccaagtttgctttctaaacctcagtccaagtaggacgtgatgagctcaaagcctgtgctcattcctggacccagctgtagcagcagctcagaggttgccccactgctccagggtcacacagtacaaccctctgctcctgcaggtcttcatcatgcagactttgttgcagacaccacctgtcatgagcttctctgggcagctgttgcgggccacagagcaccagctgctcatctacctgcgtgtggccacctggaaccagatcttggacccctgggtctatatcctctttcgccggtctgtgctccggcgcctgcatccgcggttcagttcacagctccaggctgtgtccttgcgccggcctccagcccaggccatgctcagtggaccctgaaggacagtgccacttaaacctggggtccttggtgactgccattgacctgtgccctgccccaggagcctgagtgcttggtggactaaggacggagctacgacatggggctgactcctgtgaactgcaaagatacctcctctatgctagagaggtcctccctgaccctctccccggactactccctgtcagccaggaggctgggggcacatgtgggaggccccctggcaggaatctaggattccacagggaaaacctgggatgctggaggtgtcttcccccttgccagcatctgagtctgagacacagggcttcacattcctccaggctcacaggtcaccagccttgggtgttggaagcacccactctgttccctgtagctgggttcaccaacctctccagtgtttcctgagcccccttgctccatggctgcctaacacacatgctcaataaatggttgaatgtccagattctggagcactcccctaagcatccctgtgtccattcgcctccctcccccgcagctccaagaaaaccacagtcaagaggagactggcggctgtggaggtgcgggctcctttattgcccaccaagatctcctaggagcctcccacccctatgccttctatggctgggtcctcttacaggggctttggggttcgtagccaggtccctgaaacccaagcttcagtttctaccatcctgtaatcctgctgggatgagtcaagtcacaggctggggtgggggagggacccagacccaggggaggggctaggagtgatgcatatggtgggggggttgggcttctggcatcccagctggggcttgggcaaaagggctggcttctggggagtgtctgggcctggtgacccagggcccaggagagagagtgaggggcctggcctggggcccgctgtggcctgggttccatcttgaggccaaggcccagcgaccttgctcggggcaggggtgggggctcttggggtcagtgggcttggagactgaggtcgggtcaggggcttaggctcctttataggctgaaggccaggggtctgtgggcggcgactgtctctaaagctgagggggcgggctactgtgctgggctgacttccagaagtgtcggggctggggctggggctggggctggggctggggctggggctggggctggggctggggctggggctggggctggggctggggctggggctggggctggagtctagccgggttctggaactggaatccttcccagcgctgggctgggctccagtgcgtgatggaacctgaagactgacttgggttctcgaggctgagtgggctgcagagccaagccactgccctgtgttctgctgggggacacagctggctccagttgtcaccgagtgctgttttctgcctccagaactagagagggacctggagctgggctccttctctgtcaatgactgtagctgggaccttcgatgtctggcccaacctacgtaggctccggagctaggccaggcctggaagtcggtctgggtcccagagtcggactgtgtcctggagcctgcatgccatcttctgggtggagtggggtcagcactctgagacaaccctaagctgggcctcgatttgggagtgcatggcatttgggggtggggctctgctgtcagagccttcctgctcctgcccctgggctgagcctcagagtcagactcatcactggggctagcttggggttcagggctttgggaggcactggtaggtagctgtgctggggaacaaggctgaggtttgagtttggactgggtagcagtatggctctgagtgcctgcactaggcaggggtgtggaagatggctggctactggagcctacttgggtttcatcagtcagcggctcgctggaccttgcttggggtcccaagcaagcccttcttcctaaaccactccaagtctcagggaagggccaggccatggtggtggctgtctcatacctgggctggctctcagaacctggcttctgagactggctgctggggtggtgctctgagcccagctgtctcctaacatttgtctggattccggagtgtggctgtgggacggggcttggctgcattctggaaggctgagggtcagccatgacctgggctgcagcatcagggttggtcccaatgtctggctgggctctagagcatggtttcctatctgggtggatctgtgttctagaaccaagcccactctcagagcctgactgtgttctggaagtggacttggtctccaagcagaagttgacctgagggctggcttgggttctaagtcgggcatgagtgtcagaatttccctgggctccagaatggggtgtggcctcaaagcctggctggacctcagagccaggctgggttctagggatgggttggcagtcaggttcaagatgagttttagaacaaggctcaggcctggggctgctctgggttccaaagccagcctgagcctcggagctgacctgtgttctggagtcagactgtaccccaggactaggctgggatctaaaggctggctggacttcagaaacaagggttacagaaccaagctgggccttggggtgggcctgggtcacagaactgggttgggttctagagttatcctgggcttcaattttggttttagagcaggactggaattcagggccgaccagggattccagctgggtctcagagctgagctgggtgctagaatcaggctgggccttgggatgggcctgggtcacagaactggctcgggttctagagctgggcaagacatcaactttggttctagagcaggagctggccttggggctaacctgggttccagaaccagcctggaattctgactgggtgctagaaccaagctgagtctcagggtgggcctgggtcaaagaactgggtcgggttctagagctgggctggacttcagtattggttctagagctggtctggccctcggagctaacctgggttccagaacagggatggggttctggctggctcttagagctgaactgggtgctagaaccaggctgggcctcagggtggacctgggtctcagaactgggttgggttctggtggcgggccttgtctcagggctgtcctgggatctggagtggcgttggggcaaggggctgggcccaggactggagactcccacacacgctagccacaagcgtcgtgggcctcgccgatagctgcccacacctccaccacgaactcgtctggaaaggcgaactcgcccagaacggcgtccaggccgcgtgcgaaagcctgggctcccgccgagctccgagcagtctccaccaccgcggccgctgcgggaccagacagacagagggacaggatgcacaagcaaaagagatggaagggcagacggaaggacagggaggacagacagactgactgtgagctccggcgcatgcttccacctaccaccctcccgcgccggggaccccgcgcttacccgcgccgcttacccagctcggggtctcggatgcccatgtagctctccagcaggtcgtccaccctgcgcgccgctgccgcttccacatcgctgggctgcggataggtgaatggcccagtggatgagtgacaggctggagggcccgccccaagattgatagactattagtggttcctaggggtagggggtgcggaaccccgcttctgagaattgacagagttgtggttgctggaggtgacgccttcccgattgatagtggggagggcctgggtgactcgcccccaggagtgataactaaagggataggagacactttcttcagtggtgtagtggatggtctgtgccctgacacaaaccatgtgtcattatgaagaggtgagaggaggagacagaggtctgggtggaagaggtaaggagatgagagattgggtgatggatgtacctgaacacacttgaagaatcagacaagacacacattacctagtccagttaatacacagaattccacctctcaaggcgctccgagcgcttcgtgagactctcgtctcacaggcatgaggaactgggtttgagctctagaaggctctaaaggtggaagtgagaactgctccccacatgtcctctgacctccaccctcctgtccacgcactttccaaacacgtgcacacacaaagtacacaagcaaaatataataaaacaataaagaaatgccatttaaagatttaaaagctgggcatggtggcgcacgcctttaatcccagcactcgggaggcagaggcaggcggatttctgagttccaggccagcttggtctacagagagagttccaggacagccagcgctataacagaaaaatcctgtctcaaaaaacaaaacaaaagatttaaagttggagctggacatagttgcacagcacacctttaatcccatcacttgggaggcagaggcaggtggatttctgagttcaaggccagcctagtctacaaagtgagttccaggacagccagggctacacagagaaacactctctcgaaaaaacaaaaattaaaaaaatgataataaattaaaataataaaataaaagaaataaaaaaagatttagggctggtgagatggctcagtgggtaagagtacccgactgctcttccgaaggtcaggagttcaaatcccagcaaccacatggtggctcacaaccatccgtaacgagatctgactccctcttctggagtgtctgaggacagctacagtgtacttacacataataaataaataaataaataaataaataaataattcttattaaaaaaaaaaagatttaaagttgggctggagagatggctcagtggttaagagcactggctgctcttctgaaggtcctgagttcaaatcccagcaaccacatggtggtggctcacagccattcgtaatgagatctgacgccctcttctggtgcgtgtgaagacagctacagtgtacttacatataataataaataaatctttaaaaaaaattaaagttgaagccggcagtggtggtacacacctttagtcccagcatttgggaggcagaggcaggcgggtttctgagttcgaggccagcctggtctacagagtgagttccaggacagccagggctacacagagaaaccctgtcttgaaaaacaaaacaaaacaaaacaaaacaaaacaaaacaaaacaaaaattaaagttggggagtaagaaagacacagatattgacctttgacctctgtatgcatacacacagtgcaaaaaaataaccaataataataagttagaggtcacgatggtccctcccgctccttcgccaggaacaggtggcacccattggactctgtgatcggagctgttcctgttgtcctattctccaaccggtacccactgcacaagctgaaaaactgcggctctgagaacagggtctattcataggttcaggctagccttgaacttgtgaccatcctcctgcctcatcctcctgaatgctgggatgaccagccttatcaccattagcactgtgggcttgacaagagggtgtcaattgctgccatcccaacagtcactcaccgcctcctccacagtggcagccccccctgagcgcaggcgtaatgtttccctcccgctgctcactttagcttccacaggacacttgctgctcctgctcctctggccaatcatatctgagggggcaaagcggtgacagatgtgtcctgttttgtgtggactgtttttcatgtttattttcttttgtcaatagggtcttcttctgtgacccaggctgaccttgaactcaaggttggcatgccttaatctcctgagggctgttgaaggactatggggctacgggtgtggtcagggggtaaagtcccatctaaaaccccccagtgagggacttggggcgtggtcagggtggagcccctcctagaatcctccaatgaggagataggggcgtggtcaggcatagagcccccacctagagtcccctattgatgggttgtgggtgtggtcagggtggagctccgcctagaacttctgtgaaggagctgcgggcgggcgtggtggtggaggttcaggtcctcccctcccttaggatcctccagtgaagggcttggggtgtggtcagggttggagtcctggaggtttatattattctttccctaagagaccctgctgagtgatgtctggggacatgtctggctatcctcccctgaggagctcctgacaaagagtaaggaacactgctcagcaccctgaagagcccgggacactacacagaaagcaccccaaaacggtgcggtgctcacatcgccaagtttgaataacttttctagaagcaaccctcctttctcgaagtcattgcaaagcaggcccaaggtcatctttgggtacatattgagtttgatggcagcttgggctatgaaaatatgagtcagaataccatttcctgcttctcattgccctggggcaagcctggggcccatcaatccttaccaaaagctctccggggctgcactagacgcagggtgaagggctgagacttgggcagctcccggagcattttagccacctcgtagtgccggcagcccacaatagagtggtcattgatggcctcaatgctatcccccacgcacacagcctcaatccggttgataatgctgccttccttgattctctatgggaaatgacaatcactcgtgactagtctgcccggggccaccctccctggggtccccagagtcttcttaggactcgacaaggccattgatcacccagttcacacacacccacaggcaccttgatgaaggcgtatccggctccgttgtctgtgatggtcagtcctagagcatcctccgttttggtgacctccacttctttggtctctccacgcacatgtgcaaagatgaagtcttccagcccaatctgtccccccagcaacttttgcatgtccactttgtgactgttgagggtgcagaataggatctgttcggataagagagggacccagattgagccatggacaaaagtcgattctgtgcacatccttctgcgggcgccccctggaggccagatgcacccgtggcccgcaggaaacagcagctgcccccagcctctaactgctcaccggtgaccaagtgggctggcaagactgtgggtgtgctttaggtctgtctgttcctaagcaggaacttaggaagctgaggcagaaggatgactgagagtctcaggcttcccaaaaataaaaaataaaaaagccaagcatcctgaatcgggagtgtaagcccagaagtcgggaagccaaggcaagggaaatgctggaagttagaagccagcttgggttacagaatgaatttcaggccagcctgagctacaaagcgaaatattatcttaattagacgaacaagcaatggaatgaaaacggacaagagggctagagctcagcggttaagagcaccatctgcttttctgaaggtcctgagttcaaatcccagcaaccacatggtggctcacaaccatctgtaacaagatctgatgccctcttctaaagtgtctgagacagctacacagtgtccttacgtataataaataactaaatctttaaaaaaagaaaagaaaagaaaatggacaagaaggctggagtcaggagggagggagggagtgggaggggcttgtggccagtctgccaagtcctgaacctgtttgattctcaagggctgcatgtggaaggagagtactaaccccttgcaaactgttgcccaacctccaccgtggtgcccactctggtgcccctacatataataaatcaaacccacactaagtgggtggcccacacctttaatcccagctctctagaggctgcagcaggtagatttctgtgaatttgaaatcagactggtctacagagctagttccagaccggccagggctacatgatgagactgcctgtcttagaaaaacaaaattaaaagaaagaaaacaaacaactgaaagggaatagtagaaataattgagttgaaaaaaattaaaagtgattttattttatataaggcctcatgtagctcaggctgaccctctagtttcctatgtatctgaggatgaccagcttaactctcaatcctcctgcctccaccttcccagaatcggaataacagactttacatcactacacctgctttatcctgtgtcggggatggaaactggctttccaaaccctaggtgactgctctacccactgagctgattgccacccattagccattcatgggctcctgacacctgggtcgggtcctcggcggctatgggaaccccactcccagggtctgatcctgtctttcgcgtggagtgcagacaggatcctgggtggtgtccgcggtccaccctcacctcggtaggagcgatgccgaaggcctcggcgatcttggcgtaaagctcgcggacattggtgaagccctcgatcctgccggtcggactgccgtgcgccagctgcgtgcggaacactaggcgcgggcgcgcgcgggcggggggctcggtggccccgggctcgcggggcgcagcactgtccatggtgcgtggggtccgccgcgtcctgagcctcccgccggaggtcccgcgacagcggagccgggcgtaagcggatccgggaacccgagccgcccgggggaaggtgaaaccgcccgccggggccagccgcgccctcccccgggactcgcgaacaacagggggaggccccgggctgtgggtgctgcgtccagtcttggcctcccggggagccccgcccgtcctccccttctccctcctccgctccgcacacagcccaccgtccatgtcagcggtcttcccgcagcccccgaccctgtctgtgaactccgtgccttgtccctctgtctatctggcctcgcgtgcctccttccttgccctacctcagggtccaccctgcctcagggctcttgcacaagctgggctctcctctggggctcagtccccagagctcccagtgagttcctgctcacctgtttattttaaagaccacctgcggcccctacctccaaatctctcccttaataatttttgttttgtttttgagacagaatctcatgtagcccaggttggcctggaactcactatgtacccaagggtgaccctaacctcctcctgatcctctggcgtcagactccccaatgatggaattaaagttgtgtgcactacccctggaaaaataattgtcgatagccaggcagtgagagtgcacacctttagtccaagcactgggaaggtagaggcaggtggctctctgagttcaaggctagcctggtctacagagcgagttccaggacagctagggctatacagagaatcctctctcaactcagcccactctcctggcaaaaagaatttttgttaagaaatgaagaccagggctggagagatggcccagcggttaagagcactgactgctcttccagaggtcctgagttcaattcccagcaatcgcatggtggctcacaaccatctgtaatgagatctgacgccctcttctggtgtgtttctctgaagagagcaacagtgtactcacatatgtaaaataaataaataaataaataaataaataaataaatctagaaagaaagaaagaaagaaagaaagaaagaaagaaagaaagaaagaaagaaagaaagaaagaaaggaaggaaggatgaccaaaccactataaaatgctactttttcagggatccccaggtatgtggtgggtgaagtggggtgtgcaggggtcaatgaacatctgaggctgtttgtgtcttctagattcccacgacagagtgtcacaacgtaggtgacttaaaagaggaccaacaacggaaactggagggatggttcagtggttaaaagcactggccagtaactcacctccaactataattggatctgatgccctcttctggcatgcaggtgtacatacagagagagtattcagagagagagagagatctgggcataaggacacccctacctggggacgtggaggatcaaggtcatccttgacacacagtgaattccaggctagccttggctacatgagacattgtcacaaaacaaaactcagatgaacttaatccttcctcagttgataagtggaggtgctcccctctctcccggggctgtgggaggctgtcttcgactctggcagtccttgactggccttggcccacaggcctgttgtgcagtttctgcctctgttgtcactaagcccgctcctaggcctgtgttaactttcctgttctcaaaatgatactcgctgctggcatagtgcccactctaccccaacatgacctcactcaagttaatctcactgttttcctcctgattcccaataaggccatgcctgggggttctggggtgaggacaggagcacatttggggggatacaattccttggcacagcatatgtgtgctggattgggaagttttacaagatattct

SEQ ID NO: 395 - DNA, 1760 bp, Mus musculus
gtcccatccctccagccctggacgcctgagggtctccagtgctcccctgtacccacggccccagggcttctgttggggcctcccctcaaccaacgtgacttggtttccccagggaactcccctacctgctctctctgcctggcctggaacaccacagaggacacctaggtacaaacagcacaggtgcgctggaatcagcgccagcccaacgtccctgccattggtgtctgatggggtgctgaccccctcgccgcgtcaggcttaggagccatgtggcccaatggcacctcgctgggggcctgctttcgcccggtgaacatcacgctgcaggagcgacgtgccatcgcgtcgccatggttcgctgcgtccttttgcgcgctgggcctggggtccaacctgctggcactgagtgtgctggctggggcgcggcccggcgcgggaccccgctcctccttcctcgctctgctgtgcggccttgttctcaccgacttcctggggctgctagtcaccggcgccatcgtggcgtcgcaacacgctgccttgttggactggcgagccactgaccccagctgccgcctgtgctacttcatgggggtagctatggtgttcttcgggctgtgtcccctgctcctgggggccgccatggcctctgagcgcttcgtgggcatcacacggcccttctcacgacccacggccacatcgcgccgcgcctgggctactgtcgggctggtgtgggtggcggccggggcactcgggctgctgccactactggggcttggccgctacagtgtgcagtaccccggctcttggtgcttcctgacactcgggacacagcgcggtgacgtggtcttcgggctcatattcgcactcctgggcagcgcgtccgtggggctgtccctcctgctcaacaccgttagtgtggccacactctgccgggtctaccacacgcgcgaggccacacagcgcccacgggactgcgaggtggagatgatggttcagctcgtgggcatcatggtggtggccacggtgtgttggatgcccttgctggtcttcatcatgcagactttgttgcagacaccacctgtcatgagcttctctgggcagctgttgcgggccacagagcaccagctgctcatctacctgcgtgtggccacctggaaccagatcttggacccctgggtctatatcctctttcgccggtctgtgctccggcgcctgcatccgcggttcagttcacagctccaggctgtgtccttgcgccggcctccagcccaggccatgctcagtggaccctgaaggacagtgccacttaaacctggggtccttggtgactgccattgacctgtgccctgccccaggagcctgagtgcttggtggactaaggacggagctacgacatggggctgactcctgtgaactgcaaagatacctcctctatgctagagaggtcctccctgaccctctccccggactactccctgtcagccaggaggctgggggcacatgtgggaggccccctggcaggaatctaggattccacagggaaaacctgggatgctggaggtgtcttcccccttgccagcatctgagtctgagacacagggcttcacattcctccaggctcacaggtcaccagccttgggtgttggaagcacccactctgttccctgtagctgggttcaccaacctctccagtgtttcctgagcccccttgctccatggctgcctaacacacatgctcaataaatggttgaatgtcc

SEQ ID NO: 396 - protein, 335 aa, Mus musculus
MWPNGTSLGACFRPVNITLQERRAIDWFAASFCALGLGSNLLALSVLAGARPGAGPRSSFLALLCGLVLTDFLGLLVTGAIVASQHAALLDWRATDPSCRLCYFMGVAMVFFGLCPLLLGAAMASFVGIWFSRPTATSRRAWATVGLVWVAAGALGLLPLLGLGRYSVQYPGSWCFLTLGTQRGDVVFGLIFALLGSASVGLSLLLNTVSVATLCRVYHTREATQRPRDCEVEMMVQLVGIMVVATVCWMPLLVFIMQTLLQTPPVMSFSGQLLRATEHQLLIYLRVATWNQILDPWVYILFRRSVLRRLHPRFSSQLQAVSLRRPPAQAMLSGP

SEQ ID NO: 397 - DNA, 32229 bp, Homo sapiens
aaggcatgagtgactgcatgctttttctttttaatttttacaaaattaaagtttttttattatttctgtaggttattggggaacaggtggtgtttggttacatgaataagtttttttgttttttgagacggtgtcttgctctcttgccaggctggagtgcagtggtgtgttctcaggtcactgcaacctctgcctcctgggttcaagcaattcccctgcctcagcctcccaagtagctgggattacaggcacctaccaccacacctggctaattttttgtattttagtagagacagggtttcacgatgttggccaagatggtcttgatctcctgacctcgtgatccacccacctcagcctccaaaagtgctgggattacaggcgtgagccatcgtgcccggccgtttacatgaataagttctttagtggtgacttgtgagattttggtgcacctagctttttctaggaagttctaaccctacaggaggttgtgcagtagaaaacgggtgtcatcccagctcagcttcattagcctcccaccctgtgtagggcctggcctttcccccacgcagccccagggcccttggcctgcacccccagcctctagcagctgctgggaccccctaaacccccgggcccccttgtgggcattcgggaggcatccagacatgcagcagcatgtccagacccggctttctatagacgctgacctggcggcacctggcctggcttcctgggagcctcgcggctgggctcttctgcttgggtttcagtgttcgtggtagccccgcctgtctgggcacggccgcgctgtgcttggctggggctgccacggattccagtgccacttagcgcccagcaaaggggctgcagctctgggtgccgattccagggtcccaggtgattggctggaggggactcgggtccgtctagactctatccagtcccctgtggtgtaggtgtgggcctcttgaccctctgtccgccagcggggactggagaaggcaggtctcgagcagggtgcctgcactggtcacccccgcccagtgtgtcaccagcagctatgcaccaagctccctgtgggcccagcatggcacagggaacagcagcagccagccccattgcccgcctcgggaagctgccatcgctggatggtcagggagggcttcctggcggaagggatgttctcactgagcatggaggatgcgaggaattcaggaagcgaatgggacagagaaggatgggtagctggcaggaagcacagtgcgtgcaaaggcccagaggtggcaggggttcggcatgggcagcaaggggcagggttgcgaggtgaggccagacccagcggggtgggtggaagtggcctgagagcagcactgaggccgccgggatgccacgtggtgtggggcagagcacgcggagtcaggctaggctccagcctcccagcaccccactcccgccctcagcagcctccccgtctatcgaggagggacttgagcctcgggcccctgggccagtggtagatgccagacagactccatgtaggatggggggcggcggtggggagctgtttgtcctggggcgggcccaggacttccccaggggccagcagggtggccttctttgctaggcttcacagagggaaactaaggcccagaaagggcaggccacttgcccacagtcacacagcccaggctggcagagaagatctgaattccagagagcctggctaccgagcacaccccccaaccccctcatggactgcccaaggccagggcagagttgggccaggttggtgggccgggcccacaactagggttcccagacccacatatcagactcacctggggaggggcattctcagggccagtcctggcctcccccacgctgggggcctgggcctccaggtcaaggcctcagcaactgcatcttaacgtggctcccaacctccgcccaccccctcccctccgctgtggccagggtggggacaacctgagaccagggaggtggcgggactggatgggacccctgtgggggaagaggaggggagggggacccccccatggcaggggaggaggccctgatggggtggaggagcacgtaggaaatgtggaaccgcccccccatgcccccaccccgctgcaggtgagcgccgcgagggggtcaacgcctccgtcagctctgatgtgcagtcggtgttcaaggggaagacatacaaccagctgcaggtcatcttccagggcatcgagggcaaaatccgcgctggtggccccaacctggacatgggctactgggagagcctcctgcagcagcttcgtgcccacatggcgcgggcccggtgagcactaggtgcgggtaccagggttggtgccgtccgggtgggatgggtttcgccccctcctgagtcctgggtggggtgggtctcgcctcctcctgggaccatgtggggtggagaggggcaggaaagtgccgactggccggggccagcctgtgagtgacgaaggggggccggggggcgcgtagtcccgtgccctagcgggaaggccccaggatgctccagtgccctcacctggagtcagccctgttggtctcacagggctccccaggagcttccgccctttaacgagtacctggcgcgctccagcagccatggcatcacaggaagcccccaggcggcctgcctgtccccactgccttgcgcccaggcctgcgccctcccagcgctgctgcctcccggcctctggctgtgtacagatttctggagtgtttttggcaccgctgtgtaaatacatgtctcctctgctaatttgtaaatgtctctaaatttatcatgcttgttggctggtgtcctgctgggccccttctcctggccagccccagccacaagacactgagactgcagcgtgagacagagacccacctctccctgccatgggatggttcaccagggtacctgcgtcctctcgtcctctctcccataagccttgaccctgaactgaccaagcctgggcaaaggtcccagccagagccgtggctgctcgccaccttctcagggtccttgcagcaataaggggcgtgagaatctcggtggggggtggggcgcggagccccttcgcctccatgcgggtgaccccggctctgcgtcccaggctgcgtgagcgccaccaggacgtgctgcggcagaagctgtacaaactgaagcaggagcagggcgtggagagcgagccgctgttccccatcctcaagcaggagccccagtcccccagccgcaggtaggcccggccggcaccccggggacgccgatgcagacgcggagcaggatggaggggccgtgggcagcctccgcgcctccaacgctctctcctcccagcctggagcctgaggacgcggcgcccaccccgcccgggccctcctcggagggcggccccgcggaggccgaggtggacggcgcgaccccgacagagggcgacggcgacggggacggtgagggcgagggcgagggcgaggcggtgctcatggaggaggacctgatccagcagagcctggacgactacgacgccggcaggtacagcccgcggctgctcacggcgcacgagctgccactggacgcgcacgtgctggaaccggatgaggacctgcagcgcctgcagctctcgcgccagcagctccaggtcacgggtaagggcggggctggaggccagggggtggggccagtggggcgagctgggggcggggcttctccagcctcatttcccggccgaagccgctggcgtcagtggggagctgcttgctgcttctcccccgggtctctgagcgtgcattccgtcacctgcacgcgcactggggcgttccttcattcatcctgggcttgctggcccactggccttggggccacaggtggtggaagcttttaccggccgctgtccgagcactccctgggcagcctccgtcctaagacagaggagaaaatactggcttcagaaaacccctgggccaggaccccctcgggggtcatgcgtggggctggatcccgcagccaggccctaaccaccaggttctcctgtcgctcggcggggaagcgcgctgcgcttggtccccacccaggaggacgatagacatgaagaccaaggtccggggctcggggcggatggtgtgggtctccgggtcgcccaggccctgtcccctccccatgtgccttagctcgccccagcctgttttccttttgcgggaggcaccagcggccgcccctgccagagaggctaggagggaggccaggacccagggggaggccgaggcccgggtgaacgccgtcccgcccgcaggagacgccagcgagagcgccgaggacatcttcttccggcgggccaaggagggcatgggccaggacgaggcgcagttcagcgtggagatgccactcaccggcaaggcctacctgtgggccgacaagtaccggccacgcaagccgcgcttcttcaaccgcgtgcacacgggcttcgagtggaacaagtacaaccagacgcactacgactttgacaacccaccgcccaagatcgtgcagggatacaagttcaacatcttctaccccgacctcatcgacaagcgctccacgcccgagtacttcctggaggcctgcgccgacaacaaggatttcgccatcctgcgcttccacgcggggccgccctacgaggacatcgctttcaagatcgtcaaccgcgagtgggaatactcgcaccgccacggcttccgctgccagtttgccaacggcatcttccagctgtggtttcacttcaagcgctaccgctatcggcggtgacggccctggggaacggcaggcaggtgtcctcgggggcacagtaaaggggcttcggtgaagctggtggtcactccggggccgctgtctgggctgcagggccgcgggttcacgtcccacctcaggccgcatctttctttcgccaggcctcagtttcctcctatataaaaggggggtcaccattgagcctgccatggtgagctgaggagacactgggacaggctggcctagggtcctgatgcaacggagggggcgctaggggcatctttcgagcacgagggtggccagcagccgccagctgacctcaccgtccaggcggacactctccaccgcccctcagccaggctgggtggggcccacagggcctgccccaagtggcggccacacagggtgttgtggagatgggccagaggggcctgggcttggcggtgccaggctcgtgagaagcaggaaactcaaggccagccctgccacatcacggggcacccactgggcgtgaggcagagcccgcggctgtggggcagctccagccctgcccacaggccaccctcgcccgcacaggcagcactgaggccgggaccctgctggcgcccgatccgccactgcagaagagaccctctgtggacacccacactctgcagggactggcccccaactcaccccgtgctggctggtggggtccatttccccgcagcgggtatggaggatgcgtcgaggtccctgtctctgtcaaggtcgtgggaaccaaaagtcactgagccgtcctccccccacctctgagcacagggcctggagggcaggggctccccgaaggctgggggttggagaagggtgaggggcttcccccagggatccccccacctggcctgctcacggggccttggagcatgagaccagtgaccccgagttttgcccatatcaggacagtggctccttctcactcccctttctcaggccaggagggccgagggccacacgggtgccacagcccaggtcggagtggcccagccggcaggcttgttcttcagcatccgacgggaacatctccaacagaagcaaaacggaaagtgcctcccggacccccagagggccacccaacctcaccagtcaccagccccagaccacccacagcccctcccagacaccccgcctcatctggaaatagttccgtttgtttctctaaaaagacttgtaggtgggaaaaaaaatcttttgttctcatggaattggcctattggcaagatcgcatgtttttttaataaacgttgtattttagaataatcttaggtttgcagaaatgcagagagtgtaacgtgtccgacgccccacacccgctgccctagttgctgctggcatttgtgacacagcgcatttgtcccaagggaagagcctgggaaacaacacggcacccaactggggcctggtggtcccttgggagctgtgttagtgcccggatctgtctttgccccccgcccctctgccttgcctcccacagtgggggtgacagtccatttcccagacgacaggagggagggtacaagggtggacacagctgctggcctgggcccaggctctcgtgggggcagcgcttggccatgcctgggggcattcgtggtggtcccaccttggggctgctcctggcgtggagtgagtggaggccagggatgctgcccaatgtgcttcagtgcccaggatgagcctccccaaatgtcctcactgcagtaggcagaggtgcgaggcagatcctgcactcccctggggcactggtcacctcccagcccccacctctaacaggatcccggaagtctgtggcacagggcttgggaactggccagggaagtgcatctgatcagcgtccgctctccacaccgcagaccctggcccaccctgaccagcctactccagaatcccaaatcgcattgcagcacacacaacactgccatccccagcccagccttcagcagacatcacaagttgatggcagatggccagagccatcttagaatcctctgggcagcctcttgcctgggttcctggccagctccaccgccgatcaggacaggctgctggggcagggctgagtccgggctggactcggggggcactttttatttttttgagacaggctggagtgcagtgggcgtgatcacagctttctacatcctcaacaccagaaggcacttttgagcccagagtggtgtttgggacaggccgggttctgtagtcacagcccaggttgtgtgtgcgtggctggcgcagcccagcctgtactgggcctaacccagacctcccaccagctctatgtgacagtatttacttccatttggctgctcgggaaactgaggctcacaaaagcccacgttgttgagcccagaaagtggcagggccagtattagaagctgggtttctctaccctggagaatcccaatcccagaccaccaccccgtccctgcctcagtttccccacctgcccctgcagagattcccccagccccagcatcctgcttcctcctcctcacgttccttttgcaccccaagggagatggctgtcctccaactggcaagacacatggtttgccaggggccccagtctggagggagcagagctggggccctgggacccctgaagggtcacgggcactgagcctgggaagacgggctgctggccgagaagggtgacggctgccttgcagaggacagggcagcaggtgtgcccagggcagggggcacacagggctcaggccaagctaaggagccagatcctaggggagctgggcaccagggagctacggagggcgcgtgagctggggagggcctccgagctgggtgtcgagaccctgcaggcagactggaggtgggggccaggggtaggctctgcacaccacccccccatctaccccatgactctccaccatggcccgaggtccacctggtgtcctggaagctgcccccgcccccacccagcttcctgactttggctgtgtccagagctaagaatagacgctccctgcccggcccccgccggaaaccgcagccacgggggtacatcctgagcctggcctctgttcccaccatctgccccccagcccctcacaactcctcccaccagagcctcctgtgctcccattgaacccgaagtgctggcggggggtggggggcggggggcgggccaagaccgggagaccagcaaccagccccagatgacagggaagcccagtgctcatgttccaatcccacacatgggcgtggcattgttccccctttgtgcctcagtttccccatctctaaaatttaagagtatctttaccccctgccttgcagagatgtggtgaggcttaagctaaatgcaagtgtccttctctgaactctgcccaggctgtttcccagaagagtcattgtccttgttatctcagggccgaggacagaggaagtggggacaggacagccttcctccgtctctcactgccccctcatctggagccccagccccacatcctcctcccccaacatctgccctccttgcagttagtgtagcaagggcctcatgctctctcttgcctccaaagctttatacatgcaattcctgtcactgccacgtagcccagacctggggagctcctattcatcctacaaaaccccacttcccatgccctctcctcacaagatgtcttcctagctcacctctgggcttccctaggccctgtctcttcctttggcccagccctgaccccagggggctggaacagcctgtgtccagttcattctccagcctagggcatcctgaagggcaggcctggtttcaggtctcacttggagctcataattgtcccactgtataagctgaacacagagaggggttggggagagtaagacttggagattaggtcggcttcacgggaaagcagccttggagccagggttttgccacatccataggagttggatagcctccttgccaggaaagagagaagttgtgttaaatggctggtgacttaatgggatagagctttgggagggaggttgggtgtggccgaaggccaggaggaggaaggatagtgggcggggtagccggggaaggggcttccggactgggctgacgagagggccgggccaggctgggaatacccctcactcacagcctggactagcagccctcccgggcccaggggacggggtggggtgcagtcagggcaaggtcagcttgtccggtcccactccaggtccctaactcaaggttctgtccggctcgggtgtacaaacaaggccaaggaagcccaaggtcccccctctgcaaagagacggtcccagtccctgcgtccggcaccttctcagccattcctgttgggctccatccctccttccccagcccgagctggggggtggccaggaaagagtgcccatcccccactgcagcctcccggctccagactgttcctcctctggctccaaagccacctccgagcctcctcaagagaccctcccatgcgatgccatcaccccagccctcccggctcacctgctctgggaccacctttctcagtctggctgtgtcgtctggtgcaccccccatccctctgtcctcccaccccacccctggaaggggcctcaaatatgtcctgtatgtattaagcagggcatactactactgtgtgccgcgttccagcgcacccagtgaatttggagccctggagtctgggcgacccccgggagccgatccgcctggacctgccccgccccctccaggccttgggtgctgcccagatggtgaataatgcgggcctggcggcgggagcgccgggaagaggcctggcagggcgctgggcggctggaggggctgaggctcccgaggaagcgcccctgccacccctacgcgggccattgcatccctgccaccggtggcctgggggtcccaagggcgccgccttccccagaaggctgtagggtgtcccggcgtgcggggggcacccactgactccaagtcagccaggcccgggcccgaggggcgtggccagcgcagggtgggcggggctgatgagagacagcgggagacagagactggacggagagagcgagccgcgggctgccagcggcccccacccgtcccagctcggcttagcccccgcggacccctccaggccgcgaccccagggcgtcctgtgccgccacgccctccatctgtgtgggtcctctgctgggcccgcccctggtcacagccagactgactcagtttccctgggaggtcccgctcgagcccgtccttcccctccctctgcccgcccccagccctcgccccaccctcggcgcccgcacatctgcctgctcagctccagacggcgcccggacccccgggcgcgggatccagccaggtgggagccccgcagatgaggtctctgaaggtgaggtcgccccgctggcttagggcgggatgcactgctctggtgtgagcccgggctgctgggcgcatccggcgctggccctgccctgctgtgggtgtgtcgcaaagcccgcggtgacagcggccaggtgccaggtgtcccctgtgtggcccggcgggtggcatggtgccctgaggcctgccctgggcgcccaggcggctgggtctgggtgcggcccaggctgattctgtccggggggctctctggtctctgtggggccacatggctgtgaatgggggtcccagactcagggggctgcagccggggagggggcccaggccctgggtgtggcagggatcgagtgtggttgtgcggctgtgtgtgtgatcttgtctctgggagtgaaccatgcatggccctggttgtgtgtctgtgtctgtgcgtgtgtggtggttttgtgtgtgtgaccgtgtgtttgtttctgccgagagtctgtgactgttaaatactgtgtgttcttctgtgtgtctttctgtgtctgtctgtatctatgtacctgttgtgtttctgcctgtgtgtctgtgtttttctgtctgtgtctgtcacatttctgcctgtgtgcctatgtgtgtatctgtgtgtgtctatgtctgtcgtgtttctgcctgtatgtgtctgtgtgtggctgtgtgtctgttgtgtttctgcttgtgtgtgtctatctgcgtgtgtctgtgtgtctgttgtgtttctgcttgtgtgtgtctgtgtctgtcatgtttccatctgtgtgtgtctatctgtatgtgtctatgtatttgccatgtttctgtatgtgtgtctgtgcatgcctgtgcgtctgtctactgtgtttctgtctgtcacatttctgcctgtgtgtctgtcatgtttctgtctgggtgtgtctgtggtgtttctgtgtgtgtctatctgtgtgtgtctgtgtatctgccatgtttctgtatgtgtgtctgtgcatgtctgtgcatctgtctgctgtgtttctgtcacatttctgcctgtgtgtctgtcatgtttctatctgtgtgtgtgtctgtgtgtctgccatgtttctgtgtgtgtgtctgtgcacgtctgtgcgtctgcctgctgtgtttctgtctgtcacatttctgcctgtgtgtctgctgtgtttctgcctgtgtgtgtctggctgtgtctgtgtgtctcgagtgtgcacacacggtggtggcctgaggtgcatgttggtggaatcactgtaacttgtggtccaccattaaccaccagctgcacctcccgggtcccgccccctggtccctgctggcccctgtgtgacggagctccgtacatgctccctggggagcccccactagagagatggggaaagcgaggctcacagggggccatgtgacttagggccccaacaaggctggccggagtctggctggctgggggagtccccgccctgcactgtgtgggctggggaccctgttggtgtcacaaacaggaaatgttctcggaaatggagctttgcgatgaggggaggtgggcccatcagggtgtggagtgtgtctgcctccgctaccatgtgggggtccacgcccatgagcgttcagatctacagcaggcatgggagggtctggccggtccctgaagtttcagtcccaaaagggccctgtgggtccaaggtccaaggccgacaggggtgacacggagcctcagggctccctgctggctgcccgggcaccttgtagggagttgagctgtgagtacagccaggagccctgcagaggtgagagccagggaggcctgagcttagcacccgcaggcatggagatcagaagctcacccccattgcacagagcggggaaactgaggctcggcaaggtggagccccagcctggccacggcagatcagggactagagcctccaagcctgtctgggggaggtggggtgggctcaggccgtgacaggcaggcggggcgggcagggtggggtgctgaggagaggggacttgttgagaaatggatggatgatgaggtgacgtgctccagggagtgggggagggggcacgaggatggaacatggggcggaggagaggcctgctgtttgggaaccaaggatcacattccactggcaaccaggcttggggcagccaggcctggtgcccacgcccagcccagcgcccgggcctctggaaacagcgccggacagagccctccgagtcacacgacctgcaagccggataccctgtcaggggtggcatcggatgagggagaactcactgtccgccttccagaaagaagccaggaattaagacagagatttctggaacccgggacccaggcagattcccatcaaagttgcaggacctcagcctcttgggagttgcaggacctcagcctcttgggattctagaattgtgaggccttctgcgtcccaggactggaagcgtgttagaattccacaaccctgaacccgctgagggcaaacgtctgctctcagactgcaaaattctggagttattcaacatcgaaaagcgatcttgggtccacacctctccccagacacagggagggacagtaattttcccaagagccgcagtgctgctctactgccccaccgcgtgggggcccctgctacccctcctggccaatgcaggagggaagggaggccctgcccggtccccccattggcatccttgcctggagaacttgagatggctgccatcgcctgaagccagggtggggagtggaggtggggggattggaaacagccagctgtggccagaaggactcagtgccagtttccaggctcccctgggccaagggctctgggccatgcatttgctcccagccaccggaggtgtgagggagttccgggtgtgtgacccccggtgagtggagtggagtgtggtcgaggagaccctgagacccaggagggactggaagttgctccaggcagaggtcgggtcagtggccgcagggacagccgagtcccaaggaatgtccagaaacagcacataccagctctcgagggaggaacgccttgtcccaggggaaatcccagtgcaggaatccaaaccccaggcgccaaagcagcccggagtggagggcaacgatcgccagaggccgcgaggaaccccccaccgcatctgctctccaggcctcagtttctcctctggaagccctgcctcccaccacggtggcagtggccttagctgtcttcccaggaagggagttcagtgccgctgtcaggagctggataatttatgaggctggatacagcgtagccaaggccagaagccaggccaaagcgtcacaagtgagatggggagtgagggccacagtcacccatttgaccgccctggaatgcgttagctgctgcgaccccacagcccaggccctgcctcagggccagcatgcattgagtgcccgctgtgctgtgctgagtgctgcgcgtggatcccttcactcccgtcatcagcaaccccgactttttttttttttttgagatggagtctcgctctgtcgcccaggctggagggcagtggcgcgatctcagctcactgcaagctccacctcccgggttcacaccattctcctgcctcagcctcccaagtagctgggactacgggcgcccgccaccacgcctggctaattttttgtatttttagtagagacggggtttcaccgtgttagccaggatggtctcgatctcctgacctcgtgatccgcccacctgggcctccctcttttcttttctttttcttttttttttttttttgagacggagttttgctcttgttgctcaggttggttcagtggcacgatcttggctctggggccctgtttccggcccacaaacatcacttcccctgtcgggttcaagcgattctcctgcctcagcctcccgagtagctgggattacaggtatgcaccaccacacccggctaatttttgtatttttattagttgagatgcggtttcaccatgttggtccggctggtctcaaactcctgacttcaggtgatccgccctccttggcttcccaaagtgctgggattacaggcgtgagccaccacgcctgaccgtaataggaccttttgagccttaactgcctggcacctccatctcgcacacagtcccattcgcccacctttgcccacccagtccctccaggtgacttgggggtgtgtcagggcaagaggcaggagacccgggttccatcctagcctcctgggtgactttacaaccagccacaaccctctggactttgacatgacccatggggtatggggagctggttttgttttgttttgttttttagacggagtctcgctctgtcacccaggctgcagtgcagtggcacgatctcagctcactgcaagctcctcctcccaggttcacgctattctcctgcctcagcctcccgagtagctgggactacaggctcccgccaccacgcccggctaattttttgtatttttagtagagacagggtttcactgtgttagccaggatggtctcgatctcctgacctcgtgatccgcccgcctcggcctcccaaagtgctgggattacaggcgtgagccaccgcacctggccgttttgttttcttgagatggagtctcgctctgttgtccaggctggagtgcagtagtgcgatctcggctcactgcaacctctgcctcccgggttcaagcatttcttctgcctcagtctcttgagtagctgggattacaggcgcccgccaccatgcctggctactttttgtatttttagtgaagatggggtttcaccatgttggctaggctggtttcgaactcctgacctcagatgatccacccacctcaacctcccaaagtgctgggattacaggcattagccactgcacccagccagaagctggtttttgaaccatctcattttatttttacttcactcatcacacctggccccatttttttgttttttggggtttttagcgtttttgtttgttggttggttggtttttttttttttgagacagggtctcactgttgcccaggccggagtgcagtggcacaattgtagctcactgcagcctcaacatctggggctcaagcaatcctccaacctcagcctcccaagtagcagggattacaggtgcataccactacacccagatatatatatattttaagagatagggtctcgctatgttggccaggatggtcttgaactcctgacctcaagtgatccgcccactttggcctcccaaagtgctgggataagaggcgtgagccactgcgcctggcttggctccgattttgttgtgcattgtggctgagcgttagccccacacagagtaacaggtccccgcctgctgctctctaccaaccatccctggggaacctgccattccgaagaagtgttttttgttcccaaaatagaactggatttcagggtttatttcttattataaaaccgacaccatgaaaatggaggaaaaggccgggcacggtggctcacgcctgtaatcccagcactttgggaggccgaggcgggaggactacttactacagggtatgtgcctgtagtcccagctatttgggaggctgagatggggggatcacttgggtccagaaggtcgaggctgcagtgagccttgattgcatcactgcactccagcctgggtgacagagcaagactctgtctcaaaaaaaaaaaaaaaaaaaaccggagaggatatttgagctggggcattgaaggttgtgtaggagttcaccagagctacttacactgaaatgcagaattaatcacaagcaaatcttctctcgcctcccaggtgtgcctgaaccagtgccagcctgccctgtctgcagcatcggcctgatggggtggtgactgatccctcagggctccggagccatgtggcccaacggcagttccctggggccctgtttccggcccacaaacattaccctggaggagagacggctgatcgcctcgccctggttcgccgcctccttctgcgtggtgggcctggcctccaacctgctggccctgagcgtgctggcgggcgcgcggcaggggggttcgcacacgcgctcctccttcctcaccttcctctgcggcctcgtcctcaccgacttcctggggctgctggtgaccggtaccatcgtggtgtcccagcacgccgcgctcttcgagtggcacgccgtggaccctggctgccgtctctgtcgcttcatgggcgtcgtcatgatcttcttcggcctgtccccgctgctgctgggggccgccatggcctcagagcgctacctgggtatcacccggcccttctcgcgcccggcggtcgcctcgcagcgccgcgcctgggccaccgtggggctggtgtgggcggccgcgctggcgctgggcctgctgcccctgctgggcgtgggtcgctacaccgtgcaatacccggggtcctggtgcttcctgacgctgggcgccgagtccggggacgtggccttcgggctgctcttctccatgctgggcggcctctcggtcgggctgtccttcctgctgaacacggtcagcgtggccaccctgtgccacgtctaccacgggcaggaggcggcccagcagcgtccccgggactccgaggtggagatgatggctcagctcctggggatcatggtggtggccagcgtgtgttggctgccccttctggtgagtaggggctctgcggggtcctgctaccctcctgactggacctctggtcacccagggtggatttagatcctgatggtgggaccgggcgcggtggctcacgccggtaatcccagaactctgggaggctgaggcgggaggatcgcttgaggccaggagtccgagaccagcctggccaacatggtgaaaccctgtctctactaaaaatacaaaaattaaggccaggcgtggtggctcacgcctgtaatcccagcactttgggaggccgaggcgggcggatcatgaggtcaggagatcgagaccattctggccaacacggtgaaacactgtctctactaaaaatgcaaaaaaattagccaggcgtggtggcaggcacctgtagtcccagctactctggaggctgaggcaggagaatggcatgaacccaggaggcggagcttgcagtgagcagagattgcgccactgcactccagcctgggcgacagagcgagactccgtctcaaaaaaaaaaataaaaaataaaaaaattagccagacatggtggcatgtgcctgcaatcccagcactttgagaggtcaaggcaggaggattgctggagcctgggaggttgaggctgcagtgagctatgattgcaccactgcactccagcctaggtgacagagtgagaccctgcctccaaattaaaaaaaaagaaaaaaaatagaaagcagccgtagaaaacacataaatgagtaggcgtggctgtggccaataaaactactgatggatagatgatgaaatttgaatttcatgtcatttttatgtcactcaatttttgcctctattttgttttcctctaaccatttaaacatggaaagaaattcttagtaaaaaacaaaacaggccgggcgtagtggctcatgcctgaaatcccagcactttgtgaggcagaggcgggcagatcatgaggtcaagagatggagaccatgctggccaacatggtgaaaccccgtctctactaaaaatacaaaaaattagccgggcgtggtggcgcacgcctgtagtcccagctacttgggaggctgaggcaagagaatcgcttgaacccaggaggcggaagttgcagtgagccgagatcacgtcactgcactccagcctgggtgacagagcgagactccgcctcaaacaaaaacaaaaacaaacaaacaaacaaaaacaggccagccacggtggctcatgtctgtaatcccagcgctttgagaggccgagacaggcggatcacctgaggtcaggagttcaagaccagcctggcctacatgttgaaaccccatctctactaaaactaaaaaaaattaactaaccatgatggcacactcctgtagtcccagctactcaggaggctgaggcatgagaattgcttgagcccaggaggtggaggttgcagtgagccaagattgtgccactgcactccagcctgggtgacagagcaagactctgtctcaaaaaaaaaaaaaaaaaagaaaagaaaagaaagaaagaaagaaaagaaaagaaaaaaaacccaaagcaagtggcaggccagatttggcccatgggtcaacccttgctctaaaccctcccatggctccctgttgccctcagaagaaagttctcacaggcacttcctgcagacgcaccttgcccactcccatttgcccttcagtgacttccctaggccaggtcaggcacctcttctgggctctgacattgcttcctcctcacagctttgcccaccccatgctgtaactccccggacccagtttccgtctcccgactggactgtgagcctatgagggtgcgccctgggagttcctcagctgctgttgctgcttcattcagcctacaggacctactgctcaggaaatgatttgattgattgattgatttaatttatttagagatggagtctcgcactgttgcccgggctggagtgcagtggtgcgatctcagctcactgcaagctccgcctcccaggttcaagcgattcacctgcctcagcctcccgagtagctgggattacaggcgcccgccaccatgcccggctaattttttttgtatttttagtagagacggggtttcatcgtgttagccaggatggtctcaatctcctgacctcgtgatctgcccgcttcagcctcccaaagtgctgggagtataggtgtgagccaccgcacccggccaaattattttattttattttaagatggagtttcgatgtgtcacccaggctggagtgcagtggcgcaattttagctcactgcaacctctgcctcctgggttcaagggatcctcccacttcagcctccggagtagctgggactacaggtgtgcaccaccacacccggctaattttgtatgttttagtagagatggtgtttgaccatgttggtcaggctgatctcaaacaaagtattttaatataatgtaacatttaattataatataattgtatgatatatgatatatatcaattataggccacattataattatgaataattatcatataattgattattatatattatatactaatttgtagataacattcttattttaaatatttttaaatatagtttaaaaatttcctgccaggcgcggtggctcatgcctgtaatcccagcactttgggaagctaaggcgggtggatcacctcaggtcgggagttcaaggctagcctgaccaacatggagaaaccccgtctctactaaaaatacaaaaaaatcagccagatgtggtggtgcatgcctgtaatcccagctactcgggaggctgaggcaggagaatcgcttgaacccaggaggcggaggttgtggtaagccgagaacctgccattgcactccagcctgggcaacaagagtgaaactccgtctcaaaaaaaaaaaaaaatttcccatcaatcctgacctatagataaatataatttttattatttaaatattttatttatggccaggtgtggtggctcacacctgtaatcccagcactttgggaggccgaggagggcagatcacaaggtcaggagatcgagaccatcctggctgacacagtgaaaccctgtctctactaaaaatacaaaaaattagccggatgtggtggtgggcgcctgtagtcccagctactcgggaggctgaggcaggagaatggcgtaaacccaggaggcggagactccgtctcaaaaaaaaaaaaaaggtatttatttatttattttgagacaggatcttgctctgtcacccaggctggagtgcaaccatgcctgggtaacttttctatttattttaactttttgtagacatgaggtctcactatgttccccaggctggtcttgaactcctgggctcaagtgattctctcctatttacctcccaaagtgctgagatcacaggcgtgagccactgcctggctaagagtgcgctaatttatgaacccatcaaaaggagctcagagcggttagtcaactctcctgaggtcacccagcaatgcagtaacagagtggacactggccgggcgcagtggctcactcctgtaattccagcactctgggaggctgaggctggtggatcacctgaggtcaggagttcgagaccagcctggccaacatggtgaaacccccatctctacgaaaaatacaaaaattagccaggtgtggtggcagccacctgtaatcccagctacttggaaggctgagggaggagaattgcttgaacccgggaggcagaggttgcaatgagctgagatcgcaccactgcactccagcctggacgacagagtgagaccctgtctcaaaaataaaattaaaaaacggagtggaccctggatctcaagggaccccgggcagggaccggggcgggcggggctggaggcgggggcccaggctgacagctctcccctttgcaggtcttcatcgcccagacagtgctgcgaaacccgcctgccatgagccccgccgggcagctgtcccgcaccacggagaaggagctgctcatctacttgcgcgtggccacctggaaccagatcctggacccctgggtgtatatcctgttccgccgcgccgtgctccggcgtctccagcctcgcctcagcacccggcccaggtcgctgtccctccagccccagctcacgcagcgctccgggctgcagtaggaagtggacagagcgcccctcccgcgcctttccgcggagcccttggcccctcggacagcccatctgcctgttctgaggattcaggggctgggggtgctggatggacagtgggcatcagcagcagggttttgggttgaccccaatccaacccggggacccccaactcctccctgatccttttaccaagcactctcccttcctcggcccctttttcccatccagagctcccaccccttctctgcgtccctcccaaccccaggaagggcatgcagacattggaagagggtcttgcattgctatttttttttttagacggagtcttgctctgtcccccaggctggagtgcagtggcgcaatctcagctcactgcaacctccacctcccgggttcaagcgattctcctgcctcagcctcctgagtagctgggactataggcgcgcgccaccacgcccggctaatttttgtatttttagtagagacggggtttcaccgtgttggccaggctggtcttgaactcctgacctcaggtgattcaccagcctcagcctcccaaagtgctgggatcacaggcatgaaccaccacacctggccatttttttttttttttttagacggagtctcactctgtggcccagcctggagtacagtggcacgatctcggctcactgcaacctccgcctcccgggttcaagcgattctcgtgcctcagcctcccgagcagctgggattacaggcgtaagccactgcgcccggccttgcatgctctttgaccctgaatttgacctacttgctggggtacagttgcttccttttgaacctccaacagggaaggctctgtccagaaaggattgaatgtgaacgggggcacccccttttcttgccaaaatatatctctgcctttggttttattttcctttgggtccagaagttttcaatctctggagtttgtgcattgggcctcacccggagcagacgagggcagggctgggaaggatggggagggacatagaggattcggttcctcccccaccttgtttcttgagtgtttcctaatcacttgatgggtggtaccacctagaattcttccagcagcctgtaatgggagggctacaggttagccctggaacctgcaatcaaaccacctttgaatctgtgtgtcattaaaagtagatataaatgggccgggcgcgattgttcatgcctgtaatcccagcattttgggaggccgaagcgggagggtcacttgaggccagaagttcgagaccagcctggccaacatggtgaacccctgtctctactaaaaatacaaaaattgcagggcgcggtggctcacgcctgtagtctcagcactttgggaggtcgagacgggcagatcacctgaggtcgggagttagagaccagcctgaccaacatggagaaaccccgtctctactaaaaatacacaaaaaaattagccgggcgtggtggcgcatgtctgtaatcccagctacgcgggaggctgaagcaagagaatagcttgaacccgggaggtggaggttgcagtgagccgagatcacgtcattgcactccagcctgggcaacaagagcaaaactctgtctcaaaaaacaaacaaacaaacaaacaaacaaacaaaaaattagccaggcatggtggcgggcgcctgtaatgccagctactcagaaggctgaggcaggagaattggttgaacccaggaggcagaggttgcagtgagccgagatcatgccactgcactccagcctgggcgacagagtaagactccatctgtaaataagtaaataaataaaacagagaaagagagagagagatgcaaaagcgtggagtgatgcccgtttcctccactgttcacttgttcacccagcaacctttcaaacaccacagtgttctgtacagcaccttgcacatagtacgtgctcaataaatattggtagaaaggaccagtggctgggtcttcgtggagcacctgtcgcctgcaggcacgtaagctcatgcctgtgcggtgcttaatgaagtgcctggtacacagtaggtgctcaagaggtattcagtgttgccacagtttcagccagccccccagccccacatctctgcattcccccaaacttcccccaaaatgacacaccaggctgcagagatggaaggtgcctttattcaccatgagccctcagggtacatgcggtgcaacccgtctcctgccctccttttccctccaaggacctggatctgagccaggaccggtgaagcccctgttttcaccaccgcacactccctaccaccgcctgctggagaaataaggtcacttgctgcttctgggggccccaggctggaagggacaggagaggacgagaaccacatgaaccagggctaagtcacagccaagctacggccccccgcggtaagggcgggctcctggctcccccagagtggggcaaagggctggcgccaaagctggggactcagacagctgggaactcaggagggctgccctaggggcaggactaggagtgacagatatggtgggtggggtggacttctggggtcccacccggggcttgggagagacggctggcttctggggggttgaggagacctgtgactgtggggccaggtaggaggcttggggtaagcctgggatggggccaaggctggcctggatgccacatacctgatcatggggctgaggcagaggctgggggtctttgctaggggctggggtggggtctctgggggatgggcctgggggctgaggttgggctggggcaggggcctcaagctggattctagggtcaaggccaggggtctgtgggcagattccatttccagggctcagccagattcttgaactggtgtgagttctggaactggattgggttccagaaacaggctgggttccagaactaaggtgggctccagggctgggctgaattcttgagccggtctgggtttcagagctgagcccggtctcagagctggactgggttctggaactaagttgggctccagagtcgggctgaattcttgagccggtctgggtttcagagccaaactgaatcccagaactgaactgggttccagagctggactgagcctcagagctgagcctggtctcaggactggactgggttctggagctaagatgagctccagggctgagctgaattcttgcagtggtctgggtcccggagctgagctggtttccagaactagtctgagttctggagctgggttgggctccggaaatcagctgggttcccgaactaagctgacttccagagctggcttgaattcttgagcttatctgggtcccagagctgggctgagttccaaagctaagctgactttcagaactgctctgcttcccaaagtccagttgaataccagagctgtctggggctgtggtctggagctggtatctagaacctggcagggttttagaggcgaattgagtcccagaggctggtcgagctcctgggcagcgctgggtcctggagctgggcctgctgtcggaactagacagggctgtggagcttaattctattgctgcgatggcctgggtcccaggactagattggactccagagcttagctggattctggaacttggctgggtctcagctgctgtctgtgttttggagctggctgggatttcagaaccagcctgtgctccagaactgagctgagttccagagctgggtgcggtgcttgggctggattgagctctggagcttggccaggccttgaaattggtctgggtcctggaagtaaactgcattctagagctgagctgcattgtgcaaggagagtggggcttggcaccaagctgtgtgctggagctgggtcttgcttccaagatggatggggttccagagctggtctgaatcctggagttgggcctggttgtagcactaggcgaggttctagagctgggctcagtctcagagctggaatcatcactggagctggactgggctgcaggatggggatgggcacttggatgcaactggggttgggatctggactgggcagccgtgtggacctgggtttctgagctggtctgagttcttgaataggatttggtttgggagctgtctctgaatcctgagctgactggggttccagagctgggctgcttcatgaatctcacatgggttccaaaattaactggggttccggagctagaccgagtgtccaggtgtggctgcatcgtggagctgtccagagttccagagtcagcttgagttttccagcagggcttggtctccgagctagcctggattctggaactgggattggtctccaagctggtctgggtcttaaaatgtgtctgggttccagagtttggcttgttgtcagggctcagctggattctagagatgtgcttcgtctcagagctggcctgggcttcagagcagggcttggtctcagatcttatctgggttctagagctgggtttggcctcagaggtggcctgagttctagaacagggcttggtctcaatgctgggattggtttcagagcttatctgggttctagagctgggcttggtctcagggctgacctgagttctagagctgggcttggcttcagatgtggcctgaattctagaacacggcttggtctctatgctgggcttggtttcagagcttatctgggttctagagctgggcttggtctcggagctggcctggactctagaacagggcttggtctcaatactgggctctgtctcagagctcatctgagttctagagctgggcatggtctcagagctcatctgggttctagagctgggcttggtctcggagcccatctgagttctagagctgggcatggtctcagagcccatctgagttctagagctgggctcggtctcagagcccatctgagttctagagctgggctcggtctcagagcccatctgagttctagagctgggcatggtctcagagcccatctgagttttagagctgggctcggtctcagagcccatctgagttctagagctgggctcggtctcagagcccatctgagttctagagctgggcatggtctcagagcccatctgagttctagagctgggcatggtctcagagctcatctgggttctagagctgggcttggcctcagagcaggcctgagttctagaacagggcttggtctcagtgctgggcatggtctcaaagctcatctgagttctagagctgggcttggtctcagggctggcctgagttttagaacagagcttattctcaatgctgggcttggtctcagagctggcctgggctctagcacatagcttggcctcagatctgggctggattctagagaagggttgggttctggagttgggctggggctccaaattggattgggttctagagaggaacttgtcctccgatctgggctgggttctggagcagggccggggcagggggctgggctccgggctggggctgtgctgggcccccccagggcaaactagccacaggcctctctggcctcgccgatggcggcccacacttccaccacaaactcgtcggggaaggcgaactcgcccaagacggagtctaaacagcgtgcaaactcctgggcgctcgctgtcttcttggacgtctccaccatggtggacgctgcgggccgtgccagaggggatgtcagtgagggcactccccgcgcccaacttcccgctgggacccctgcctcctcccgtaggcttccctccccccagggccccctggcttaccctggccccttacccagctcggggtcccgaatgcccatgtagctttccagcaggtcatcaaccttccgagatgcctcctcctcaaactcactgggctgggggcacacgggagggaagtcaggggtgaaaagctttggagccctccagcccagccccctcccgacccccacccctaagggaagagtagactggaccctcacacgagtcagtagtgctggtaccaacatcattgccccacttttcaatgaggacccattttgcaggcagagaaactgaggctccgaggagaagttcttacccaagaccgcactgactcagtggaggagctgaaggtgcagaagcctggggagagcccctccccttcactcaccgcttcctccactgtggcagcccccccagaacgaagccgcagggtctccctcccgctggtcactttcgcctctactggacatttgctggaccgacttctctggccaatcatatctggagggaacagagtgagggatggccatgggttctgggtggagccacatctttgtaaaccctgggaggccaacagccgagcctttctagaatcttcctccccttcaaagtcctccttacatctgtacggcaagtctccagagacctattcgagattccacacttcgcatccccagcaaactaaatcacaagtccagaatgaggtgttgtaatggagcaggtttagaactaacatcccagttccatgccctcactctccctcttctagcgactttctctagaagggactgcttgggaccctccttgtggtaggatcctcaatctagatatgttcttgtctgggttccagaacccggcttagtgtcaggactgaggtgctagaaacacacttagtctcagagctggcctgggcttaagagcagggcttggtctgagagctggcctgggctctagagctgggtttagtctcagactaagcttgatttttttttttttttttgagatgttgtcttgctctgtcacccaggctagagtgcaatggcacgatctcggcttactgcagcctccacctcccaggttcaagcgattctcctgcctcagcctctcgagtagctgggattacaggcacctgccaccatgcccagctaattttttgtatttttagtagagacagggtttcaccatattggccaggctggtctcgaactcctgacctcgtgatgcacccgccttggccttccaaagtactgggattacaggcttgagccactgcacccagccaggtttttttttttttttttttgatacgatggatcacctgacctcaggtgatccacctgccttggcctctcaaagtgctgggattacaggtgtgagccaccacgcccggcctaaactctatttttaggcatggcttttggagttcacagccacggcagggcagattctagaaccccatacagctcactctccctgggacgtctctccatgtgtgctggggcacttctagaatctctgtctctgttctatagaacaacgctatccaaagggccaacccatggctacatgaggagaatgtgctagtgtgtaaatcaatacactgttttcttcattgagaaagtctagttatgaaaaaaaatgggcagggtgcagtggctcatgcctgtaattccagcactttcggaggccgaggcgggcagatcacctgaggtcgggagttcgagaccagcctgccaacatggagaaaccccatctctactaaaaatacaaaattagccaggcatggtggcacatgcctgtaatcccagctagttgggaggctgaggcaggagaatcacttgaacctgggaggcagaggttgtggtgagccgagatcacaccattgcactccagcctgggcaacaagagcaaaactccgtctcaaaaaaagaaaaaaattaaaaattagctggcacggccaggcgcggtggctcacacctgtaatcgcagcactttgggaggccgaggtgggcggatcacgaggtcaggagatcgagaccgtcctggctaacacggtaaaacctcatctctactaaaatacaaaaaattagccgggtgtggtggcgggcgcctgtagtcccagctactcgggaggctgaggcaggagaatggtgtgaacccgggaggcggagcttgcagtgagctgaaatctagccactgcactgcagtctgggcgacagagctagactccgtctcaaaaaaaaaaaaagaaaagaaaagaaaaaagaaaagaaaagaaaaaagaaaggaaaaaaaaaagaaaagaaagaaaacttttttctcatattctcattctctacaatccaccatgacctcaaagcactgctttaaaagttcccaggctgcgcgcggtggctcacgcctataatcctagcattttgggagactgaggcgggtggagcacttgaggtcagaagttcgagaccagactggtcaagatggtgaaaccccgtctctactaaaaatacaaaaattagccaggcgcaatggtgggtgcctgtagtcccagctactcgggaggctgaggcaggagaatcgcttgaacccgggaggtggagattgcagtgagctgagatcgcgccattgcactccagcccaggcaacagagtgagactccgtctcaaaaacaaacaaacaaacaaacaaacaaaaacaagtctcccagcctggctccaaagtggttctggacgcgtcctcctccaactccactttacccagtctctcccccacccctcccccacaggctgactccataacaatctattaatagaaactacctacgagtttctgataccctgccaggagctccttggcacgcagcgggtgcacctagaaccttccagcccgtcccatccccgaccctcctccaccccaggcatccgtagaacgcacttcgggaagagctcccgccagcccacccgcctcaccgaaggccctcttgggctgcaccaggcgcagggtgaagggctgggacttgggcagctcccggagcatcttggccacctcgtagtggcggcagcccacaatggagtggtcgttgatggcttcgatgctgtcacccacgcacactgcctcgatccggttgatgatactgccttccttgattctctgcagggatccagcgtcgctggcagggcaaccccagccacccgcctccaatccgcagaacccacgtcgacccagagtggggggggcagttgctggaccccaggaagccacccgcccaccccctcccgggcaccttgatgaaggcgtagccagccccgttgtccgtgatggtcagccccagagcatcctctgtcttagtgacctccacctccttggtctcgcctcgcacgtgggcaaagatgaagtcctccaggcctatctgaccccccaggagcttctgcatgtccactttgtggctgttgagggtgcagaataaaatcttcccgggggagaaggagcctagagttagccagggcatgcatccccccacgcagccaccctgtctgcgcaggcccctgcccccagcgaccaggatcccagcccatgggaaagggcagggcgtgggacccccagaacagagagaggagggagaaggagacttccagcaggtggagacccctctccataccccgggacctccagcccccagacctccaggtttaatctgctggcgccccctgggggctgcaaaccaaacgaacccggattggaaaaacgcccaggaaccccccaaccccacggcggcctcaaacttcccatccctaagggggccatctggaaccccagaccccagctacgcccaggaagcacagaggcgcttccccgagggctggggtccgctccaagctaggtctgcgcagaggattttctggaatatctaggggtccgctagtcctaagacctgcccatcttttgcgcagagcgtgcaaagggggcccctgggagtgtggcaccccgggatctgagggctgggtctctgagatccggcgattaggcggccaccccgacgtctgggatccggggatctggggtctcccgtccagggtccaagctccctacccctcaccccatcaggcgggtggtcttgggcgccggtgtccgggctccttacctcggtgggcgcgatcccgaaggcttcggcgatcttggcgtacagctcgcggacgttggtgaagccctcgatcttgcccgtggggctcccgtgcgccagctgcgtgcggaagacgaggcgcgggcgggcgcggggcgcggccgggggctccgagggcgcgggcgggggcgcagacgcgcgcggggtctcggtcccccgggcctcccgggccgctgctccctccatggcgggagaagttcggccacccacccgggccctcgccgccgccgccggatccgccgcttcctgcagcctcccctcccccggcccagggcgcgacagccgagacgcccgggtaaggggatctgggaacccgagcctcccgggaaggcgacaccgcggggtgcgcaggggtgggtcgggccccaggtgtccgggccctgccagggccagctgtgccctccccggggatacccgcagtccgggggggcctgagctcaggaccctggaagaacagggaccacaaataaggacagggacaggcctggagcggtggctcacgtctgtaattccagcactttgggaggccgaagcgggcagatgacctgaggtcaggagttcaagactagcctggccaacatggtgaaaccccgtctctaccaaaaatacaaaaatcagccggacgtggtggcgggcgcctgtaatcccagctactcgggaggctgagatctcttgaacccgggaggcggaggtggcagtgagctgagatggcgccattacactccagcctgggcaacaaagcgagactccgtcgcaaaaaaaaaaaaaaaaaaaaaaaaaaggacagggacagctgagggtgctggagcactcaccctctgctaggcgaggtcattgttttattttattttattatttttatttatttatttattttgagctggagtctcgctctgtcacccagtttggagttcagtggcacgatctcagctcactgcaacctctgcccaccaggttcaagcaattctcatgcctcggcctccccagtagctgggattacaggcatataccaccatgcccggctaatttttttgtatttttaatagagatgaggtttcaccatgttggccaggatggtcttgaactcctgacctcaggaatccacccaccttagcctccaaaaaagctgggattacaggcatgagccaccacgcccagcctttggtttgtttgtttgattttggagacggagtctagctctgtcgcccaggctggagtgcaatggcgtgatctcggctcactgcaacctccacctcctgggtt

SEQ ID NO: 398 - DNA, 1394 bp, Homo sapiens
gggcccgcccctggtcacagccagactgactcagtttccctgggaggtcccgctcgagcccgtccttcccctccctctgcccgcccccagccctcgccccaccctcggcgcccgcacatctgcctgctcagctccagacggcgcccggacccccgggcgcgggatccagccaggtgggagccccgcagatgaggtctctgaaggtgtgcctgaaccagtgccagcctgccctgtctgcagcatcggcctgatggggtggtgactgatccctcagggctccggagccatgtggcccaacggcagttccctggggccctgtttccggcccacaaacattaccctggaggagagacggctgatcgcctcgccctggttcgccgcctccttctgcgtggtgggcctggcctccaacctgctggccctgagcgtgctggcgggcgcgcggcaggggggttcgcacacgcgctcctccttcctcaccttcctctgcggcctcgtcctcaccgacttcctggggctgctggtgaccggtaccatcgtggtgtcccagcacgccgcgctcttcgagtggcacgccgtggaccctggctgccgtctctgtcgcttcatgggcgtcgtcatgatcttcttcggcctgtccccgctgctgctgggggccgccatggcctcagagcgctacctgggtatcacccggcccttctcgcgcccggcggtcgcctcgcagcgccgcgcctgggccaccgtggggctggtgtgggcggccgcgctggcgctgggcctgctgcccctgctgggcgtgggtcgctacaccgtgcaatacccggggtcctggtgcttcctgacgctgggcgccgagtccggggacgtggccttcgggctgctcttctccatgctgggcggcctctcggtcgggctgtccttcctgctgaacacggtcagcgtggccaccctgtgccacgtctaccacgggcaggaggcggcccagcagcgtccccgggactccgaggtggagatgatggctcagctcctggggatcatggtggtggccagcgtgtgttggctgccccttctggtcttcatcgcccagacagtgctgcgaaacccgcctgccatgagccccgccgggcagctgtcccgcaccacggagaaggagctgctcatctacttgcgcgtggccacctggaaccagatcctggacccctgggtgtatatcctgttccgccgcgccgtgctccggcgtctccagcctcgcctcagcacccggcccagacggagtctcactctgtggcccagcctggagtacagtggcacgatctcggctcactgcaacctccgcctcccgggttcaagcgattctcgtgcctcagcctcccgagcagctgggattacaggcg

SEQ ID NO: 399 - protein, 386 aa, Homo sapiens
  VARIANT (1)...(386): Xaa = Any Amino Acid
TSASLPCLQHRPDGVVTDPSGLRSHVAQRQFPGALFPAHKHYPGGETADRLALVRRLLLRGGPGLQPAGPERAGGRAAGGFAHALLLPHLPLRPRPHRLPGAAGDRYHRGVPARRALRVARRGPWLPSLSLHGRRHDLLRPVPAAAGGRHGLRALPGYHPALLAPGGRLAAPRLGHRGAGVGGRAGAGPAAPAGRGSLHRAIPGVLVLPDAGRRVRGRGLRAALLHAGRPLGRAVLPAEHGQRGHPVPRLPRAGGGPADGLRGGDDGSAPGDHGGGQRVLAAPSGLHRPDSAAKPACHEPRRAAVPHHGEGAAHLLRHLEPDPGPLGVYPVPPRRAPDDQHPAQTESHSVAQPGVQWHDLGSLQPPPPGFKRFSCLSLPSSWDYRX

SEQ ID NO: 400 - DNA, 1507 bp, Homo sapiens
gggcccgcccctggtcacagccagactgactcagtttccctgggaggtcccgctcgagcccgtccttcccctccctctgcccgcccccagccctcgccccaccctcggcgcccgcacatctgcctgctcagctccagacggcgcccggacccccgggcgcgggatccagccaggtgggagccccgcagatgaggtctctgaaggtgtgcctgaaccagtgccagcctgccctgtctgcagcatcggcctgatggggtggtgactgatccctcagggctccggagccatgtggcccaacggcagttccctggggccctgtttccggcccacaaacattaccctggaggagagacggctgatcgcctcgccctggttcgccgcctccttctgcgtggtgggcctggcctccaacctgctggccctgagcgtgctggcgggcgcgcggcaggggggttcgcacacgcgctcctccttcctcaccttcctctgcggcctcgtcctcaccgacttcctggggctgctggtgaccggtaccatcgtggtgtcccagcacgccgcgctcttcgagtggcacgccgtggaccctggctgccgtctctgtcgcttcatgggcgtcgtcatgatcttcttcggcctgtccccgctgctgctgggggccgccatggcctcagagcgctacctgggtatcacccggcccttctcgcgcccggcggtcgcctcgcagcgccgcgcctgggccaccgtggggctggtgtgggcggccgcgctggcgctgggcctgctgcccctgctgggcgtgggtcgctacaccgtgcaatacccggggtcctggtgcttcctgacgctgggcgccgagtccggggacgtggccttcgggctgctcttctccatgctgggcggcctctcggtcgggctgtccttcctgctgaacacggtcagcgtggccaccctgtgccacgtctaccacgggcaggaggcggcccagcagcgtccccgggactccgaggtggagatgatggctcagctcctggggatcatggtggtggccagcgtgtgttggctgccccttctggtcttcatcgcccagacagtgctgcgaaacccgcctgccatgagccccgccgggcagctgtcccgcaccacggagaaggagctgctcatctacttgcgcgtggccacctggaaccagatcctggacccctgggtgtatatcctgttccgccgcgccgtgctccggcgtctccagcctcgcctcagcacccggcccagacggagtctcactctgtggcccagcctggagtacagtggcacgatctcggctcactgcaacctccgcctcccgggttcaagcgattctcgtgcctcagcctcccgagcagctgggattacaggcgtaagccactgcgcccggccttgcatgctctttgaccctgaatttgacctacttgctggggtacagttgcttccttttgaacctccaacagggaaggctctgtccagaaaggat

SEQ ID NO: 401 - protein, 395 aa, Homo sapiens
MWPNGSSLGPCFRPTNITLEERRLIDWFAASFCVVGLNLLALSVLAGARQGGSHTRSSFLTFLCGLVLTDFLGLLVTGTIVVSQHAALFEWHAVDPGCRLCRFMGVVMIFFGLSPLLLGAAMASYLGIWFSRPAVASQRRAWATVGLVWAAALGLLPLLGVGRYTVQYPGSWCFLTLGAESGDVAFGLLFSMLGGLSVGLSFLLNTVSVATLCHVYHGQEAAQQRPRDSEVEMMAQLLGIMVVASVCWLPLLVFIAQTVLRNPPAMSPAGQLSRTTEKELLIYLRVATWNQILDPWVYILFRRAVLRRLQPRLSWRRSLTLWPSLEYSGTISAHCNLRLPGSSDSRASASRAAGITGVSHCARPCMLFDPEFDLLAGVQLLPFEPPTGKALSRKD

SEQ ID NO: 402 - DNA, 2502 bp, Homo sapiens
gggcccgcccctggtcacagccagactgactcagtttccctgggaggtcccgctcgagcccgtccttcccctccctctgcccgcccccagccctcgccccaccctcggcgcccgcacatctgcctgctcagctccagacggcgcccggacccccgggcgcgggatccagccaggtgggagccccgcagatgaggtctctgaaggtgtgcctgaaccagtgccagcctgccctgtctgcagcatcggcctgatggggtggtgactgatccctcagggctccggagccatgtggcccaacggcagttccctggggccctgtttccggcccacaaacattaccctggaggagagacggctgatcgcctcgccctggttcgccgcctccttctgcgtggtgggcctggcctccaacctgctggccctgagcgtgctggcgggcgcgcggcaggggggttcgcacacgcgctcctccttcctcaccttcctctgcggcctcgtcctcaccgacttcctggggctgctggtgaccggtaccatcgtggtgtcccagcacgccgcgctcttcgagtggcacgccgtggaccctggctgccgtctctgtcgcttcatgggcgtcgtcatgatcttcttcggcctgtccccgctgctgctgggggccgccatggcctcagagcgctacctgggtatcacccggcccttctcgcgcccggcggtcgcctcgcagcgccgcgcctgggccaccgtggggctggtgtgggcggccgcgctggcgctgggcctgctgcccctgctgggcgtgggtcgctacaccgtgcaatacccggggtcctggtgcttcctgacgctgggcgccgagtccggggacgtggccttcgggctgctcttctccatgctgggcggcctctcggtcgggctgtccttcctgctgaacacggtcagcgtggccaccctgtgccacgtctaccacgggcaggaggcggcccagcagcgtccccgggactccgaggtggagatgatggctcagctcctggggatcatggtggtggccagcgtgtgttggctgccccttctggtcttcatcgcccagacagtgctgcgaaacccgcctgccatgagccccgccgggcagctgtcccgcaccacggagaaggagctgctcatctacttgcgcgtggccacctggaaccagatcctggacccctgggtgtatatcctgttccgccgcgccgtgctccggcgtctccagcctcgcctcagcacccggcccaggtcgctgtccctccagccccagctcacgcagcgctccgggctgcagtaggaagtggacagagcgcccctcccgcgcctttccgcggagcccttggcccctcggacagcccatctgcctgttctgaggattcaggggctgggggtgctggatggacagtgggcatcagcagcagggttttgggttgaccccaatccaacccggggacccccaactcctccctgatccttttaccaagcactctcccttcctcggcccctttttcccatccagagctcccaccccttctctgcgtccctcccaaccccaggaagggcatgcagacattggaagagggtcttgcattgctatttttttttttagacggagtcttgctctgtcccccaggctggagtgcagtggcgcaatctcagctcactgcaacctccacctcccgggttcaagcgattctcctgcctcagcctcctgagtagctgggactataggcgcgcgccaccacgcccggctaatttttgtatttttagtagagacggggtttcaccgtgttggccaggctggtcttgaactcctgacctcaggtgattcaccagcctcagcctcccaaagtgctgggatcacaggcatgaaccaccacacctggccatttttttttttttttttagacggagtctcactctgtggcccagcctggagtacagtggcacgatctcggctcactgcaacctccgcctcccgggttcaagcgattctcgtgcctcagcctcccgagcagctgggattacaggcgtaagccactgcgcccggccttgcatgctctttgaccctgaatttgacctacttgctggggtacagttgcttccttttgaacctccaacagggaaggctctgtccagaaaggattgaatgtgaacgggggcacccccttttcttgccaaaatatatctctgcctttggttttattttcctttgggtccagaagttttcaatctctggagtttgtgcattgggcctcacccggagcagacgagggcagggctgggaaggatggggagggacatagaggattcggttcctcccccaccttgtttcttgagtgtttcctaatcacttgatgggtggtaccacctagaattcttccagcagcctgtaatgggagggctacaggttagccctggaacctgcaatcaaaccacctttgaatctgtgtgtcattaaaagtagatataaatgggccg

SEQ ID NO: 403 - protein, 331 aa, Homo sapiens
MWPNGSSLGPCFRPTNITLEERRLIDWFAASFCVVGLNLLALSVLAGARQGGSHTRSSFLTFLCGLVLTDFLGLLVTGTIVVSQHAALFEWHAVDPGCRLCRFMGVVMIFFGLSPLLLGAAMASYLGIWFSRPAVASQRRAWATVGLVWAAALGLLPLLGVGRYTVQYPGSWCFLTLGAESGDVAFGLLFSMLGGLSVGLSFLLNTVSVATLCHVYHGQEAAQQRPRDSEVEMMAQLLGIMVVASVCWLPLLVFIAQTVLRNPPAMSPAGQLSRTTEKELLIYLRVATWNQILDPWVYILFRRAVLRRLQPRLSWRSLSLQPQLTQRSGLQ

SEQ ID NO: 404 - DNA, 63237 bp, Mus musculus
  misc_feature (1)...(63237): n = A,T,C or G
attgctagctaagtttttctggactataatatttggcataattttattgttgatttttctcctgttcttgatcctacagaaagtctttggaaagtatgaggacccttcatcagaggaagttctacagcaatttggaaaaagctgagggtaatacaatcagacagctttgtaattggacctaaccctttaagtattctgatagtcctttaaaagctggtgacaacagatagatattaaaatctgtatgtatgttttatgtttataaacttcatttcaaaattattactcaagactccaagctgtattttgaatttaaaaaaatgtggtcatgtccatttataaatcatcattaataagtccatttgaaaaatattgtccagaaaaagtttattgccactatttcaaagttcattacacatgtaaaaaactatgtgaaatctttacacaattcttatgtgaaaaatgggatttctatgtagctagtttcagcttttcagacatagattggagtacggggttcagataagctgagtgtagtgagcagagaggtgctgcagtgtgagaggtcaccatgttccggcctggggtttgctatgttctgttgtactagagtacaagctgaatccctttctaatagtaactaacacaccgcttaaagctgcatttgtacttttcagatgtttacattgtttctacccagtgcttcattgttgtttcttgattaagattacccattaagcatttctatttgatgcctttgtgtttaataaaagtggttagctcctctctcactccagtgctttctgtagtgggcattcccaaatgtaatccacctgccagtctttctatgaatatataaaaatgataactactggctatctgccaagagctagattccccagtgtgtgtatacctaaactcaaaagtaattgttttggtctacacatcaatttagtaaaattataaaatcctggagatttccctacaaataaaatcacttaacactttattaaaaggctacattgacaattgacccagaatagccttgtaatacaaactagacattatctttaatatatttggagagattagcaaacctgtagtcatttgtttctcaataaccaaatacctgatatatatgcttttacatatagacaaaattactgaatttcattcggaaaaaatatagaaaggccatttcaagtaatgttcaggagttttgagttagcaattcctttctttttttcttttctttttttcttttttttttttcttttttggtgggcaactatgtatgtattgtgtttgggaggcagagtgagggagaaaccccagcaagaagaagactgggtccagtctagagttcctggtgaagagcaggaaggtttctgctcaacccatcacagaacgagagaggggctcaatagatcattcccttggtttctccacggggcttcttgagcttctcaaagttcttcaggatgatgtcatataacacagcataagcatttcggatctccatgaccatcaaatggatctcctggtactcctcctcgtccagcacatgcaccagctgctgatagtcacccacatggggctacttggctgctttggccactgtgtcacccctctcggagaagtactccttccagcttggtatgaaggctggtcaccaactcaaacaccttttcctggacagccacgccaaaattattcccatcctctatccgaggtatctgtagcagcaaccaggtagtgaccagattgagttgctcgatggcatccttgatctcaggttttaggtgtttcaggaggaccacgatcttctcattgcagttcactgggccacagggaggacctttgtcatctttgtcccctttcttcttttcatccttctcatgatggtgcttctgctcctcctcctctttctccttgactggatcaggtgctgggatgcccaacagagccttcagattgctcaggttggcgtcattgagagctggcttctttaagaacacatccagctctgagatcttcttgggaaaatagctcccaagcaggttctctgtcttgctacacaggtcttcacggaacacatccaccttggcttggtttcaggatggaccctcagtgtggccatggccagagcagggggtagcaagtcctttctaatatctaaatgtaaagacctggcaacttctgtgttccaaaggcctctgaggagcacccagagtctcttcacgggttaaattagaaactcaagggctggagagagagagagagctgtcagtggttaagagctgctattgcggaggaccttggttcggttcctagcacctacatggggttcacaatcatccctaactccagttccatgggatcagctagcccttctgacctctgcaggcactatgcatacatgtggtgcacatacatacatgtaagcaaaacacatgaagaaaaatgaatacatcttgtaaatctttaaagtcattaattttaaaagtatccaaatgattctttatggattcttttggtatctcaagtgaaaaaatcaattttggggctggagagatggctccgtagttaagagcactgactgctcttccagaggtcatgagttcaattcccagcagccacatggtggctcacaaccatctgtaatgggatctgatgccctcttctggtgtatctgcagacagctacagtgtattcatcatgtatataaaataaataaatacaatcttttaaagaaaaagaaaaatcaatttttacttaagttctaaagtctctaatacataattattcttgttggatttttaaagactggccaagaagaaaaaatgagcagatgtttccaagtcacatcaaaggcaaaatttcacataactttagtgtatttcaggttgttcaaattggctttcctttgataatatcagaataacaaagaatacctagtaagttcagctaacagagttccctaactgtcgtcaaaagggattaaatctccatagtgactgtgcctggtaccggccttgattccggtcataggagattgtgagcagataggacatagttatattagaaagcccttcccagccaggattctgggaagtactgcattttcacggttgactattgtgtctcattatcaaatagaagcctggttcagaggaaagtattggagcttgtgggtagggccgctcagtggtggggtgcttgcctagcctgagtacaacaaccttggttcctagcccctgcactgttttatgcttcaaggagtgatagaagtccactgtgtaggcaggagaatggacttgtaagatgtcctatcaccattaccagaatggtgtgtcctttatgtaactgcaagaaagcctgctgataagttgacccagcaatggagaggttggcttggatggctcagtccttttatgagttgttaaaatagcagatgaaacaggagagaggccacaagggctagccttacacatgctacctttgcagctagaaaggccaggggtttggaactgcagtcacctccagtggctggaggggcctgagaacatactcttttggagcaccagaaggaagccctgtcagctccttggtttttagccaagtgacctgcaccaggcttctcaggtccacaagtgtaaacacacttgaattgcttaggccaccagtttatggtccatttttagactatagaaagaagtaagcatcttcccctggtgctatgatgaacctctgaagaaccagatgagggatgaagggccctttccagtttacaattggacagtccatctgcagtccctaagcagaacacagcaaaagccatcaaagtggcagctagcccttccttctcatcccagcctacaaccacagtgacactccccaccccagctgtcaaaatggtggcccctatcaaaaatggtgagatcctgtcaaaatggcagcaccacatctcctcagcctgcagccctcccaggagctacccacagtggcacatcagctttcccacatcagcaggaactgcccctcaagagctgtccatggaggtgatagctttcctgcctcagcctacagccttggtcagacagcactgcaggagccattcacagtggcagcctctcctctccggcctccctgagcatccccacagagatgataccttggcaaaaggcagctgcagccagaaaggacttcccaccctaacccatgggcccaacacagggaaacaagggtggaaaaaaaaagccacgaatccctaaaaaggaaaacccaccaatctctgagctccccaacctcaggacttgaaatctcaccaattctcaatccagaaaagctccgccccctcagatcctatgtaagccctaccctttatccaattccctgctgtctgctcctggaagcagagagcagccatccctggattcacccctccacacactagactctccaataaatctcatttaatgagatttcctgcctggtatgactctagtcagaagaagacaagaagcaataaagagaagaagagaagcaaccgggctgaaacttctgagctatgtggttcctcaactcctgtgtctcaggatgcccttcccttggcacactgtcccacctcagagctgtgtagtttctgaacttgcgagtcccaagatgcccttccatccaagcagaaacataccattatggtgggaagtggaggcaccaggagcttgaagcagccatatgacctctgcagtcagagagctgtgaacactccgattagtttactctctccattttacacactccaggatgttagcccagggacacacacacacacacacacacacacacacacacacacacatgcaagttgtatgtggaactggagttacagctggttatggcctgccgtctgggtgccaggactcaatccaaagtcctcttatctggttatgcactggtgactatactcagaagcctgtctcctcaacccagcacatctgggatgtgtgccccatctctacagatgttatctttcccactcagctgtgaggactgcagtcagagcggttgtctttcttctgtagcggagggccttctttgacgctttacaaaaatctaaaatctctgctcaccaggtccagtacctgttgctgcattttgctggctccgtaccttgtctgtcatggagagtgactcactggtgcactcatggcactcactgctgttggatgtctgagactctcttaagccacagcgggtagctgagtgtctgctgggccatgtgccctctatttgttccatagttggaaccggcgttggcatcgtgtatgctttgcatgtctgtctcttctgtaaacgtggctcatcgctgccacttatctgtccagtcctcatctgtacacaagaccattgcagccttcaaaccattgtcttgggagaaacacgcaaataggcatacagtatttgaaaactctttcattgttagcctttcaaaacataaaagagcttctaaactgacatagattagtgtctcctgttccctaatttaattatgcattgatatatttatcatattgtcaagcatttgtttggtttgtttgagggtttgtttttctttgtaggaaacaaggtctcactagcctggaacttattatgtaaaacaggctggccttgacttgggaaagatccacctgcttctgcctcttgagctctgggattaaaggcacatgctgtcacataggcgtttgtttgtttgtttgtttgtttgttctggtttctgtttcggttttggtttttcaagagaagttttctctgtgtagctttggctgtcctgtaactcgctctgtagaccatctgaccttggactcacagagatacgcctgcctctgcctcccaagcactggcatgagaagtatgcccctatagtgtgatttatcctgtgtgcctggccctttcaaggatccccagttgctcgtaaactggccctttaagaattcttagctgtttgaactacttgaccctcatgaccttcagtgttggtggcttcttgaatttctgggaaggagaaagaatataaaaaagcaggccgaggctgagaaagagcattgggctagctgagtgagaagacagttgagccagagatgagattgttaggagacagttgagccaggaggagctgagctgagtagataggctacaacagttgttttggtttggaactgagagaaaggagtgtttaagcagactgctggggaactgagagaggaacaaaggattgggggaaacatttgaaggggctgggctagaaactggaaggagggcaggcagtgagttaagagaactgattactgttgataggaaatgaaacattaaaataaataaaaagcacacattttacatgtgccaccaccgcctggcccacatatgcaattgtaattgtaattgtgtgtgtgtgtgtgtgtgtgtgtgtgtagggtcccttccatcccatgtgtgaaacttcacttcgtcgtttgtgataggtctaggtagagctgacttttccctttttcagctccatggtttgtgggtgttggttttgtcttcatttctagatcattgagatgttaattctttagttctatttccatatctcccatacaccagcctcttgtctcctgtctcccagtctgtccctgttttctgccaagcatttagctggtttaaggtgggctggaccacaaagagccagagcttgcgattccctcctttcctttacagctcttgagttatcccagtgttgctgaacacatcatcttctgtcaaatggacagttcacttcttgagggctttttgcatgtttttcccttgggtgcatttgagggagtaaagttccaagatgctcgaaagccttgagtatttggattttaacagcagctcccttgagagacttgacaaactaatacttaaagctgactgttccaaggtgccttctgttagtccttacctaacagctgtgctttagaacaactggcccagtgacagtggcccgagtctagcctcctattgtccagtggagaatggcaaactaaaaatagttggtgttcttgccagctgcacgtgaagatgtccccgtttgcctgtgccactttcctctggctacttactggtgaggactgtgttactgctgtgactggtgttagcagtgtaatacccaaaatgaattcaagaccacccagtaccttcccccttcaaaaaggactttccatactgaactagcaggcaaagtacagagccagataaggaagctggctgactaaacaaatgtaaaaacatagttttagtggtcaaaatgactaagcttacagctaccaaaacaatattagctgttctcagagaaataaccataacaagattagcaattctcttgcccccctaccccacatggaattccgacaaagaccacaaaccaccttttgttgcaagaattcccctgacgttaatagctgtgacgttaatgtactattactttgctgaccaaatcataataacccaccatggggggcaagcaaagtgagggactaggccaaagggttacttagttactatacaaaccaaccaatgcctgaaagggttacttgctacaccagtgagaaccctgttgctcaaatctgccccttacaaaggtataaaaagtgtgatctttctttgttctgggtctctcctctggcctacgtccctaacagaaagaaagaaagaaagaaagaaagaaagaaagaaagaaagaaagaaagaaagaaagaaagaaagaaagaaaggaaggaaggaaggaaggaaggaaggaagaaagaaaggaagaaagaaagaaagaaagaggggagtccctaacatgttggatcaataaaaatcctcatgcgttttgcagcgatggcggcggtctctgtggtccttgtgagtaaaggtcttttgacgaactccaacagcagttctcctgatcagtctttttctatctgggggttattgatattcttgggtttgtagccctgtgggtgtctttcacactcttcctccgggactacagttgcataagttaggcccctcaaagtggggtcatggttctagtattctttgtccttttgtttttatagccctgtgtggctgtggtggttacgtgttgccgtatgctgtgtggtctcgcttcttgctgtcccgctccttcaggctgccctgggacagcagcggttcttttcctctgatgcctaaggctagtcctgctcgctctcagctgctctgagcacagtttgtttccctctacggtagcggaagctgggctgctccagactgtgtgtgcacatgctctgctgctgctgctgtgcacttcagggagtgtccttacgtacagtgtgaagcctgccctctgcctctctcagatgtcttcccgaggcgttctctctgtttcttagattggtttctggactatggcttccctcatcctgctgaagtctggaaacttagtaggcagccccaggctgccttgatttcttgttctcagggctccctgaactgtctactgtggcaattgctgaggtctggttacttttccgtgtataaatgggaactgtatccactgaaggtgttgtacagaagtagacctgctgacttctaccttaatgcctctctccctctgacagtcttttaacgcagtgtcagcacatgcccatgtgagaggggatccaatgctgctgatgaccagttagaagtgagcaaatctcacagactgaagatgccaacctgcagtcctagggcagccacactaaggccgggtgtcaacgagttgcatcctttctgtgtgaattgggagaaactcagggcaattactggggagcctcacagcctagattctgagctgcagacatgaaaggaaggactgaatgaggcagggctcagctgctttccagccatgacttgcccgtactcccatgtctgtccatgaaaggaggctggcctcctggcagggcttcataaggttcaaaacgaagggctagccaagccaaaagaatgtgttcccttccccatgtccccttgactttaggacatgtggggtccccaagacataggtttatgaaccccaaatgtcggcttggcctgtgttcaggatgaataccaggttgctgttaagggtcctgagcgcttggccagaaggtggcagcagcctctagccttgttccccttgctgtgaggaacgctgctcacccaccagtattgtaaacctgagtgaagtctctgccagtgtatggggccagtgatagtctgctcacctgcagcgtgcagagtgcagacctgctcagttagtctgagctgctgcatccatgactctccaggtcaggcctagcctgtacttggggtatctgccccagggttctcagcttgccggtgttacatggcctttcttgctcatattcacacacccaagtctcccttaccactactggtccatcctgtgtagagtcatggccagtagccaaccccaacggaagtctcacctttttacctagcaattccttttgtccctaaattcggtattcatggactctgctaccctaccctggcttgtcaccacctgctgtcaagcacacctttgtccctccaaggagccttgttcccactgaccatctttcctgaggttccacttcttgtcctacagacgttggttgtcagggctggttttggccacaccactccagcaccccacggggaaaaggagatgggaccacggggtgtttgcagagcccacaggatagctgaggaacccagccgtcagagcgaggtgctgagtttggggacctggagaccctccaagcccatccggccctgcagacattccaggaggctcccctctagtcccagccgcgctccagcctcaggtgccgcccgccagcttccgccctcgacagccgcgggcgtgggagccgcagtgggccgggcgcggtctctccttagctcccgcccccggcgcgtctccagcgggcgcagagctcggcaaggcgctgggacggtggggctctgcttgccatggccccgggcctgcggggcctcccgcggtgcggcctctggctgctgctgggtgagtagcccgggctgcagcgttggtggtgacctggggccgggagggcagcacctgaacgcaccttactcagggcatggggtctgggcaagacagtagagtggtgatgggggcgggggagggggcgctgcaccaccttacgctgccacggagacgaggtggcttgggcacatcatccagcgggccatccgaaggcatcagcaacttttgatcatacaatgggcagcttgctttccgggagggatagggtcgcggggatcccctgtcggcacttcagttctccaaactgatgcaagctccctgagccagaagcatcttacagatgtgcagtcttcaaccagagccacagcttagggatcccgacactaaggacaactggaagcctgactctcacctacagcagttgctggttgagactattatttccacggagggtgggaggctaggggtgaagggtggttgttgttggcgtgtgtggctaataaatattagaggtggcagacttgcttgggattttgttttagattgatcagaaactgtagcccaggggtgactaacaagaaactgcccatctcagttcccttgtctgtaacgttctcaggacccggggctgtcatacctcttggacataattcaggtacatagctacattttaacgaaagcaaacaaagagtcggtccagtgtccctggaagggcctgtggcttgatgattcttgtggtcttttcccatacccatggtattggtcagaggcacctgctgcacaggctctggtggtggcaaaggctgcccactagtgctgtttatagccaaggaagcagcttggggcagtgtggcctgtccccggtgactgggcaggaacagcactggacacctaccgtttgcagggcagagctctcctgtttttaatccttgccagggagtgccagatctacactttaaaaatctgtttctgtgtaatagaatctaaaggtggatttgccccttatatgtgttggctaaacttgcgtgaaaatcaaaaccttataataatgttgctgtctttggctatgttcagatccttttggcttgatgtgaaattttagcttcagtttcctaagagatgaacattagcagcacagggagctggttgggcccctcccccacccccttttatttaagaataagcaaataaattaagtttctttactagtgcaccagagtctgcaccctggaaggcttgtgtaaatagaacacttatgcttgaccacatgtaaggaccgcctgtgtttaccaagaaaagggctctgctctcagtccaatgacctgtgctcttgacgtagccctgagcagtctggctgatgttatgtcttgggagaacaaacacaactctatgaggttatcggtgaattaatgacttgggaacccagctgtgatgagcggaatcactgagctcatagtgttcttcacgagccctgctactggccagatctccttggagatagactttgatatcttgcatggctatgtggaagaaagagttctgtttttctttaaagtatagtaatctgtaggatgtgagatcttgatctgggacgcttctataaaccagctggttcttctcttagtcaacctgctggctttattaagagttaccgaaatcccagcagatacgtctttttctcttcccgctgactctcctctgtgtgctgttgtgtttacaaagcatctcctgagagaccacgtgcactttaaaacattttcatgcataaccatcaaaaggctctgagctgtcaggaaaggcgagctgtgggtacgaggcaggccagctcggacagctttgactgctttgcaagctgctgtttttgcaaacttctcttgggcacagcagtggatcagctcttggatcgtctgtactggggaacgcatgctctccttgtctgtcatgctggggacctagaaggggggttggggatttgagactccggactatttgttgaactatatataaactacaagtgaaacggacatcccaggaagtcggtgtgttgctgtttttatctggacacggttcttgttgtggagcccagatccagggactccagcttgctaattgaatcactgtgtttacttgccatcagtgtgagcttggagacagagtgattctttggtgtttgtccagcttccctgcatacatgctgggtctgtgttcagactgtcagtccagcccagggctgcagaccagtttttctacccatgctaggttgcagtaacataggggaacattttagatgcaatcctcacttggggcaaatgactccttggaaaagtctcctgtgatttcctcacacatacccctgaactaaccagtttgatagtttctgttcaaatccaaactggcatctgggagagtgtgtgacagggacgccacatgtggtatgaatcccagtgaaagtgctgagccagggagtggctccccaaaggctcaccctgccgcacccctcctttctgagattccatgtgtcctgctaggctgtaccctcactagagctctggctgaagcctggtccctgggatgctcgcaggctgcacggtcagttttctgctggagccccggaaaaggtgggtcagtttttagggtgatctgagtgccagttgccagtgggcagcctgcaagccacaggctttccatcctgtgagagaggagtgagagaaacagatgcgctcctcataactcttgagccccaattggaatccaccccaggaacccatcaagtttgagccaagtgtctaaccttctatgcgtcccatatctcggagatcaaatggtgtcaacacaaaagacagctagaagcctggtaaatacctctccttagctgtgccctacagcacaggacatgccccactcctgtgaagagcgacatgtccccaaatgcccatggttcgaggtggagaaatgcccccattttaaccaggcagctgcccctcttcggtcgcctctgtatctgctacaaccagccacatagtcaaagtgttcttaacctgggcatggtggctcccatgtataatctcaacagtcaggagactgagatagatggattataaaacagacagcttggactacatagtacataaggagaccttgtctcaaaaaatatatcaaaactcaaaatgttaccaacaacaataatggcagaattggagggagaagctcagtgggtcaaggccagtcatattagaggactgagcttgaactcccagaacccacatgagatccagctccgaggcctgtccctccagcgctcctaagggcggattctaagagagacaagggagtcagggagctgtcaggcacacgtgtctggtggatgcagccgaaaagcagcaaagagtccctgcctcagtgcaggaagttggtaaaatgccactgcctgcggttgtcctctgctcgtacacacgtgtgatctcaaaagtgcatatgcacacctgccgctgcaactaaagtgtagccagaagacatgcagtctaacaactactcctatggcgcttatattgtgttatgcattctaagccacttggagatgattaagacaatagatgaccggatttgtggtttgtatgtaaaacaccactctgttttaggtacttgctgtggacaagctgaggcagctccatatcccatacctgggactcaaacaaacaaacaaacaaacaaaacggattcatgtaacggaactgggttgttaaagaaactaaaattctcactacagggttgtgcaaagaacctggtcctggaagccaaattgactgaagtggagtcagagcctgttgagctgaagctaaactttaggaaggccagatccgtggcacttagaggaccatgggagcttgaaggaaatggatgctgactgagccgtgccttataaaaaccccaggcttggggcagtgcatagttttaatcctagcacttgggagatagaagcaggcaggtctctgtgagttcaaggccagcttggtctacagaatgagtttcaggacagccagagctatacataaacccctatcgagagaggagagagagagagagagagcgccctgggctacatccaagcttgggctggtggtctacaggggctagagctggccagatttgggtggggaaggactctagggagccccaaggtaaaaggtgtaggacaggaaccttgggtaaagtggactttcagacaatttcagtataagcatatgttgtacaatatttagggacatcctcatctaagattctcttaaatttgaattgagtggagcattcctgacatttgcatgctgaatgataatttatccatgcagcctagggccaggtgcccttggacagtagggtgattgctggaagacagggatctatgtcaatcaagggttcacaagaaagaggcatggcaggaagatacttagggcaggagccttgtccgggtcagcgccaaagcctcaggcagaggggacagctgcaaagagaggctggagacagaccctggcttttgtgaaatcctggggaaggggaggccaagtccacgtgaaggccccggagaactgagtgtccacaggttctacttctgtcccagcagccatgcaaggatagactgaggcaatcccagttccactgggcgccttgacaagtcaggagggatcaaaacaggtaactgggtcacacgtggatgattctctagttatgccctcagttgtcagaccttttgggcggggggatggcagtgcagtgggaatccactgaacttaaacatcagcagtctggggttgagacctgctgctcaagaaaccatatttccattgaatcttcagccaagtctcattgaatgactcctctctgagggttacccctttggagtctcattgaatgactcctctctgagggttacccctttggagtcctgtggtttttgtctgctgctacaaatgaaatgcattccctcaactggttcctaactgtctgaactaaagctaaaaagcacacttttttagaaaatgtattcatttgcttgcatgtgtatgggtgtaggcaagtatatcatggctcacaggtggaggtagagggcaacttgcaggaaggcgctggtgctctcttgctgccacataggtcctggcaatgagctcctgtccacaggcttgctgataagtgcctttgcataccaagctatgtcctaaggcccaacagacactctgtgtgtcctggggtggggtggggggtgggtatctctcttctctttgtgtttcttgtttggtatttgagctcttttcctaagagctcttttcccaacaagtcactaggacagtttcggccaggaaggtcctcttggctttatggtttttcttttgttctcaccctggagtggggtgggggggctggcctcagcagccttcctcttctgtaaactgtggtagtaagtctgctaaatatctgccttactcttgtagtacgggactttcatctcattgtcttatagagatgagcacatgacggaaggatggaggatgctcggtctctccacggatgaaatgttttgtcacactaaggaagaaatagtaacacacacagagcagcttgccctgctggcctgccgagagtaataatagagacagccaccaggtgccttctcccttcctggatgaagcgcccaagaggcacctgtttgttctgcccaaactgcccgaaggggtctttctcattcatttttcctagttaggtcactcctccactttcccctgtggctttctctaggacagaggttcctttccacactaaccaccacagcaacatcacctctgtccctgagtaccaaggcaggatgacagttcctgcaggacctgagagtcctcacttctccctcgagtcaggactgtggctgactaccttggaggggttttccttgcctgtcttgctgcttggaatcttgaatcgtctttgtagtgacatctgttgatttcctaggactgtgtccattccctcccatcatatttttcagggaattcctgacattccatagtttgtcttaagattccccaccccaatggctctttgggggggggtaattccccccacatacactgagtagaaaccatacttcagatttctaatttggaccctttgctgaattagcaattagtggtccagtctctcaggcagcaagcacggtctccaatcagccctcaatctcagaggagcagtcaacactgtatagagcactatgaccagagacaccatggagaggaaaggatgtgcttcgtcttacaccctgtagtccagtccatcatccatggaagtccaggaagaatctggaggcaggaactggttcaggggacagggaggagtgctgccttactgacttgctctccagggcttgcatgaactattttcttatgactcttaggatcaacaactcagggatggccttgcccacaataagctggcacttccacatcaattaggaaatcaggaaaatgccccacaggcttgtctgtaggtaaagactctggtaaagcattttctcacttgaggttccctcttctccagtgactccaacttgtgtcaagttgacatcaaactagccaacgccgccaacagttcacccctgggacaaaatacttgacaaaatcaagtgaacagagtaggggtttattctggctcaggttcttagaggttccagtctgtggttgcttggttgtcttatctctggactgaggtaggcagaggatggctacaggaaaacgtgattacacatagcttcccagctcatggcagaaaggaggccaaagggggtgtggaggaaaggagccagggacagaatctagcccctcaggatctactcccttcaacgttacaattacctcccaagagtctattaaaatacaaccccaagagccaaaagccccgccttggtactgtagtgctgggccttcagcatccatcatccggacattctgtgtccaaactgcagcacagagattaagggagcacctttgttctctatccgaggcgtttcaggatagcatgtcctttgtctgtaaagctataagtccattgcacggctaggagttccgtgtaggctatggtacatctctaactccttccatatttgtggggatcttctaggtccagtcttgtgagctggtgtttttatgattcaggaccaggacagagggacatcgcctggtgttctttgtgcctttccctctgaagagtcagtgctggtgagcagctggtcatttttctttgactgccgtatccacttgtgcgagtgagcgtgctcagtcctccacttggcagaattctgcaaggttttgtctgtcttgtgcctgctgttgatatctttagacttttctgtttgcggttttagttcctctttggcacagagagcagttggtaaatatattttaaagttccattggtgagggatcccagacagtcactactgctttttattacaccatggttgggacaacagatctgccatggctccccacatagaatgaccttcagatgactcctgagcctggcacattgacttttgtgactggccatgagccactcagtccacaacacagttttctgttaattctagccatttgactaaaactctcacccgccatctttaaaaagccgtttttctttccaaatgctttctatgtcaaagaggaaataggaaaccacaaacagaaaaattctgaagatactgacatcaggcacaagacagacaaaaacttaacaaaattcagccaagcagggactgagggagcaggctctctcacacaagtggataaggtgttccttgtgttaggctaaaaacccaagtcctctgtgtccttgttcatgtcacttgtgtagatctgtgcactttatagacctcacacttgggagatatccactctttctctccatagccttgtgtgcaggagacagataagccctgccagtcactgctgcagcctacttagagtactgcctcctcttcccacacgttgcttttgacattttattcttaattgtgcttgccttagtcacagctctctagaggagcagaacaggtagaatgaatacatactgtgaaaggggacttgctagattgatgtgctccatgtgggttgggtagtgcagcaacagctgactacatactgaagagactgggaacctgatagctacttagttcacaaggctgggtgcctcaacggtcccagtctggtactgaaggcctaggcaatccccagagagcccctggtcttcagtccacagtagaaagtcaaagaaactggaggctgatgtccatgagagatgtcgatcagggaggaggcagcagcagcagcagcagcagtgtagatgcgcacaccagcaagaagggaaggcaggtgagcaagaagtggctttcctgaggatctctttgtatctgggccacagctcgaaggcattgctcactctgaggggagacttttctttccacagtttatccctttcagaaaaaaaaaaatccccacacagacctgcctagaagcatgtctcttagtcgatttcacatccagtcaagttaccaaccaagttccctaaaggacatctggagttcactttcaagtgtacagttaagtgtgctaaggacattcatggagtctttagcctagctacatccagaatgcctagaactctgttctcattaaacactgatgccctcctccttcatctcccaacccctggcagccaccaccccatgctctatctagatgttagcttcagtggtgccttatggaatccgatcctgaccctgtggagtttactttccacatgtgtttgcgagattaatcgcattacagtgtgagtcaagttttccttcttgtgaaggtcaaagagacctccactgtatggacatatcacttctggattatttctccatccagggagatgtggagcagtttcttggttcccactggtcatgtggtgtgcaaacacctctttgggtccccgcctctttcagttccctatgatattcacttagaagggttgctgcatgctgcatcaccgcatggtgattctatcttggattcttttaggagccaccgtgctgtattccacacagcctcgccacctcacactcgtgcctacggagcacagaacctcctcctcaccagcaagcgttattttctgggttggctgctatgaacagcatcgcatccattactctgtgggtggaaccacactttgtcagggaccatgttatgatctatcacttttaagtcttagattgctggaactaagcactgctcattgttggggtgttcaggagtcccttgatggtggttctcttttgaatctctttgaaaggtttttcatgtttgtaattaaaatagaattatatcacattgccccttccctttcctccctccagtccctcccaggtctcctccttctaaccccttccaggtctatctcaaatccatagggtttttttctttattattgttacgtgtgtgtgtgtgtgtgtgtgtgtgtgtgtgtgtgtggtttatgttcaagtgcgcacaattatgtaagtacaacctactgagtttgatattgctgtttatgtgtgtatatggtttttgggaggaccactttgtattagagaaccaggaaggggctcatccctgggagaaggctaactctccttctcctggcagcattgagacccaggtagcatctgacgtttccaaggactgggaggactcattgcatttgcttgcctgggtctcgtgactttgggctggctactccctatcatctaggctcctcaccagaatgaaggtagcacagggtcacatcccttgggacagttgtgaggatgctgcccccatgcagagcctggtgggacctggggcactgtcagtggtctctgggaattgtttgcttttctggttttaagacatgtttgggagttggacgtggtggcacacactgttaatctcagcactcagaaggcaggggcaggtggatctcagtgagttcaaggacagcctggtctacagagtgagttccaggacagccagggctacacagagaaaccctgcctcagaaaaacaaacaaacaaacaaacagacagacagaagaactgcatttggggttttgttttctgtttcccattgttcgctacttgtagagacatcctgtccatcctgtccatctgtcctccttttcttcctttcatttttcaaattttggcactttttgttttggtttggtttggttggttttggttttttgtatttattcctttctcttttttaattttctttctttttttgacacaggtataggattttgattgttggtgtacagggaggctactgagttgtgtgttgcttttgtttcctggtgctttgctgaacggatgggtaagatctagttttcttggggagtcctctgagtctttaagtacaggtctatgtcagctgcaaatagggatgcttagacttctcctttcctgtttgtatctttgtttctttctcttatcgccctctctatgagtgtaagtgctatagtgagcaggagcaacaggaagggcccctcaaggggcatttgtgttgtgtgcagtgtctggtcgctgggaagcatcctctgctctccacacacagccactgcatacgtgaatacatctgcatgtgcgtgtgcgtgtgcatgtgtgtgtgctttggacacatgcatcttcgtgtgtcatgtgtatatacacacaggcagatacagaaaaaagaagagtgagcataatgctcactttccttattctgatattggaggaaatgctttcgctttccctgtctatagttttctgtatacagcctttgtcacattacaatctactccttatgttcttagttccctcatgaagtgacactgaactttctctaaggccttttccacatctacagaggtgatcaggtgatttctgtcctacagtgtgtttcttttctctttcctttttaaaatatttattgatttattttatataagtacactatagctgtcttcagaaatgccagaagaaggcattggatcccattacagatggttgcgagccaccatgtggttgctgggaattgaacttgctgagccatctctctggcacccctaaagtgtgtttctatgttgtgttacagtccttggtttcatatgctggagcaactgtgtagcccctggttaccttgatcatgactcaccttggtcttggtgtgtgcttgaattctatatataggtatttgattgaccattttcatgtctatgctcaccagcgaaagtggactaatagtctttttttttttttttaattttgagcaggcctcactatgtagcctttgttggcctggagctcacagaaatccacctgcctctgcctccccaggtagtcagactagaggttgaacatgtcagctggtctacagggcaggtatgtaaaagtgtgttcttcagttcgaatgactgtgtagtttctgcgattggttttgttacttatttctagtttcatttcactgtggtcccataagacactagaaaattcccgactcttttacctttgtctcttttacatttgttaaagcatgctttgtggcctagaaggtggtctaatcttgagacagacccttgggctgccaagatgtacattttacctcctctactaggtaaaaggttccagacagagcttttcaaaaaaaaaaacaaaactggggtgccaccattagtgtcaaacaatgaaaaccctttgttctcctaggactgtgtaggatgagctgtagggatgtcagagccacccacacagacagaagatgccctgaagacctggtgtggggggaaagatggtgcagaggattgttctcagcttgccctcatgttctcgggatgtccttgctctcttcacctccagttcctttgtgggagccatctgtcactgatgtagtgtcgtgcaaatgctgctcccaggtgcctggttacttctgggcatcgttgtgatgtggcagggaccgtcatctgctaggactgccctagagtctcagagcctctgaggacagaggttcccctaggaaccccctgtgggttactgctacctgagaagtcctgagcccacatctccagagcgtctgtggtaagcacgctcaggatggcggccggcactagcactctgatgtcatccacgcgtgatggcttctctctgtgtgtgatgctatgtgtgctcagctgaggcacatatagtagtagagagaaggagcagaggagcgatgctgaattctgaagttatgcacagccgaggggcacgcctgtcctgacaggcagctgagagagcagcattgtctccgtctaggtttcagaaggcagcagtccccagtggttacatttgcctgcacatagagtcggccttttgactccaaagcttaaagtttgaggcagttttactgtttgttgttgcttgttctttatgagagattaggatgctcttccaattacaaaatgaaactactctctgcctgcggagctgcccgtggccccaatccacactctccaaggcaggaagggatgagtttatgagtctagcagaagaaagatggggctgagcatagcaagtctcccccttgggaggtggaggggtgatctgagaagaatgggaggtacaaggaccaggtcaggtagggtcagctctacagctagaccagggaggcccaaagactatccaggagatttttgtcttggcagaatgctgggggtggggtggggggaagcattctcctggaagtgtggaggggacatgattggtccttctgggcccccagcctccaagtgcccttttctgttggggaccatctctccacagaggcagcacagtctctcctgtgtactagctctgcaggacaggagtgcatctcctattcccctccctggccccttcacaggggacttggagacaccagatctctttagctgatccttggtgtcgacatcagcacacaccgggttctaatgcatggcacccagaaccttccctgaggcacccccttctctgccctaaaactgactcttccagaacaggaaggaaggccaagtcactcttgatcctctccattgcctagccagtaccttgcaccagtggtgaccccaggtaccctgccttcctttcctagctgtgtttcctggcagtggtgtgtgggtatctcaggcatttggtgaaaatgtatgtgccactctgctgcgtgccagggacgactgcccctgtgagtcagaaaggagtgggaggtgaaagcagggcaaatgtggttttaaaaaaaaagtctttgccccctcaccctgagcaccccggatgtggctgtgtctatgtctatggagggtgtgctggcttcctgcagctatgggcagctggaggaggacagcttggggcacggagttcatgaaagggggagtcatatgaggtacaaggcaggtctgggtgccaggagccataaagtataggggataaatggagagaggacccttgacactcacacgaggtctcatcccagcttctggagcttgctgtacatttgaggcttcctgactaccacaggaaggcttccacaggggatcctggtgggacagagatggtgttaccctttccccagcctccactgtggctgacatgatcctcaagtgtgcgctgctggctccgaggtccccaggtgtgctcactgtactcttgtggcctgagcatccatatactggctgcttcatgagctcaagtgcagttcaagtacttgctggggagtggtgccttgctgtcctctgtgtttcctagggctctaggttgggcccagaaaacttccagcagcccctccatggcccctcaagagcagaggtctctcactgaaggctgtggattgcctcccaagagcgatttccatctgtcagcctttcccttggacaggtctccactcacgacggctactccttagcttttcctaaaagtccccaggtctcagctttgttctcaggactctagtgtgtaccaacacctagctcctttcctcaccagccccatctcagagttgtgggcatctctgtgccaagcctaccatcctgacacaacctccttcaacctcttcctgagtggctagcctcccagggtatcctaccctatccagtctcgacctattgattagtgatgcctgtggggagtctcagactggctggcactagcctggtggcatgtctgcctgcagtgagagcaagctcagatttgcagagctctgccaccaggccacacgtggttccacatgctgctggggacagggctctggtgtgctatttggctttttatttttaattaaacgtagggcttcagtttcactgctttggcctcactgtcaagatacatgctccagagtctgttattaccatacaaggatggtcccacgcccaactcactgccagggaattcactgtgtgccactttgtgaagttttgctcggtgccataccaccctggcttcagaaacactgattctagccatgctgggcaccctgtccagactcaggcagtcctatgccagcccttttccctagaccatggtgggccaagcacatgagtgtggagatcactttctaggggatactccagtttctgctgcatagctgggcttcagccctcatggatatctcctgtcccctggggtccatctgtcctggtcaggcagctgatggctctgttcctatgatcagaactctttctcctcctgttctccgcccaacttgaaacatctcgctctctgtgagctactcagtgcctctgctgtgtccatggcctcagtatccggggctgggctggcagatgccagatctgtatccttccaatggtccacccattaatgtatccttcctggcagcactgtgggtgacactgggtggtaccctccagtccctttgttccccaccctctctgtgctcctcagctcttccttacctgccccaccatgacaacctcaaaggacaggccttgccctttgacttcactccaagcttctctagggtcttatctcaagccagcaccagagctacatcttgggctatgagagccaggaccaaattcagctctggtctgcaccacctctggcactgacacttcaactcttttctcatgtgaggcctcggttttctcatcagtaaatagatagttatgatagggccacccttcaatagaacatgatggagctaacagttctgaagagcccagctctggctcccctgtgctgtctggagcctacgggccttgcgtctccaacctctccagaccgtgttcctgagcctgggacctgggctcagtccttgggtcactctgcccattgctgcagtgggctccctggtccccagagcagtgaggaacaacttgatattctcatgagacaggatgttaaacaagactaggctttcccctatccctcttctaaggaccagcaaggctcccacagtgccctatgcagtactagatccctgtactgagcctcttccaggaataaggactaagctggtgaatagaactggaccccatcaggagaagatgcccagtgtggtctaggagagggatggatggggggtaagcagccagactctgagcaaaggatgtgatgactgtacccttagcttcctctcacagaggtgaggatggactttccacccaaagagatcaggcaacatgaggacaggaaccagagaaagaagccctctctaccagctcacatcaaccacagctagcattccgctctggggaaataggtcaccttcgagtttgtgcaatgtggagcttcggggatgatttttgatctcgtattttcatcagacaaaagaggaaagacacagttcatattgcaattcgccagcttggtttagggtcgctaaacacccaggcacaggtaatatgcccagggctgggtaatgtggtacacctctaggtgctaaattaacaaggtgggccaggatggtctcctgcaatccaccctggagctgcagtggttcctcctgtcatgtttagatcactaactgactcaggtcagcccttgtttggaagtcggcaggcctaggctcaaccccagccagctgtgcctgaggcctgctgccttttcaaagcacagtggtagctagttttgattatcaacctgacacagcatagaattacctgagaaggggatctcttctacattgggttggcctgtgggcatgtctgtgggaggctgtcttaactgcactgtgggcagcaccattccctaggcagagagggtcctcaactgtgtcagaatggagaaactgagtagagcacaagcaaatgaacacatatgcattcactgttccctgctcttgtctgtggatgccatgtgaccacctgtgttacgttccttcctcccggagttgcttttatcacaacaaaatgaaactcagacaggtgttatctcctgatcacacagacacacatttctgggaccctgggatgggctggaatggaggcggggagcaatggaagaggccaccaaaggcaatgagagagagccagtaggtaacagcccttgtatgtttttttgtttttttgtttttgtttttgtttttttacagctcaccatctcttcatggtcactgcctgccgggaccctgactatgggactctcatccaggagctgtgcctcagccgcttcaaggagaacatggagactattgggaagacgctatggtgtgactggggaaagaccatacagtgagtcctatcaggagagaaggaggctgggagacatgtcctctcctttacattggggcatcaggccactgggtctggggaaagccagagtctaaagggacaggatggagcggaaagggagtctcagtcattggcagatgtttatgacatgtgggtgggaggagctgtgtcttcgatggctgtccaggtagccatgggtgccaggggagcaggagatgaagggttcagattagatatccatatagcaaccaagtgtaggcacctggggatggttgagccctattcagtgtctgaaccctgagtgactgtcttgtgacagaagccaggccttcagggatctccctgctggttccttccatcctgctgtcaagccagagctccttcccaactctctgcccagcccaccctgctcaggcctcagaactgcttgggcaggctgtcactgaaggggtggcccacagctccaccaagggtggcacccactggacctttctcccatgagacctagtctttcaacccaaaggccctcccttcttcctaaggcagtgttttcttactgactcttaggctctagggacccacaacaggcttggaggttctccctggtagagcccttccaccagcaggagcaaggctcaaagcttagcctgtccaagacaaatgttctaggctttgtttctacttcattgtgaggggttgggagcatcatggagctacagagagtgggtgggtaaacgtgtgtgtgtgcacatgaatgtttgtgtgtctgtatatgtgtgtgtgttcatgtatgtgtgcatatgtgtgaatgtgtgtgcaagtgtatgtatgagtgtgtgtatgagtgtgtgtgtgtgtgtgtgtgtgtgtgtgtgtgtgtgtgtgtttgtgtgctgtcagcttcatctgaggttagagtgttacagaactcaggtctagaagctcaggtctcagacaaaaattgttcaagagaagagcattagagatgaagagagtctttgactcttagccatggaacagaaaatcagggaccagctccttcagcccagggagtcaggaaaggaatgtcaacaaagagagagactgatatgataaggggtggggatgctcatgtcatttctggaaaccagcaagttgttctagaaactcagataaccctgatgctgatgctgcctccaccgctgccaccgccactgcctcctcctcctcctctttcttctttaccttgactttcctagcttctagtcagggtagcctcaaaagggcagtcaacagccaggcaaatctcggttaagttcacgctgtaccatggcctggacaaaatgcttttcaaatgatctgcataccatccatgtgtagagctaaggggaaactgacccagcgttggaggcagcaaaggagacagatgcaatatgaaggcagagaagccaagcctcctttccagacccagacccttgacatctacaggtcatgggaagtcagtgttgtcatcagaagcccctcgtgtccctgggaagtcacctaggcagcagttaccaccaacacagcagagcagccatctttagctgagctcaggggaattgtgtagtctccaaactgtacatctagccagctacaagccagggaagctcagaggtctatctagacttttctctgatagcacaaggaagagattcacagtgaatggactgtgacccagctctgatgagctgcctggtgtctgaatggattttaaggttgactgaggaacagttcacagaatgaggttttcctccatcaccacgcacagcacatagtaggtgtgcagacttgatgccctctgataaccggcactttcttctagtgccagagagaaatgagagggagtcctggggactcatggtggagaagaggaagaggacaggaaggttcccttgggaggatctccacagggcaaaggggaagccagtatcattcacaaagagcgtgcgtggtgatgttccaaggcacagggctcgcctgggcacctgctgaaggtcgggcgcgtcctgtgggacgataaagctctcgtgtgagcaccagaagctccctgggagagggtgaggcccacttttcctcgtaagcttgggttcagacttacctcacccctcaggcccctcttccccttctctcttgctaagtgaggtcagtggccttgtccttccctgccctctgggggaagagcctttgccacagcagagtctatggtccccacacacttgttggagacagtctttaaaatgaaaaaattatttttatttatttatttatttatttatttatttatttattgctgtgataaaataacctgacaaaaaagcaacttggggagagaggggcttattctgcttacagttccaggttacagggatcactacgggaagttaaggtaggaatgtcacatcttagccctgtcagatccagtcagagtggggagaaatggacacatccatgctcacttgcttgcttgtgctcgactcaattttttccactcatacaattcaggacctcctgcctagagaataatgccactcacagtgggcggggtcttcctgcatcaattaacaacctagataatgccccctgcccacccccacacacacttcatccaacttgatctggacaaggcctcagttaagactctgttcccaggtgattctaggttgtgtgaggctgacagttaaaaccaatcatcatgggggctggagagatggctcagcagttaagaagtcctgagttcagttcccagcaaccacatggtggctcacaaccgtctgtaatagggtctggtgccctcttctggtgtgtctgaagagagcaatggtggtgaacccatatgcataaaataaataaatcaacctttaaaaaaacaacaacaagcaatcatcacagtacaaaatgcctgaacccctgcacgcgcccccagacaaaccgcacagggtacagtggggccaggcggggttctcatccaacctctccttactctgccctaccgagctgctcggagacatctggcctcctctgctaagctgaggaatgaatcagaagttggaaaaggagaaggaacaggttgttaaaatcagaacagcctgttcttagggctaattggctttcagcctcagctgagcagtttgtatttaaatgcaagtttcatttattaggatccagggaagacacagtagggccctgagggaaagcacgcactgcctgcccccgtagctcagtgactgctcgcctgtgcagaatgacagcaaggtgacgattggcaggatggcaggcatggacagggcggcacaaggatgctctgaagaacaagagaccatgggctgtagatgtgaaaggaggaatggttagcatcaggccgaggagaggtgaccacggtcagagcctccgggttgcacagcagggagggtccacatcgtggcagcacctcagcaggtcatctccggcctacaagctccaggtctatgccctagtcacatcgctgccttcctctctgggtcctgtgagcccgctgcattccgtggtgatagggagttaaattgcaggtggaactgaagacacgagcctggcggccataatgtggagagcacatcctggattacccaagtggacaagattaatccagagctccccgagttcgttcaggtccttgcattgcaggactttcaaattggcctttgctctttgacacagttggtcctcatctgagcacttccttgacttcccacatttatcttttaagtcccaggctgggaatcagccacttcttcaatgaggccccattgcttctatcagggtaggaaatttaggaactcggatatgcatattagagtctagacatatacaaccccatattatgcacatgcatacatacatgtgtgtacacattcaggcactggattatatggaaccagtataaccacacagagttagaaaaaaaaaaacatgggtagcccctctttatagggactttaagaactggcttatgaggctggagagttggctcagtgggtaaaagcacttgctgggcaagtattaggacctgattttggatttccaggacctctctaacacacatacacatacacacacacacacacacacacacacacacagagagagagagagagagagagagagagagagatctgtacacacctataaccacagtggtgaaagaaacagagacagggaacttgctagggtttgctggctactggcttagctgttggaaaaagcaggctcagaactggagggcttgagagatggtatgtggttaaaagcacttgttcttcttgaggtttcagacgcaccacatccactcagagctgcctgtaatttaattccagcctcaggggatctgacaccttttttggcctcctcagagacccatacacatgtgtcacatgcacacatgaaagaattggccttcacagttggagaatttggcagactctgcgggacaggcagcagactgagaatctaatcaatagggcttgcatatcagtgaattcttaagtctcaggattgaatttcttcccatggacccggtaaggcccattcacctcccattctcttgatggtgtatgctacacactctctccaatttcccccaacagtatccagactaatgtttgattttctaaatgggtcccaggcctggctgtgtggatacactgggtgaagttagagctctctcctgccctccacccttttcctcattctctattcccactcacttcctctggtgaatgtctcattgcccagcaacatgcattaaaaaaaaaaaaaaaacacacacaaaaacaaaaaaaacaaaaaaaaaaaccctcagatttgtcactcttcctcatgtctgagttcaacactagcttttctttgagcttctatagtcctgctgggttgcagctgcacccatgcaaggttggagcacatccctacatataggaagaaggaatcaaattgtatcttttccctgattgtttcacttattacgaagtctgtcctccaccctaaccctttcgaggacacagagactggactgggagaattgggataatttcaaaccagccagatttgatttttgcatgctcatggtatgcagcaattttgagttttgttttttgatattctgtaatccaagctgacatggaacatcctacataggcctggctggccttgaacttgtgcccatcctctcagctctgccctgagtgctgcaatggagtacctagcaaggtgtgtaacaaaggcacccgagagcctggtcctcacactggcccaggactccacagccgctctccatgttgactgtgaccccccacagctctgcttctcatctgttttctcctggggtggggatctgtcaggatgcttgttggaagagaggctcaagattacccagagtccttgagggcagcacagggcatctctgggtcagcagcacccagcaagaacctgcaaagtgcatgacctcgccgtgtgctgggctgaaacctgtcattactagagttatctcattaaaccacagtcctggtctgctaatggaaatataatgtcatctggtgtattaactaggaatctttatctaactgcggaaggtagaaagaacatggaaaaaagtgtcatgggaaactccctaccacctcactgcaggtattgggagagagagggaaggcaaaaaaccacagaaggatctggaagtttccagatccagctagaagtagattctttgtttcttttcagcctactttaaaatttttatttttcattagtattgtgtgtggagcaaatatgccacaacccatttatagaggtcagaggtcaactttctggagttggttctctctttctacctttcaggtcccagtaattgagctcaggtcatcaggcttggtagcaagtaccttcacccactgagccagcttgtcggccctaacctaatttttaaactagtacataaaaacatacagggattggacacaccagatgggcaccgtgtgacactggatatacatgcactttgtgtaaagtttaaagtcaggttaaacatcctgttacaaacatttatccttacagcttaccactcctccctctctttaaacagtactgtgggtactactctctctgtgtctctctctgtctctctgtctgtctgtctctgtctcttgtctctctctgcaacctcaggccagctttctttgtttctctcagttacttaaccccaacctctccccattcctccctgccctgtctgcccactattcgatcacgagcctctgttctcatctgtcttattggccagtatgtttgatcctatgtatgtgtgacgtcatgtgtttctctctctgtgcctggcttccctcacttaagaattcatttctgtccctgtcaaaaatgggcagtgcttacttcttcctgatggctgaatagcgtccagttgtgtgtgtgtgtgtgatgttgcatttatacagtcatccaatgatggacagttagcctctctctgcttctcatctgctgtgatcagtgtttcagagaatgcatgagcacaggtgaacctcatttctatataactaagaaatagaacaactggactgtatggtactgttgtcaattttttcaaagaaactggctggtttcccacttcacgagaaatactaagttggtgtcctattttgctttctgttgctataataaagagcaaaaccaaaaacaacccagagaggaaagagtttatttcagtttatagcatacagtccatcatccagggaagttaggacaggaactcaaccaagtccaaaacctggaagcaggaactgaagcaagggccatggcagattggttggccctctcgtggctttctcagtttgctttcttatgcctcctaggtcctcctgcccaggttggcaccacccacgatggcctgggtcccctatcaatcactaatcaagagaattccccccacaggcttgcccatgggcagatctgatggagacgttttctcagttaaggttctgtcttcccagatgacctagtttcaaactgacaaaagagccaagcagcacagttggcttacagcttcaggctctgagatgtcaatttaggcaggagaaagatgttaaagacagacagacgccaatctagacacaggctccatctgcccctacctcctagtatcttacactgtcctgaattccaggggcccagtcctctaaggacttgtcaggatctgtgaggctgaggatccaaggctgcttcccagggctgtagctttaacttgctgacctcagtctgagccatgaagactctctgaggagctgtggagttataggtagggcttcctgggaccccaggagtaaaggtggccatgccattggttaaccaaaggacaaatgtctaagacctgccgtgcaaagttacccagaatcctgtgatccgagtaggaactaccatatctatttaaaataattgatttaggcagggtgcgatgacccctttgtcttgattaggcctaatggctgccctgctatggctggaacacacagcctcctttgtgtgtccagggcaagagttgaggcaagaaactctctcagcttctagtggtctggaggaggtgcctatgtttggaagttcaacaggaatcgagagcaaaagctgcttcttagatttccaaaggttctaaaatagtaggcaggcacaagcatctcccggtgcatatttgcttgcctgcttcacagaatagtggggtatactttccccctacactctatagggcagccatgttgccatgagcctggcacaggaggcaacctattggcctgtatccccctaccctgccactgtggggctacctcatttaccatgggggtgtacccacagaggcacccaccctggaacttgacatgtaccaagtgagtcctgaggtcacacttgtcgagagcctggtggctatggggctggtgacctcaagtgtgatggtaggaaactggaagggctttctggcctagtagggccaatggctgggtacccttggaggtcaagtgtttcaggttctaaagtaggcactgcatgggccaaggcaactccctgcccaccaccatacactcttacttccctttagcaagcaaaggtcatggaaaaacccttacctgcctccaaggtgacagctgtagaaatagctggtggcgtggtacagagcataaaccgctagtaccaagctgaggtacaactgctcacagtctgcccacccagagccatcttagcaactgctgctctctgtattccacacactgaaggaactgtcttcattttgagagtttgcaggaagcagtttcgggctgcaatggcatttcagttgggatcagctagctgcacactgaatgcctgccccaaggtgagtcccatcaaagattctcagagccaaaggtctgtggagccagcctgcttggataggtgggcaggggcgaggggggagggggagtagagcgggctatttccttccttcaccccccagggaggttattgaagggggtggtgacagccactcctttatgtccaatagccactgcatcttttttttttttttttactcccctttgtcccaattcctgggcatcttccttttgggggatacaggtaggggagcagcaccccaaggcatggtggccaaggcatggtggccattcccgtgggctgttgtcatttccacttgccttgttttaaaacctcagaggcaggatgctgccatagaatgtgttcaaaagtaaaagttcagacctgggacaccacaacagtccctaccacgtggaaggcaagcaggtggaatgtatccagtgatgtaactggataccacttccctgtggacacattgtttcctggccctggccctggccctggcccagaacgctcctgaaccatccaggctgtgcagactgaaacagccaggtgcccacactgggcttctgagagccttctccagggctgccttctgaggctctgtggtgagcgagacgaacacatacacctggtgccgcatcttgtgtgttgtgggggatagctgggtgggcggaggtcatagctagtgtccctccacgtgctctgtcactccaaccatcctcaggccagaattcaaaatcaactcaaatctccccacttcatccattacttggtgggcctttctcaggggcaggcagcatggagccttagtaatcctctgtgggcggtgctcagtgtggcaccacagagcaacaaccttccctgggtatattttgaagcttcatttttctcttaaggaacttttgggacctaagcacttcacccagtgagcgccggtccctgcgccgggcagctccattttctggacataacaatgggtattagagtctccaattctaatacatttaagaatcattttctgtcttacttttctatcagggatctgcatgcgcactcccgctctgttctgggcctgccacggtgtgacctggtattgtcaaggctaccgcctaactctcatcacagaatctcgttggcttcagcttctggtgatgcttagtctcctactgacattggcaggcgacatttcagctgctggctgctggctctctgatggtcctctgtgttcctgttgtcagtatttctcctgcacgattgctgggattcacctccatggtggatggcaatgggtctcctttcaaaggcacctatggggaaagggatgcgttctttgctccctcagacactccaccttttgtcttcttaggtgttccccctctttctatactgtttccccctattgttgagatataaatatgttttctcttcttaagtgagactgtaatattggtaagctatttttcacccagccaacccagatgtgtgaaacacacacatttgtatccttgtgtttattttcttgacaatccatacaagttgtgtccctctccacaaaagcagcaatttctgattccaacccttctccctcccttcctctctccctacatctctcttcccctcccactcactcctcaccacctgcagttttatgttttaaaatccgcccctccctcagtcttctctatttggtttgactgttttactgtgtctctcttgtacagtcatatcatcgagttggcagctcatcctagcaaccctggctctgatctggcttttgttcgctttgcagatgggttgttaatttacaagtgtcttattatttttttaacaccctcattcccttcagtacagattctaaaaattcaatctattattagaaataagctgtgcatttaagacattcacagaattcagattgcctaaggtgcttcctgccaccttcacgtgacagcttggcagggtaacaagtttgcatgttccctgaagttccactccctgggttccattgtttttggtgtcaatgttaggtgagaagatggagcaattacagttgattgactggctggttgatggatatgtggctggaagtctgactttcagcttaaagtgttgatgaaaccttatgatggtggcttcccttcaactatgtggacatcagcctgtgtagcaactcttaggtctggtctttgaaggatggatagtgtcctcacactgtcagtcatggactctgcaaatctaacaccttcttccacctcttgctctttgcaaggactgtgtcccacccatcctttgaccacatttacacccttttttactcctggccgctacaccctctctctggctgcattcttctagaaggtctgtttttacttctggcctttcactttgtaaaaaacatttcctggttggatgttgcagtgactgtcagctgacaccatggtgccaggagctaacctttgccactccctaggtctgaggataatttccctcagcagaccagagtgctaccattgctgtcacatggaaccaggcctggccacctggagcactgacacagtggaagttctgcctggcctttatgactccacgatccaaggggtggcagcatttcaaaagactccttcctgagacacagccaagtggaaggtgcaagcagagcctggtgcctgcatcgaggccaattgtggataaagaacatggatgggcacctgagtccccttctgcagctggccctgggtgggagtaaaccccccaagccagatgagtctgaggctctgtaggttttggtatatagcagctcttctatgacccaggcttacaaccaggatggttttgaataaaggagatattccttgaagctgttggcttctcccttccagtggggacagtagctgccacaccgtgcctaacatgttcaaagactgaacagacctttgcaggagctgaggtcccagtgtggcatggctattatcccctttggagagggtatccgttgacaagttagttaagggtctaagtatttgagagaaggctttaagacaagtgattgactctgctcagtagttatttgctgggaatgtgacaggcacgaggccagtggtgctgaccaccaaggactaagcaggacagggccttctttgccctcctagagctgtatccccttaaaggaacccatgttcttccttggggtctaacccaatagcaggtaggaatggacatcactcctaaccagcatccagcatgccaccagcctcctgcctggaacaatgtcaagacaggaagttaaagtacacagagaagccatggccactgtcccttcttcagggagcttcaacttcaagtcccttcctatttctctcaggcataacttcctccctgtctcatgtcccagatttcaaccagagtcaaggacagtccctccatccatccagttagtaaggcttcctgcagtgacagcgagcaccgggaggttcctgcctcaatgcttcccattctcgctatagatcgacaactcttgatgcacatcctgtcccatgtccttcacactggtctggcatcttacacacctgacaatggtcgcttcttacatctgtggtggccaattcggtgccaagtcctgggacaaatgatctcacctgctggcatgtctcagtgaccctcgaattagcaagaggcagaaggctgcgtcacaagtagcattcaggggcattcccaggaagcagggatcctcagtggaggttgtcagtacaagctgctggcaaccacctggacccacttaaagctgcaaatatggaggctttgtgaacagtaacttgctattgcaaagtcgcattgagagtggacattacaggagtagaatgttccagatccttcccttctctagtcccttgaaagaggttgggctaggacaggagggccatatgtggtacagtgagttggtaacctgtgtgatgagttgtcccatgcaggggtacagcagggaggacagctcaaggacacattcaggaagcccggcagataggccctgtaagtctgctggctgctattagagtcacagtttcttgggaagaaagggatggggagaggcaagctttggatagctgcctggaagctggggtggagggtagactggaggagacagccccctccttccagctaccatcgcgtgctttgtaaggacaacagcaaccctggatggcagcatccaaatatagcatcccggctgtcacgcctaatcccaggcttggacaaaggcatgtccccaagagtgtgggagctgttgggccttaccctgtctgcgtataccctaccctcactaagctggagtcaaggtcagcgtctcttggctacacagagggtccccatgagagggtccctggagatctctggtagatcacactcaatccacatgttccctgtgcctcagtagtcagccactgtgccctgtgtcctcagcccccagggctgggctcactgacatagaacaagcccccgtccagaccctgatgccagcactagcaaaaaattctgtgactttgcctcggatgcttgctgaatgttaacactgcctcatctcaaagccccaggagctggtgcctgaccaggcctgttctcagaagtggcattgtgcccaccctcctggtggggcctctccgtggggagctggcttggcagcgatgggttgcatctgtgccagagccagctgcatgtggggccagtgatggatttagaaacttctcttcctcccagcctggcagaggtgcccagacttctctctggcccggaacctgaagagtgggaatggtggagaaaggaggacagagggacacagtgccaggacagaggagacttctcaggagagagaggaaggagctgcagggatgggagatgaaaagtcttctggctcatccagctctgcactcgccctctgtgatctctctataggattcctcaccaagtaccctggtctgtggagggaacacatatgcccactgtcacaaggctagcccactgtgatagcagggtaccatggtttcctgccctctgaaaagcaagcaagccttcagccatcttaggcttatcatgcgtgcacaagccagccataagagactgtaacctaaagcctcatttcatatgcctttagttaacatgagatgtctatggattccaagtggtggggacttggcctgacctgtcttggtctcagtagcccccctggatcctgacatctgccttgttccacattcccccattgccatggaacctgcttctctgcaggctggtcttagctatggaagtctgagaggtcatcaaggttcaggagaggagcaaatatttaagctacgaccagccattagccagaggagccccaggcctgggtttgggctggagtgtgtggcattattgtaccccactctcctacaagctcggtctcaatccccagaaatgttaagaacaaattgcaggctctctggactgtagcagtccccttggctgggcatttctctctctgggagcagtggaggctgtcctgggctctgctcggtggcactccctcttagctctgggaccattatcccagatggccatgtaggagtggggattccatcacagctcagcagtcatgcagatgacatcacttgtggagatggataacagcaaactctgttaaccgagcaagaccagggccctgtgaagaagagggatacccttctccaagcaatgtggcccacagatgtgtcaaactacccctctgagaaacacattcccgatgtctcctcacctccaccccccaccctcagatcttccttctcctgggatcaaagagagagtcccagctctgactgtacagggtgtggactgcatttcccataggttggtgagttgaggactcaccactgcagaccaggtgctcacacagaaaccaggcttccccagggatcctctgcctaggtctgaaggctgtagtgagtggtgccctctggtgggcactggaatctcagctgccatttttatcattgttctctgggcctctgagtgcttgcatgcattgggcatccacaatgcagcagggagtctccttcttgccacccagatcctcccagaattccttctcccatctttgttccaatttttggctttgagaagagagaagagatgcccagtggtggtcagcgagtgtcgtgtgtgcacacgagtgagggaagtgacttgagactgcagaggtactataccaggcctgtagtgctgtcgctggttgctgaccccagggtcttggcaacctcacccgtgctgccatgtcttgaacaacacccttgtactgcctgggaaatggctttgctccaaagtcaggagctctggacaacatcatcttaaaatactcatttgccagccacatggttaatggaagtcgcaggctggcagagcatagagacttcttaacactcagctcccctctgcatggcacagcacagccagggatcacttgtggagtgtccttcttttccctccccccactgcacatcccacaccactccgtgcgactatcagagagacacagctggctcagatcccactggcgctgcccacgcttccctagcctaggaaagtgtcaaagtgctttagtccaacaactagcaaggctccctcatacatctcccagaacccagggaaaggtgccctggtgtctgctgcctcctacagcactgggcatctccctggcttgtctgaataccaccaataagctgggtgggctgctttttcctgcactggagtggagaccttctgtgcagactgactgcccgggtagccctagctgttcactcaatgtctgactgtgctggactgagcaagactttctgcagtccaggcagcagcctctgcccatggcagaaagtccctgccatctgttttggggatcttgagttctgccaccaaaggcagcaatcactgccctgaaggccccttcctggctgatgggatggtttcaggccccacaaggaatggaagcatgtgcttgctgagggaaagggcctcttcatgagagaggaggtttcagaactagctgtgtgctaggatggtgtacatgcccaggagggaggattgtgagtttgatgccagcctggactacataataagactctgtctcagaataatgataagtaggggaagaaggaggaggagggaaagaagtgactttttatcaaaagcttttcaatatcaaatggtattttctcccttgacaggttgaagtgtggttttatgacagactttaatgtgttctgtacagctagatgaagcttgtgggcactttgcggaggccttctgtgcctctccttcctacctaccttccttctctttctctctttctctctttctctctttctttctttctttctttctttctttctttctttctttctttctttctttcttccttccttcctttcctttcctttcctttcctttcctctctctctctctctctctctctctctctctctctttctttctttctttctttcttaggcaaggtctcataaagaagactgacttgcagagatatatttgccctgtatctggacgctgggattaaaggtgtgcagccctatgcacagggcactgtatattatttacatgttaatttgctgctctaacttacttactggttttatagttgatnnnnnnnnnnnnnnnnnnnngtgggagggaaaggaacgaggacccagaaaacgggtagaggtagacagagagggagcagagccatgagggcagagaaggaggggacagagaggacagagaggacagaaagagaagctggctggaaacctgtgagaacagagagggatcgagagaaagaagggagaaagagcttttgaattttcctatccatgttattgtatttaatgtatcagtaagttcctttttattggttttaaacacacacacacccctcccacagtgcgggaatgctggtggggaggggctgcaagtccacagcatgcatgtggaggtcagaggtcagcctggtggtatctttctctccctccacctttcccataggaagcggactcaggcttccaggtttgcagagccaagggctttcccccccgtctgtctcactggctctttcttttttaaagtcttgatttggatatttagtgattttcttttatacacattctccctacatagcccacagagacctcactgggtaacccaggctggcctccaactcctggggagcccccctcccctatgaagatgagaagatgtgtctgtctatcaaacctccttctgtcttagcctttggagtcttaggattacaggactcccattcaccgctcctgacttttgcttactattatattaaataataataattcacaattctacatttttctcagaattcattttggagctgattttattagcatttacatgcatgcagtattgtatttccatggctgccctaatggagtgttttagcatggtgactcttgaactgcttgtcacctttcatttctgtagagtgcattctttaaaagtatccttcttttttcttttcttttctttttttcttttctttttttttttttttccgagacagggtttctctgtttagccctggctgttctggagctcactttgtagaccaggctggcctcaaactcagaaatctgcctgcctctgcctcccaagtgctgggattaaaggcttgcgccaccactgcccgaccgaccttctcttctcttctcttctcttctcttctcttctcttctcttctcttctcttttctttcnnnnnnnnnnnnnnnnnnnnnnnnnnnnnnnnnnnnnnnnnnnnnnnnnnnnnnnnnnnnnnnnnnnnnnnnnnnnnnnnnnnnnnnnnnnnnnnnnnnnnnnnnnnnnnnnnnnnnnnnnnnnnnnnnnnnnnnnnnnnnnnnnnnnnnnnnnnnnnnnnnnnnnnnnnnnnnnnnnnnnnnnnnnnnnnnnnnnnnnnnnnnnnnnnnnnnnnnnnnnnnnnnnnnnnnnnnnnnnnnnnnnnnnnnnnnnnnnnnnnnnnnnnnnnnnnnnnnnnnnnnnnnnnnnnnnnnnnnnnnnnnnnnnnnnnnnnnnnnnnnnnnnnnnnnnnnnnnnnnnnnnnnnnnnnnnnnnnnnnnnnnngggatttctgggccatggtgctataaatgcccttctgcctgtgtttgttccgcactgcattgtgctgccctgcagcagcctccaggcctgctcgcctgcatgccaggacctctgctttccctcccctctgctttgatggtgactgttctgaacaggctaactaggatcaggtcccagcagtacaacagggaaaggagagctaagatatccaaagtggatcagagcccatttgtaagtgagggtcagagcggtccacctcctacctacaggaccctgccatgccccatcccagacagccctagtccctacaatgcccaagaggccacagtgacctccaggaaataggaaggcggctgtcccatgtggtatgccactgcccactttctgctgtcccagaaatgaggcactgattagaaatacagtggcctctgctgtagttttcttcctaaaataaacttccacgcaaccatgaaaataatgtatattaagtgcagagaagcacagcctactgtccctgcattgggaacagcccctgaaggatggctctcctacaggggcactccaccagatctgcaggctttaggctgccatgtggaccaacccacttgctttgttcagcatcttcatggaaagatgtgcctgcctgcacctgcaccctagaattctttctgaaagttgacttcttagtagaggtccctccaagtgcctttcccatgtgctggtttctgactttcatcatcttgacctcagtgtgcacctcctcttgctgcctttgtccacatttcatacattttgttttgttgtgagatagagtctcaggtaggccaagctggcctcaaactcagtacgtagccaaggatgactttgaactcatgatcctcctgtctgcgtcccaagtgctgggattacaggcatggaccacacagatcggtttatgaaatactgggagtggaacccatgccttgtgacttttttttttttttttttttttgaaggcaggctattcctaggtagtatagtatggctttgaacttgtgatcctccttccttggcctcttgagtattgggattgcaggcaaccctccatacctagcttcctttgtttctgcataagtttctgcccaagagcatttctgatgtgctcaccaattatttctatttgcagaagaaatacatagttggccagccacagacctctctgtctgcatgtttgtttgctggcttccccaccccctccatcaacccgtgtcagctggcatctcaccaggatcttgaggctagccccaagtgggtcagctgggggtgggacagcatcctgtctcaacagtgttagaagctgctagagcttccaagctgtgaccatgctggggatgggaggcaaaggcaaatgccaaggcagtgaaccaaaccccagggtttctccttggagtttctgaggaattagatgccccttgttagtcagacttgacagaagtttataggacacaaagcacacagtgagcctcacactagtggtcgtcagagaagaggcaaggagaaaatttgtggctttgaggggcccgttccgtctgtccctttacttcatttaattagtctgtccagtcatttggggagggggccgatcctctttctaagatgaggttaccaacacatggccatgtgagatgaagtccttatggttgcttgagagaagagaggaagctgggactcaaacccagatgatgtgtgccaggacacaggctcagatactcgttgttaggggaagttggggccagaagggggaacaactgcaacctcaagttatccccagaggagcagcctcactgtgtgcatcagtgcgctgccacgtaccgaggagcccagagccatgcatgactcgagatccaggcgtttggaaaactcccactgaagtgttctgggacattccaagcaaagtttgcttagaaacccagaatagcaagtcctaacctaaaaaggataattattcagttacatgagaactgaaaattagtgagttagagccagggcacgctttctaactattttgggtcctctggctatctctgtgttcttttagcagaggcatgtccaacctctaaggggaatccttttatctcatccgaactgacagagcatgcacaattgttactgaaaacctcagctgtcacttctgcctaaacaaacgggatccagtgggcagccatccctgcaccacagatatttttaggcataggtggcttcaatcaaaaatagaatcctggtcccagaatagcaggctacacactcagccccagacagccgtagagtgtaatctgtggtgacctggcttccagaatcagggactctgaactgttctggttatctgagagagagagaaggcatcttctgccagagacattcccaggctacagaagacattgttctgggtgctctgtcatcaaaaccatctctgggtttgggttgagaaggatagtctacaccaccagtgctcagttaaccagtgtcaactgcaaatgtggcctttgactttaaagaacacatttagtccttgctgtgttggatctcatgatgagatccaggctgtctcaacttcttacagcttttcccacgtgtgttttctaacggaaccttggatcttttgcttactcagaccatgcaccccagggccagtgagcgggggagagggttgtccactctctccttccctgtgtctcatccgaattaccactgatgtgggctgaaagatctggacagggtgcctgacacaaaggcagctgagggtgggggaggcctgtggcaaactggactagcaatttaaagatctcatgatacacttgggcggaggaatgcctggatttggaaagcctccacttttgaccaaaaaaaaaaaaaaaaaaaaaaaaagccttttagatgccctgagggtctcctcagggctgatatctggcctttgctccattgatagactttctagattaaagtaagaaaagatagttttaatctcttcgccaccattttggggcttttcccttttctgtatggatccagagtcctccttggtctatcttctgattgaagaactttctttaaccttctttaaagtgcaggcctgctgactctctgagctgcttttgttgtttaaaatgaaaatgaagaagcccctatttttatccccatatttaaaggatgttgagtgctggcttctaggctgccagcagtgggacttccttggcctgtggtctctggcttgcccaaccttggagggaagtcagcactagttcccatgggcatcctgagccctctgtgtgtttttatgactgagactctccattatttaggctttaatgtgtgtttggtagtctctgtgtatttgttggttgctgctgctttgtttctaatccttcttggggttctctgaccctgagtgtttttatttaacgtctttcattaaattggggcaagtctcaggccattatcttttcaaatatctcttctgctgcatccctctcccgcttctgggagtgatggataagttggaatttattgcacgtgatggtagaacgtgcccacagctctcagagccctctgcaatgccttcctttcatttcctcggtctttcagtttgtgtaagttctcctatcttgacctccacctcaccgacccctccacctgccatgcagtgcagcaaaagaatggccttttaaagatgagatttgtttattttattttatatgactgttttccctgcgtgcatgcatgcatgcatgcatatgtatgcctggtgccccaatcaataaggatactgagctaccatgtgggtgatgggaattgaatcccagtcctctgaaaatgcaacgagggctcaaaagtatgctctttgatgctttctaatcccagtagtctctcttgctatagcttcctcttccacctcctgccgtcctcctcctgtttctccccccatcctgttttaaggcaggccctccctttgtgttctaggctgagctgagactctagattctcctttctttgctttgtaagtgctgggatgacaaggctgtgcgccacacccagacccttttgactctctaggcttcgagccccattgaagcccccccatctgtttatgtataatcctttcctttcttggtagaccggacattgtcattttaaagcccccgtctagccttaccacgacgaaaccctaaggtaggctagttaccccatagtttcagaggttgtgacaaggaaccagtggcacacagcaatggtagggtatgttcagaagcacgagctgccatcgccagagagaaagccagagaggctgggggaccagttcaggctctcaggagaccaccctgatccctgacctgagccgacgccacaggttagctccccacctcccagaggttagttccagctctaaatagctctataccccatcatgacctgatagtcacagactaggtcatcatcttttggttcttgctgttttcgggcagagttttactattttcaactcactaatgggctttcaggtgtgtcagaggccaactaaaaagaatctgcatatagaagcaggcaggcctcctctggcagtcggctaggtggggttccagtcaatctgtcaagagttgagatgggttaaggattttctgttgctgtggtcagtgtcccacagactttagattccccctgcagacaactgtcattgctgtgttcaggaaacaggcccagaaagacagtcccccagtctccaactatcccctattgtcctgtggagatgctacacaaacatctactcaccccagataggaaaacaacagaccaaagtagggctctctccaaactccagtgatggtggtggggagtttactggggttacatgcaggaatccgggagaagggtcacttcatgagcgtagatgactcagaggcagctgcattacccaaagcccacccagagtcggcgctgactcacgaaggctgcaccttggagcatgactcagaagcagcctgacaggtcagggagagacttctagacaggctagatgatctaagcctgagctaagtgtcctcagcggctttatagtgtatgtaagctaggggacagagggacctagtgtgtctggacggtttcaaggacttcctgagtcctaattagcctgtctttagaacttcctctatctatctatctatctatctatctatctatctatctacctatccatccatctatatcttatctatatcatctatatctacatgtacatctacatctatagctctatctatctatctatctatctatctatctcttttgagaaagagtctcactgtgttgctggccctggctggcctcaaacttgcttttgaagaccaggctggccttgaactcacaaagatccacctgccttcctttttgcaaacttttctgctctttttttttttagatttattttatgtgtatgagtatttgccttcatgtgtgttggtgtaccatgtacatgcattgctcatggaggtcagaaagggacataaggtcctctggaactatagttacgaatggctgtgagccacctcatgggtactgagacatgaacctgggtccctgacaagagcaacaagtactcttaaccgctgagccatcactccagccctgaacttcctgtgtctaatgggcttctagctttagaggaaattgttacgtaacacctgattgcctgtgtcaaggtgagaagttccccagctgtccatagcacagctcagctgctgccagagtcactagggaatggggaaatctctgtccccatccagcctcagtttaaatgaacctgtgccctcagtcatggtatctccaacagtggttctctacacctcatgtctggggccaagaaactgaggtacagcagggtggctggcctttgcagagtttcctgaccactcatatgagaaaagcttctactaggcgtggtgcagggtgctatgcccataacaagagggcaatgccttcttagaattggaaacaatcatccatggaaggagttacagagacaaagtttggagctgagacaaaaggatggaccatctagagactgccatatccagggatccatcccataattagcctccaaacgatgacaccattgcatacactagcaagcgtttgttgcaaggaccgtaatatagctgtctcttgtgagactaggctggggcctagcaaacacataagtggatgctcacagtcaactattggatggatcacagggcccccaatggaggagctagagaaagtatccaaggagctaaagagatctgcaaccttgtaggtgcaacattatgaactaaccagtaccccggagctcttgactctagctgcatatgtatcaaaagatggcctagtcggccatcactggaaagagaggcccattggacaggcaaactttatatgccccagtacaggggaacgccagggccaaaaaaatgggaatgggtgggtagggaagtggggggtggggtgggggggggacttttgggatagcattggaaatgtaattgaggaaaatacgtaattttaaaaaaaagagggcaatggctgctgctgctccaagaggacttgggaactgtgtggtgtggcgtgcctgtgccctgccctccccatccttatccagcatccagtggaacctttctcatgggaaactagcaagtcagcagccctgccagagttgcaggccccagcaatgccacacaggcacaaacttgggtgctatcagttgctacctggagctggtccccactttctctaagtagtcttctcttccttcacttggtctcagctctgtgctcactcatgaaattcaagtgacctggagctctatagcccaactccgatggatcccagcaagtgtgaggttttatggttgttcagtgagaaccggatgcttgcacttgtacacacactctctctctctctctctctctctctctgtgtgtgtgtgtgtgtgtgtgtgtgtgtgtttggtatatgcatgtgtacacatgtgaatacaggtacacttgcctgtgtttgcacatatggaggtcagaggtcaatagcacgtgtttttctctctcattctccacttcctagggtttctattgtggtgataaaaatactatgaccaaaagcaatttggagaggaaagggtttctttcagcttacagctcctcaggtcacacactcaggccatcactgagggaagtcagagccggcatttaaggcaggaactgaagcagagactgtggaggaatatctcttactggtgtaccctccatgcctgcacagcctgtttccttatacaagcgaggagcacctgcccagggctggcatctctctccacccgctgtggactgagcccacccatatcaaccatcaagaagatgtcctacagactttccaacaggggaatcttgatgacggcattttctcaattgaggttcctcttcccagataactctagcctgtgtcaagttgacaagaaaaagccaccaaccatgacagcacctaccaaaactagattagagtcctgtgtatacagtcactgacacacaaacagggtcccacagagccagtgagaataacacacacataaagtctatacacagctacagacaaggagtctcatacacttatggatgaagcgtgaggatcagctgcgccccaagccccactgggagccatgggttccattgctctctgtggactgtctccacagaagccacatgatatctctcacacactcactaaaccaaccaaccaaccaaccaaccaaccaatcaatcaatatgaaagaactccaaggactttgcctaagcaagcaggtctcccttagatcctggctcataacatctgcttcccccacatcccactgtcattgagtcctgtaggtgaccagctcatggggacctttaggtaagctgttaacaggagcatgaatggccacagggcttgtcagcttggtcctcagtcttatggcctaaggctctagctggcactgggcacctcaccttctgacagctggatttctgggactggtgtgagctatctagggtcctcacctgccagagccagaactctgccttgaggcctgagcttttagagtgggggagggaaaggactgctttgcctctgtccagacaaagctgagtcccagctgggtctcctgacaacctctctttgtatccacaggagctatggggagctcacttactgcaccaagcacgtggcgcacacgattggctgtttctggcccaatccggaagtggacagattcttcatcgctgtccaccatcgatacttcagcaagtgccccatctcgggcagggccctgcgggaccctcccaacagcatcctctgccctttcattgcgctccccattacggtcacgctgctcatgactgcactggtggtctggaggagcaagcgcacagagggcatcgtgtaggtatcccaggtgatgagggattggggaaccatgggcctagcccagcaacagcatcaggagcaggtcccaccttgcatcctgctctagcctagttagcacaggacttgagagtggctctgcattaagctgaatatgccctagccagaggcttctagcaggggagcaggggcctgcctctgcttacctctgagattgttctaagcaccaggtctctggtacacttcatcaccactgtgggcattctgaactccaaggaagactgcacagatgtgtttgtagatgcacagtttgtgattaaaagagtattcttaaacctgggaagtgttctgtctgggtacaaataacctatacaggaaatcaagccactcgtggagatctgtcttttgctgattggagtttatcgcagggtctctaaccagatgacacccagtcaaagatcccctgagtttgttgaggggttcccaaatgattctgatgcccttggcctctactgcatggtccctgctttctttttgcctttcttgggttttttgagacagggtttctccatgtagctctggctgtcctggaacctgctctgtaaaccaaactggacttggactcagagatcctcctgcctctgtctctcaggtgtgcaccaccactgactggcacagcccctgctcttagtacttggaaatagtcatgaattaacaactagcgagagagaatgcctaccgtgagccagaagcttcggctgagtagcacgtgaagagggtgctgtctctgtgtcccttccctaaaggtcaccctgtcttctctgagaaaccctagtgtataggacaagtgaaggccaagaggtgccagggatgtgacctcctcctccactcagcactgtcccttctgtccctgggaagccatggacagtagtgacagcattaatctgaaaaatagggttgagctatggcagcgtgtgcctggaatcaaagcactttggggtgttgaggtagaaggattgctgtgagtttgacgtcaacctgggatttataagcctgtttataaaaaaaagaaaatgagggggaagggtggggaagaatgaagaagagacagaggaaaaatgcaaaagaaaataagactgggctcatttgtgacctgaactggagaccagagaccagcctgccttcccggactttgacatggaaatccaaaggatgggaaaacaagacatgcataagtcacagaatccaaaagctgcaagagaaccagggagctgacttgggagatgaagctgacccagtgcctcgttcccggaactgcgcatactaacaagttctcagggtttccagtaaaccaagaaggctggggtttgaggtcatctgcagagcgtggccatcctgtgctcagctaagcagggggacaggcaagggagcagtgagcccaagacccctcacacatgacccctctcacaggatgactgcttgtacaccagccttccagggaagcctggtccgctgggagtggatctccatccattcctcaaaaatgagcattagcggtatcctcctgaaaacaagtcagaagtgtggagcagaagtcttgagtgtctgtttgcagtcatttctcttgtaggaactcatcccaagtacataattaccatgtgcacaagggcccgtggggaccaggagcggaagagaggagacaccctcgatggtccaactggaggactgctccatcagattaactccagatgatggaaggcaatggtttccttaatggcgtccttgggggtggggggggggttcccagtgtgtgcagttcattgaaaatgcagattttaaaacaggaaatcaaggtgacctttatgctgtgtttgtttacacacaaagttcctttccccaggccacattatattggggggacgtcctgtaatagggctctcagaagacagaacaacactctcagttctgcatctggctgccaccgtcccagtggatgggcatcacttcccggtgaagggtgatatggtcagaccccaactggctgttctagctgtgtgtacttgaacaactaattcagctctggtagccatgggggagatgacctggcatatgcaagccctctgccttatcccaaggatggtgtttgatctcctgaaagaccaagtggccagtcagaggagcctcatccttagggcaaggcaggaagcatgttcccaaggaaaaactagcagtgaccctctccctctttcccacctcaaggcagggctgctttgtgtagccctggctatcctggaactatcacacacacacacacacacacacacacacacacaccctttttttctcaagatagggtttcttagtcctgactgtcctagaactagctctgtggactaggctggccttgagctcacagagagatctgcctgcctctgtctcctgcatgtgaaacacatttaaaaaaaattcagaacttatgtgtttatgtgtttgagcatttggcctacacatatgtatgtgcaccataggccattggaggtcagagtaggtatcagatgttacagatggctgggagctgccatgtgggtgctgggaacttaacccaggttctctgcaggagcagtgagagtgtttaactgagccatctctctagctcggagaagcttttcttggggggttcacctgtgtggtgaacataagaagacctgcagcccatcatttttaaaactattcaaaacagcaaattccttatgggactaagcctagacgggctaaggggttgccgactttactctgtctattcacacgttagagacagaaagttccggagacaggcagctcgaaaagtgatcactcttcttgaacccacaccagccacacttcgtgcctagccacccaccgtgcaggactttctccaacacgctgtcaagagtctggggaaacttgttctccggtcacccctggcgttagggcaggaagtgggcagggtagctggatgtcaagggcaggtggcaactactgttcgtgttcagtacaggctgttatgatcatgtctgcattctacacatgcccatcccatctaaggcacagagacacgtggaactccatgtttaaaagggagaacaaggagatggctcagttagtcaagtgtcatgcaggcgtagagacctcagttcaaacccctgattccataataaaaacaaaacaaaacacaaagaggctgggaggtgcccactggtaatccctgtgcaggaaagaaagagacaggtgactctcttgggctcactggccagtgagccaacccaaaccaatgagacttccatgtgcatatctgtggcgtgtacaaaggcttctagcaaacagcctggatcgaatcagacgccagctgcagtgaggaggcaagccaatcaaatcagaggccagctcaccaggggagaagcaaaccaatcaaatcagaggccagctcacttctgccagtgggacagcaaaccagtggctccctgccccttggtttcctacctaccaagggatgactatgggccttacttcagtatttgcaaggagagcccttgacttgccccagcacttcacaaacgttctgttcactttggccacagggactcaactaggcacagggacctgtgaatggacaactgcaactgtgactgacaatgccccacgaccaccatacacgcacacacaaacacacacacacacacacacacacacacacacacacacacacttctgcctctcgatatgtccttttctgttatccacaggctaagcggtgagtggctagagaacacttactggcggtaacagtaggaactaccaagtggacactttcttcccttctgcataagaccggaaacactccctggagctgcatcacctcacaggccccagcttgggagaaacttgctttctctcagttctccaggctggaagcctgacctccaggtgtcagaaggcttggctctccctctctgggcttgcagattccagtcatgggttagggcccacccagtgacattgcctggccataattacctctttaaagaccctccctttaagtggggatctgagatcctgggacttagggtctcagcatatgaatttgggttggggagtaggggggcggacaatttacccatggcaaaaccctgtctccccaacggccagctggctcactgcagccagttaaatcggttatgggccggtgtcacaaatctccatgaaaactaggggtaaacaactgtggccagaagtgctgcagagacatcattgcaagagggaacaaaaacctgcttctcatcaaagcccatcagcacacattcttgttaggaaacgccaggctcaattaggaaggcgggtggtggggagggtctccggggagactcctcggaaaattccagaacccgtcttcctggctttcattttgtctcattttcagaaaaacaggcagtgttcctctcctgctgccctgttcctgactagataacgtttcttgttcctgagctgataatgtttcttccctgccctccacgtagacacaaaacaacaacaaccacaaaaatacgagatgagggtgtagggaaaaaagagaaaattctttttctttacttaactgggtcagctgtcgggaaagcaggggttgggggcggagattgttcaggaatgtggagggggtctgtggatctggagcgggttggaggagacctgcaggcatgctattaggaagaaaagtggtctgtgggtcagcagtgaagaaggcacagtttcgattatccagggagagctgtggcctctgtcccctctgctctgtcatcctcactcagagaccatatcggactcaataggatgactgaggcacagatgggcctgaagcacaggcttcggtgtcccggatcatgatggcagggtctggctttgaagcctgaactctccagccccaaaacaccattccttcgtgaacctgtgctgtgccttcctcttgggctgggcaaggagtgaaggtgacatgtctggctgccccagctagggtgtctctaggggaccacagctgttaaagttttataaagcaggatgccttagcggggcccaaggcatcacccccccccccaaacgaggtatcagatctagtatataaggaagtttatttgggatgtgagaagggggtctggggaagggaggagagggagagaaagaaaggggagagagaaggacagaaagagagaggagaaagaaagaaggaaagaggccaatttagaatctcccattttgttgggagagagggtggagaggaagaggagaggggagagaaagggggaggggaagagacaagaaggaggcctaaaccttttatttatgagctagactcatacctaactgttgggcagatcctagaggaaatgctaacagcagagtatttccttccttcctttcttccttccttccttccttccttccttccttccttttctttttttttcttcttctttttttctgacacaggatgtctctgtgtagccttggaactcactctgtaaaccaggctagccttaaactcagagatctacctgcctctgtctcccaaatgctggaattaaaggcattcacaccactgcctgactagctgagtgtttccaacccaggtaccaaaagcccaagtggccaccctctgcagggtgacaggcctttcctgttcaggctctcctgggctcacctctgcaagcttcacatatgcttggaagcctcacctatacttactggtgatgctttcnnnnnnnnnnnnnnnnnnnnnnnnnnnnnnnnnnnnnnnnnnnnnnnnnnnnnnnnnnnnnnnnnnnnnnnnnnnnnnnnnnnnctcactgtccctaacccaccacctcacccaagactgtccactgaatgaaaatgaggacatgatcactgttgtgttttataaaaagaaaagaagcagggacatgtttgatagagttgcagtatggtgtagggggagtgggtgcctctgggcccatgctgaggcatccccttccccccctagatatgaaacacactatggtatagtatcgaatagagtttatttagggcatggggagggggattgaggaagtagacagaaaggcagagagagagagagagagagagtgagtagaggagtagagaccgcccatgagtgtgcaggggtaggggggaggaatggagagagaggaggagagggcaagggagcaagagaagagcaagaggagaagagaagagagtgagaagggggcacacagccccttttatagtgagacacacctggcaattgccagctaactgtggggaggagcctagacaaaatgccaacaatcactcctagatatggctaagaagcggttatggtagatatgagagagagagtagtcagaggcattctctagactgatctgagctatgagaggagagaggaagaagagagaaaagggagagagggcacgcaaaccaagagaagagccaaggatcaagaggccaagagaacaagaagccaagaagatgcatggccaaaatgtccaggttatataggaaagctggggtaagggaagtgagaagaagctggagaggtttaagatagttagacatttgtcctgagtttctctgggatccgatatgcaccaaaccattctgcctatatactttctttcttcccagcctcccaattgatcgtttcttttaaaaatgatttcttcaattgttcccagcagaatagggagctcctggcgataagtggaggacctttccttgtagctttacaataaaggggtgttctagtgctgaagtcctggctgtgcgcaagtccaggagcggctgggaatgatttgggccatcagagataggctagttcaactggctcagctgtttcctgggtctggagtgccttttccatgaccaagtgcattttggtgggagcctggatgcagaggctgttcaggaccttacagctccacctggctgctgattgacaggtcctggaaggaaaactcggagcacagggaagcctgagagtctctgctgtggctgtccactagaacacgggaggctgaggagctcccagggatactagggaggtgagctcagcccggctgggcactgacgcctcctttgctccctctccttatttctctgttttgttcgtttgttttcaatttctcattttctatttttgtaaactaaagacattcataaacacaacacggaactgtcaaataatttctaattcttaagatggtattccatgggtgctcagaaagtgtgcatttatttattaatggtaagtaatatgtcagcacccacagcttggccattcatccctccatgggtagacatttaactggggtgacacattatttcctgttgtcatccaaaatcctacataaaaagaatctcgtgggctgggatggtggtttgataggtgaagcactcactgtggaagcttagggcgtggtagtgatttgaataggtatggtccccatagactcctgtgtttgaagccttgacccatagggaatggcactgttaggaggtgtggccttgtttaagtaggtgtggccttgttggagaaagtatgtcactgtgagggcaggctttgaggtctcctatgctcaagctgtgcccagtgtggtacacagtctctgtctgccttcagatcaagatgtagaactctcagctcctccagcaccatgtctgcctgcatgctgctatgcttcctgccacaatgataatggactaaacctctgaaactgtaaaccagacccagtgaagtgttttcatttttaagagcttccctggtcgtggtgtctcttccgtgcaatagaaaccctaaacgaagacagtcacaatgctccccaacaccgtgtaaagctggatgcaacgacgcccatctttaatcccagcagaaacaggaagagcctgaatgccagccagattagtgtacacagcatgaaacctgacctcaaacaaagtggaaggaaattgttctctgatgccacatgcaagctgttggacacacacacacacacacacatacatatacacacacacttaaagaaacccttttatttacaatggaaatattctacaaatggagcaaaagacaggtaaacaaacaacaaaacagaattcctagccttaattttcagcactcagataacgtttagcattcattttgatatatcaaggggagcagtggtggtatattcctttaatcccagcacttcggagacagaagcaggtggatctccgagtttgaggccagcctggtctagtgagtgagttccaggacagccagggctacacagagaaaccctgtcttggaaaaaaaattaaaaatatatatcttttttttttcaaaggtgaccacagagtttttagaagttccagaagcaagggttttatcctttttgtttatattctgctatgatgggtatatatcattttttccagaagtgagcacagagcttttagaagccccagaggaagggttttaccctttttgtttatataatactccgatgagtacttccttatttgtgtccttaaaatgaatgtttagaaatagactggtgggtcaaggggatccttgccctctgagtaaacactgccaggtcccttaaaagtgcttgcatcacccacacgtcaccaatgtcaactagaactcctacttaacttaagcttttgcctaaaagggacaatggtttcttttctctagcaaacgagacaattaggtgagggaagacattctcagctgctgttctcatgcacatctggtggctgagtggtcaatctgtctcctgtggctactgaccataggaagtctcagtgaattactacatagattcttagcacaaacaagcccgtcttctctttaggagagggctccactcaccagctgaccgtgttcatgttatactcaaaattcagctttctttatattttgttgttgttgttgttgttgttgttgtttttaagaaggatttatttatttcattatatgtgagtacagtcactgtcttcagacatcccagaaaagagcattagatcccattacagatggttgagagccaccatatggttgctgggaattgaactcaggacctctggaagagcagccttaattgctaagccatctctccagcctgggtagttcgtttaaagaattttgcttttcttggaatttcatgagctatcctgttatgtaattttggtaagggtttactcagcttacacttccatgttgctgttcatcaccaaaggaagtcaggaatggaactcaagctggttaggaagcaggagctgatacagaggccaaggtgagatgttacttactggcttgcttcctctggcttgctcagcttgctttcttatagaacccaggactaccagcccagggataacaccatgcacaatgggcactctccacttgatcactaattgagaaaatgccttccaactggatctcatggaggcatttccttaagggaggctcctttctctgtaataactccagcctgtgtcaaattgacacacaaaaccagacagtacaactgaccccttgtcaacttgacacacaaacacgtcactattaagcttcatcccttactttcttattcatccccaagatctaaataactttaaaaagtcccacagtctttatgtgttaaaagttcaatccctttaaaatacccatatcttttaaactccaaagtcttttacaattaaaagtctcttaactgtgggctccactaaaataatttcgtctttcaagagggaaaaatatcagggcacaataatataataatacaatataataatataatataataataatataaaaatatcaaaagcaaaatcaaactccaaccatccaatgtctgggatccactcacgatcttctggaatcctccaagggcttggggtcatttctccagctctgccctttgtagcacaaccttgtcttctaggctccagctgccctgtattccactgctgctgctgttcttggtggtactggtatctccaaagcactgctgtgttccactgtaactaggcttcaccaacagcttctcataggctctcttcatggtgccaagcctcaacccctttgcatgatcccttctgtcctgggcaatcaattgcaactgaggctgcaccttcactagtggcctctcacagtgccaggcctcagctgctcttcatgacctcttcatgccttcaaaaccagtaccacctgtatgactcttacacattaccaagtccagccacagcacaaggtacaaccttagctatttctggaattg

SEQ ID NO: 405 - DNA, 815 bp, Mus musculus
agcgggcgcagagctcggcaaggcgctgggacggtggggctctgcttgccatggccccgggcctgcggggcctcccgcggtgcggcctctggctgctgctggctcaccatctcttcatggtcactgcctgccgggaccctgactatgggactctcatccaggagctgtgcctcagccgcttcaaggagaacatggagactattgggaagacgctatggtgtgactggggaaagaccatacagagctatggggagctcacttactgcaccaagcacgtggcgcacacgattggctgtttctggcccaatccggaagtggacagattcttcatcgctgtccaccatcgatacttcagcaagtgccccatctcgggcagggccctgcgggaccctcccaacagcatcctctgccctttcattgcgctccccattacggtcacgctgctcatgactgcactggtggtctggaggagcaagcgcacagagggcatcgtgtaggtatcccaggtgatgagggattggggaaccatgggcctagcccagcaacagcatcaggagcaggtcccaccttgcatcctgctctagcctagttagcacaggacttgagagtggctctgcattaagctgaatatgccctagccagaggcttctagcaggggagcaggggcctgcctctgcttacctctgagattgttctaagcaccaggtctctggtacacttcatcaccactgtgggcattctgaactccaaggaagactgcacagatgtgtttgtagatgcacagtttgtgattaaaagagtattcttaaacctgg

SEQ ID NO: 406 - protein, 162 aa, Mus musculus
RAQSSARRWDGGALLAMAPGLRGLPRCGLWLLLAHHLFMVTACRDPDYGTLIQELCLSRFKENMIGKTLWCDWGKTIQSYGELTYCTKHVAHTIGCFWPNPEVDRFFIAVHHRYFSKCPISGRALRDPPNSILCPFIALPITVTLLMTALVVWRSKRTEGIV

SEQ ID NO: 407 - DNA, 72586 bp, Homo sapiens
tcctattcagccatcttggaacctccatctggcattttccaagtataatttagcctaccagtgttgacatggaatatacatgaatggtaaggcaatatatcaaatgactggatttcaaatgtttcctcttttatgggatttataaaagaattgaatatatttgagaataaggttttatttcatatattaatttgtctccagttattatcagatccactcaaaatgtccaccaggaattgggttccaaaaagtaataataataataataataataataataataataatttaaaaggactatatttgatgaaacacaaaaatcattggctttagccatatatcaaattagtaaaatcctaattttactaattaaattactaattaaattttactaaaattatggatatttttcctgtatgttaattttatggttatttatattaaaaggctacattcagagcattgaataaagtagcaacatggaataggtgttattttcaacatacccatagaaataagaagcatacctctaatcatttgtttcccagaggaatgatgaagtggaattccattctagaatacatagagacaaaattactgcctttgatttggggaaaatatagaaagagtcacttgaaattctaattttcagcaccgggcatggtggctcacacctgtaatcccagcactttggggaggccgaggcaggtggatcacgaggtcaggaattcgagaccagcctggccaacatggtgaaacctcctctctactgaaaatacaaaaattagccgggcatggtggcatgcacctgtaatcccagctactttggagcctgaggcaggagaatcgcttgaacccgggaggcggaggttgcagtgagccgagatcttgccactgaactccagcctgggcaacagagtgagaccccatctcagcgtggtggaggtggggaggaaagtaattctaactgtctcacgtgtccgtgtgaagaggccaccaaataggctttgtgtgagcaacatggctgtttatttcacctgggtgcaggtgggctgagtctgaaaagagagtcagcaaagtgtggtggattatcattagttcttaaggttttgggataggtggtggagttaagagcaatgttttgtgggcaggtggtggatctcacaaagtacattctcaagggtggggagaattacaaagaaccttcttaaaggtgggggagattacaaagtacattgatcagttagcttggggcagaaataaatcacaatgctggaacgtcatcagttaaggctattttcacttcttttgtggatcttcagttgcttcaggccatctggatgtatacgtacaggtcactgggaatatgatggcttagcttgggctcagaggcctgacactaactttcaggttttttgaagtaaagtcctatccaaaagctaaaggtaaagatcaggcagctttcgtaaattaaagggctttcagctgtgaccagtaaattgctagctgttacgaagcttcccaagttaaatttagaaactagagttatttttcatgaatcttttggaacctcaagtgaaaaatctctgtttatcttattctgtaaaatctctaacttgatattagataattggataaaattattgtagaattttaaaagactggtcaaattgtcccaagttttcatagatcttcactagcaaaaatttagataatttaacatacattagtgctcaaaatcaattttctttcacactgttgtattagataccaaagagcacttagctatatcaactagaatatatagataattaatatgtttggagataaccagagatttggaaaattgtaaataccataagacaatcagcaaaaacagtggaactaaaaattcccaattggctctgcctgatgccaatctatactggtcagaggagatactatgtgtgactcagaagctcaatgtaacaggtaatttctcttttaaaaaatagatctcaaccagtaatctctatacatgggcttaagtactgctttttcagtattgacattgttatgtattatcaaatacatatgtggcacgtagtagtaacatattttaacgtgggcaggacagtgaccttctaaaatgtcctgttgtcatctggatcctgtgatgtgttgtacatgacaaagagaattaaggttgcagatgcaagtaagattgttaattagccgacttttgagattaggagcttatcctggattatctggccggactcaatctaattacatgagtccttaaaagtggtagaggaggcagaagagagaaccagagaaatggcattgtgagaactcaacacgctcctgctggctttgaagacagaatgaggggccgagagccagtggacagcccccggaagctggaaaaggtgggaaacaggggctccctagagcttccagaaggaatgcagctttgctgaaaccctgattttagtctagtgagatctgtgtcagacttctttttttgagacagagtcttgctctgtcactcaagctcgagtgcagtggcgcaatcttgcctcactgcaacctccacctcctgggttcaagcaattctcctgcctcagcctcctaagtagctgggattacaggcatccgccaccatactcggctaatttttttttgtattattattatttttgtttgagatggagtctcactctgatgcccaggctggagtgcagtggcacaatcttggctcactgcaacctccgcctcccgggctcaagcgattctcctgcctcagcctcccgagtagctaggactacaggcatgcaccaccacacccatttaatttttgtatttttagtagagatggggttttgccatgttggccaggctggtcttgaactcctgaggtgatccacctgccttggcctcccaaagtgctaggattacaggcatgaggcttttttttttttgtattttttagtacaaaaatacaaaacggggtttcaccacattggccaggctggtttcaaactcctgacctcaagtgatccgcctgcctcagcctcccaaagtgctaggattacaggcatgagccaccatgcccggcttggttcatctttaatatcagctatttaagagggtctgaagggctttctttaaagctttactgcacaggcctagagtgaagcatttaccacggtgtatggcgcagtcaaggtttgctgctgctgctggtggtagtgctgtcatctagcagtgtgtcatggtgcatctttgttagtaaccttaccctgactttgttgtaataatctgttgttttacttcattctttcttaatttatttttattcctcttctattaatgtctgtaacctgcttcagtatttattagaataaggcagaccataggttggcttgctagtcaggggacacgtgattgcaaataatagaaacataaactagcaaaagtacaagaaaatggaaatgaacgtacatagttgaatactccagaaatgaattcaggtgaagctggatatgctttcttctgggttggcatcaggctccgcacacataagggcaaagatggtcgctaacaggtttatctaatttatgtaattctctgagttactaattcgaggaaaaaaatcgtgtaactccagcaaaaccccggggaagactctgatgataggcctgggctccacaaacacccatgaagtgaagagtggccagagaacaggaaacctgattctccagtgagaagcagaataagcaggaggcatttttccctcattttataatacaaaggctttgttatacagactttaattatgtttgtatacataaacatatgccgatatatatgtatacctacattcacagtaaagtcactagctttggctttctaaatgcttccaacactgtcagatgcttcagatgtgaaggatttgtttatgcctctctcaaacactcacattaccctgagtaattaggaatggttccagtgttcactaagaattactgggaagtaggaacacaggcaatgttaagagttgggtatatgactgcttatttgaccttttaatttaggagtagttttattgctaatatattaggtatatacgatctttttatttagtctaaaatatagtctatataagtcttatataagtctaaaatagttttagacttacagaaaagttgcaaaaaataccataggaagttaatgtctgccattcattccacttcccctaatgttaacaactcctgtaaccatagtaaaattatcaaaactaagaaattaacactggtgcaatgctattaaccacaaatcttactcatttttaccaattttcttcctaatgttctttttctgttttaggatccgatccagtagcccacactgcatttagttattgtgctttcttcatcctccatccttcatctgtgacagttcctcagtattttcttgagtttcatgactattgtcatggtagtgaattgttttatcttgacatttgatgagtattaattggttattttgtagattacctcttaatttggatgtatctgatgttttctcatgattagattgagctatacgtttttatgagtaccacagaaataacgtctctttcttagcacatcatacctggggataatatcttttacaggtgatgttatccttgatcacttggttcaggtggcttctgctgggttcctgcactatgaggttaatggttttcctttgtaattgaaggagctctttgagagtacacaaatatgctgctcctgaaacatttggtcactggttctagtattcgtcaaatcttggctgaaacagttattcttgtggtgtttgcttaatgatgattttgtgtgtctctcatcccttctatatttattacttggaatttttctgtaaggaggagccacaccttgtcccctgtttattcagtgttttatatcagtatgcactcgatgtttattttgttctgtgcattacaatagtgttcttttcttacttcgttgctcacattattccagcattagccattaggagcttcttcaggttggggtctgtgtccttttgaaaaacccattcttttttaagtacttattttctggcatcacaggatatttttggctcatcttgtacattccctgccccagcactggactccaccacttcaacaagctgtttccttttattggagaatagtatttagaaacgaagacctggtcaggaggtttgcttgttgctgttggagttggtcttaggctctctcggtagatatagctgggaaatatgtgcgtgtgtattaatccaagcaaacagacacacttgtattttgtccctgtatttacagctagtcatcagcaccatatatctgtgtgtgttcatactgatactttgaatttctgtcccttatttctaccttataccaatagtgagaaaactggctcacgttattcacaatttatttatgtatttatttgctcaatcctactatacacgtaaagtcattacagcgttgctaaaccatggccctgtaagaaacagatttactaactggagtacgtcatttgtgtacagttcttttgtcttttgctcttttgtctaaatgtgcttaggttatgtcttttattcctgatccacccagggtggctatgttacacatttgtaatatagtctcctagaggttaggggttccttcagtttgtatgtctgacatttcatgtcccggttttctgcagtagctctagatggacttgtctcttgtttgtctctatggtattggggtattttaaatttttcacgtctagagtgttaagagttcgtctttctggagattgtttcatatcacccgtaggcctgttcatcagcctccctcttggctccacgatttttctcagtctgcctttgctcacactaagcatgtggctggctgagggtagtataggagtgtgagttgtgtagtgggatttggtgggaattttttccctgttactcagctcctttgcagttggaaaattctccaagtaatgctgaggacagttttatatagaatttatttttcacttcttgttttttgtttgttttgtttcttgggggaataggggagataggcaacttctgttctcagctacttgcaagtgttttggttttaacagtgggacttcctgcaggacttgaaaaattgatagttgatgaacctgagttccctgagatactgctgtttttgttagtgtttatccagcaattgcacgatttaaacaactcacagaactaagttgttattgcttataagcatgttatcttcagaaccactgattcattattgataatgattgaagttcagcctttaaattgcaggcctgatagtgaggacaccagtggagtcttccccttcatatcagcaagttattgaaaaactatctgtagaatatttgatgcttttttccttccagtacttaaaaacgttccattgtattctggtggcattatatcccatgagaactcttctgtcacccttacctgtgttttgtacatcagcagtccctagcctttttggcaccagggactggttttgtggaagacaatttttccatggggtgagagggggatggtttagggatgaaacggttccacctcagatcatcattctcataagaagtgcaacctagatcccttgcatgaacagttcacggtagggttagatcagctactgctgatctaacaagatgcggacctcagcttcactagctcacccgctgctcacctcctgctgtgaggccaggttcctaacaggccatgatctggtactcctgtggggttgggggacccctgctatacgtaatgtcttctctctctggctgcttttaaggttttctctttattactggctttaggcaatttgatcgtgatgtgctttcacatatttttctaaatgatttttgtgcttggagtttggggatgttcttggctcatgggttaatagaaaatgttccacatagtggtttttcacatatttcccacccatcttcctccaggggctccagttacaccttagagttgccacctggagttgcctcatggctctctgatgctttgttcttttattgtttttaagttacgggatgtaatagctacttggaaatcatttgctcctgttagttcttgcttttaagttttgttaggcagcaccagaatagcctttgtaatttttactgactacagagagggacttgcccttctaattatgctctgatgttctgtgtatttcaagatttttccactatggttggtgggaactggaactattcccagctgggtgtgggctcttaggctcttttcccttgggtagtgtccttagatgtgtgggctgagactcaagtgggaccctctgtgatctcgcaagcgcattctttgcgcagctctttcctctctggtactatgccctgccagcgttaactgcctggcttccccagactctctttgggtttcctttctccatctgtggtctgcaaactccaggcagtgagcagttgtagcactcaccttatttgtttccctgctctcaggggtccctgcacttcttgtggtccactgtgacaactgttgtttcatacattttgtccagttttttagtttaagatgggaaggtgagtccagtccctgtaacttcatctcggctggaagcaggaatcttatgttaatagtgaatttttagcagtgttgaccaggctttgattgtatctttagccctactgtgtatgcagtaaagcacttggccattttctaatctcttctattgtttaacctaatgcccctctagattgaggtaccctgggagaggaatgattttccatgctacctatgaccaattagaaatacagatacatcagactacaacttttgaagacgggaagcccatagtagttgctaaggaatgtcttacttagacccaaggtacagacaggaaaatcattaggagagaacatgcctctaggtgtgtgccttacttcagcattctccagagaactgtgaatttctaaagcatgtgaacttgagaaataggctttgtcttcttaggaaaatgtatcctttagggggtgttgagaaaacagcagtgacaggggcctctggccttgcctccttgcagtcaagcttcaaagagaaaacgttgggaagaaagactcctgctgagcctgatgaaagaggagtcccagttgccaaccaaaaacatgcagccaaagtccacaagctacaagtagaaagggtggctcaagccagagtccctggatatggagggcgagtgatggctgcagaaagatgcaggttcttctcccccactatgactggccatcgcctagtgcaggatgtacggtggccctgtcccagggctgtgctggcagccacccttccccactagctgtgctgctctcacatggcacggcctctggctgccaggcctgtgctcgggcctgcatttcccttgtgcccttctctccacccagccctcaggactgcctgggctgcattttgtccagaatcctttgtctccttacttgcactgcagctgaggcgagtgtcccttgttccgggtggctcctgtattgtggcgctcatgttattgagagtcttagaggtcaccccctagattcaccaattgaagggcagggcttgtcgatctaacagtgtcttgcacatagggacacaaatgtctgttaaatgaagaaagtagggatgccaggccacccaatggggtgtatctcctagggttcaagaacaagggctaatcaagtcaagagaatgtgtgccctcccccaccatctcacccctcactctcagaacacttggggcccctgcacaggtggtaggcatgctggccctgagtgccctcccagcctgtgttagaagaaccagtggatgacctcgctgtcagctgtctccccttctctgagcttactgcaggtggcagcagcctctcagccacagactgttccctttcctaggagaaaacgatggtcactcagcaatgctgtgcgcttgcagcttccaccacaaaagagacagctgtggccgcagcaccagggtggtgattcttccccctccaagggcagtggtgcattccttagcacaagtataaatttactgttgctaagagttctcggaacaggataatacaagaaggaaccactgcaagtgaaatccagccaccagtaatgccgagaggccaggcctgtgcctcccaaaacctgctcctccgcaggcttccccggcccatctccagagcgccctcctctcaccactttacataaacgaatgtacccaagatcccccatcagttttccatgcagctgccagagtgccaccaaagcaaacctcatctcaagactctgtggccaggccctcacaacctcctgccaggctctcgctacctacccatcaacagcaagactcccaggccatctcaatccccccaaagagccctgttcctccagccccacggcttctgttcacctgccgtgctgtccccgcctctgcccacccactcatcctgcagatctggagcagcattccagggcctggtaagtgtgcgccattttgggttactacgggtctcgccaggcgcggtggcgagttttgccccccacgctccccagcgcctgcacctgggcggagaggtagataaggctgggagatcttagccttttgcaaggcaaacaccaggcaggaacgcccagaacctcggaggaggaggaggggaagatccccaggtggagaccaaggtgcccctcacgctgagtcgtctaggagaccctccctagtttaaaaagtgtttatttgctcggagaacatttcaggaggccttcctgggaccccaagtgtgccgccccccgggaggggcctggagacgcccgcgcggcccccctgcaaagttttaccggccctgggcgcccccggccctggcacccacgcggggagccgcagtgggccgggccgcgcggccgccgcctcccaccgctcccgcgcccgctcccgcccccggcgcgtctcctccgggcccgcgccgcggcgggctcagtcctcagcggggcgcgtggcgagcggactcgactcggcaccgctgtgcaccatggcccgggccctgtgccgcctcccgcggcgcggcctctggctgctcctgggtgagtaggtccaggggtcccggccgagctcccttcccctggccagccggtgtcctctaggggagaggaggggagcgggtgggagcgggtgggagcgggtgggggcgggcgccgcgggcgcacagatccgctgcccttgaacgcgggccgccccggttccaggcgggaggccccagggcacaggggaggcggagggcgcggaccggtgttgcgcttctcgccggggaagggacggctttggggacgtcggagagcgggcattctggaaagcgtggggtgagtcagccctgcacactggagaactagttttcagaaggaaaaacaggacgcggggttccccagccccgcacctcgtttctcaggctgtgcgccgcggtgactgccagcgcaggctcccttccctaggccgtcccgcgttgcaaaacctgcagacgggcaccttgcagaagacgcagtgttcgggaatcagaaccacagccggtttgtatggaaattagtcaacactgacaatctgtcgcctgcagcagttgcttgtttgcaaatcacgtcttttgcagaaatgaggccagcccttttcgggacacttccatcgctttttttcttttttcttttggtttgcttgttaacttggcacttttggctaatagaaatttaaagaaggacgggtcccttggtgaagtggtggaacacgtttggctttccacttggagggagaagtggagattagcggcagcctcatggccacaggaactggccacacactcggcaagaaacggtgctgttcacttcccttgtctgtaatgtgttcctaaaatgctaactcaagccccttctaaaccgctttggctattgcattattccgtgtatttagctaccttttaacggaaactgtgaataggttactggcgtgggagaacccagtgtccctgggaaggccggagcagttgtttctggtatgtgtggcctttccccggaaacagtgatgttggtcagaggcacctgccgcacaagacctctttggcgctggcactgggcaagcagggaccaccggcgctgttgtagctgggggagtggttcgtggcccagcgaggagaggggccagggcttcttgggagccatggatttctgttccctatttgtaaacctctccaaggggtggcagatctgcatagaatcctcagaggccgatataatataatctgaaagcggatcttgccactttagagttttggctgaagttacgtggaaagcagaatctcgcagtaattttattctctccatttggcttgacatggccttcactgttttcatttactaagaaacaaacatttctttgttagcaaggcagagagctgggttgtggaatattttttacataaataaccaaataaataaacgttctttactagtgtccagaggctgaaccctctaaagcttgtgtaaataaaacactatgtcacgatcacatataaagaccttccttgtttaccgagaaaactattcatgttctgccgaaagtccaaagtcctgtaattttaacgttattttgagtggcctggctaatgttatctcttggaagaacaaacaaaactttatgaggttatcagtaaattaatgtcattggagcccagctgtaattagtagaattactgagcacaggctgtttccttcccaagctgtagcactagccaggtctccttggtgatgaagattttgctaccaagaatggcaatgtggaatttttttaagtactctagtttacaggtttaagaacttatctgtgacaattttacaatcaagctatttgtcttaggtagttattaagaatctcataatccggccaggcatggtgactcacgcctgtaatcccagcactttgggaggctgaggtgggtgaatcgcctgaggtgaggaattcaagaccagcctggccaacatggtgaaaccccgtctctactaaaaatacaaaaaaaattaggcaggcatggtggcaggcacctataatcccggctacttgggaggctgaggcaggagaatcgcttgaactcagaaggcagaggttgcagtgagctgagatcatgccactgcactccagcctgggtgataagagtgaaactccgtctcaaaaaaaaaaaaaacttaggatccatatatagttcttttccctctgagcatcctgtgtactcttctgtttactggagactctacatgcattctgaaaagtttgtgtatagacaccgaaaagctgttcgttaaccaggaaagaaggatgcgttagaagcccctggtttttcgagtccatcttcactcagggaatgctggctggtgctgtcacacatgaactcagtcacctgtcctaggaaacgcatgccttccttggctgtcacgtgggagccaggggtttttttaatggctgcaacattaattgaaatgtatgactttatataaatacaagtagaattggaatgacagggacatcacaggaaatgctatgtgactgcttcagattgccatgcggttttaaatctggacacagttctcatgccaaagtccaaatctgaaggattcttatttgttaatcaactcagtgtgtttgtttaccctctctgtgtgtctagctgcaggaagaaatttctggatttttgtcttccttccacaggcgcatgcctgtcagcgtgcttattaccagtccgaggccagggctgttgagaaacatttatatccacagtgcaaatggtagattcagctccgggaaatgttttaggtggaatctttagttaaggctagttggaaaagtctgtcctgatttttttccccagaatgcgcccatttcatagcttctaatcagttacaactggcgtctggctgactgtgtgatgcaggtgccatgtgtagtgtgaattccagcggaaatgctgagcccagagagtgaagcccctcgggcttgcctgccagtgcccctgccagtgcccccacccccaactcaggcctagaacccctctttcctgacggtctttgtggtatggtgggctggccctcagtggtctctgagccaggcctggccatccagatggtcccagggaggagactggccgcaggctggacagtcagtgttctgctggaaccacggggaaaagctgcgtctttcctccaggctggatctgagtggggctgccacagtctaccctgtgagccatgggggagtacctgtccatgacatagagcactcctgaagccttttgagcccctagatcgagctcatggggtacacatttccatcatgtgacccataacgtttgagatgggtgtctgtcccttgcagggacggcaggctcagggggctccgagaatggcgtacctgggggactgtgggaatcctgcccaagagcctcctcctccactggggacccagggaggcctcctgaaagaagaggtgctgcagccaggaagacagtgggagctgggaaggggacaggggagcccgggctacagtggccctggtggctccagcacttgctggaccatgtgcccactgccccagcccaccagtttcttggtggcaaatgaagaggcagagacggtgctgccagggcactgttcagttcccagcctgccataccccctgcctacctctgacacatcccacagcagacatatgaagccctggagggatgtccttgtccccagtcctctctgctccagaacaggaggactctcagctgggtgatgttcctggaggacctgtttctccttagtgaggaggatgcgtcaacacggccaccataggagggctcccagcccaaacaaaatcgtactcacttcaccgaatgatgttattctgttcaggaaaaatatttttttcctaagatggtttatttcagtaatttctggggcatccgaaaggcatcactttaaccatcttttaaatcacggcttctgggtggctttgttggagcagggtccagggggacacactagccagatgtggcaggagtgcagggctatgggcctgagtcacaggccccccgactctacgttctcagctctctcggtgactcctccccgtgctccgagagtgcttcactccctcccatgtgcagtcacatggtggattctctgggaccgagaaccagaatcccaaaaccccaggccccggctgtccactgtgccctccgccagggtcagcaccacctccacccctcacggggacaactgcccagcctcccagaacccccaccccacccaccaccccagggacagggggtcttcctctgtgcccccagcagaccctcagggtacgttagtgtcacccccacacatgccatgttcaggcccccaggccttggctccggggaagcagctcctgaattagctgagagttctgggaaaccacgggggcaggaggggaggcagagtgacctggcccgtggcctgggccagctcactccagggggtggggtacagcttgcccaggaagccctgccccctgttctcccggaccacgtatccccacacgagtctcaggaaggactgtcttgagtctgacaccacctgggaggagaaaagtcagtgatttgcccaaccatgcgcgtgtttgcttcgtaaggcctgccgctgtcaggtaccctggccccaggccgggaggggaagaagcctagaaagcattgcctcttcaatggacacttggtgactgacacccggggtggctctctctgcagggattttcttgcctctggaggagacagttgtgagagggaagcgggggaggtggatggatgagggaatgccgggaaagcgctgcaccgtttctcctggaaacacccatctgccacctcacacacgggacacacagggtcaggactctcacacacgtgggacacccagggtcaggactcggagggggcaaaggacaggggtgcagagcagcctgctacagtagggtgtcctacacaacccagggcagctcccccagaggatgatcccacaccaaatgtccatagtgccagggtggggcagccctgctgcatgtcaaccatgtagacatgtggtgctacttaaatgcagcaggaaataaacaggagaccacggagcacagccctgaggagcagcggcagcacagtccagagggcagagggcaaggacggttgtgcaaaggccctgctttggaagttcctggaagcctttttgactgaagcatggtggggaagagggctttgagccgaagctggtgctggaggaaagacccattctctaagcattcagatctcattcctagggcagtgggaaaaccttgaaggacattaaagggggtgacaggacagaaggtgtggtttaaaggagccctcagctgtggcccccagcatgggcaggaggccaggcaaggataggagtgggagggttccagggagtcctggaggcgaaagtgatggactccagtccctgggcctggatgcaggaagtgaggcagcgctgaggaatgaagaacagcacctggcagagctcctgggggagtagggagggcagggcaggggagaagagaggagaggaggggaggggagagcaggggagaggagaggaggggagggcaggggagaagagaggaggggaggggagggcaggggagtagagaggagagtgcaggggaggggagatgacaccccaggccacagccagggctgccaggaaacatgggagccccaggcaaactggaatttcagataaacaagaagcataagcctgtctcatacagtatcgggaacatgcctcaaaaaccaccgtttctctgagatgcagatttcgcagggcctcctgtcatttgctgcacctggcagccccgtcctcagcagccacatggggttcagcgttccccttggattctgaggggtgatggtacgtagacaggagtctatgcaaatcaagggttcagaaagaggtatggccaagagaggtgtttctggcggcagcagggcctggcctatgtcaaatccttgcttggaggggtgaccggtgagagtgggtagaaacaggcccaggctccttgtgagaggccagagaggacggccagggaggacagagaaggaaacgggccccaggcaccactgggcaccttgacatgattggtggtggagggaggcagatggcagggtcctttgcaggagaggcagcggcgaaagctgcccttaggaggcagcgaggaggtgaaaccagagagcatgcctgtgtaggtttcctccagtgccttatggttctaaacacacaaacctttgatgcatctggaatttaccttaatttcctagcaatttttatcaatggctcaatatttgggggattttcatggtaattgcactgaatgtattaactggtcagggaggattacatcaagaccaccggctcgagaaacagcagtctgttcctccacccccacgtctgcatccaggcccttccacagagatctcatttctcctgcagatgactcattcagtgtctaggaatccggtgctctgtggccactaccgagagtgggatattttcccccattttattttctagctggtcatcgctgggctaagaggaagctcctcttctgtgtgtttcttttgtgactgttgtcaccctgtgcctgttttttattttagtttttttgcttcctgcttggttcttcaggccagtcataaggtcacccgtaacctagggtggtcctaccacctcttaacaattttccctgttttgttctccagtcgtactgtgttggagagtgactcactgctgagtaggggagtgacagcagctgccttcctttgctgctggcgatggcaatacaagtgacccttgaacaacgcaggggtggggcgccgaacccccacatggtcagaaattcgagtgtagctcttgactcccccaaagcttaacgacagcctactattgagcagaggccttactgataacattatctgtgagttaacccatattttgtatgttacatgtatgtatactgtattcttttttttttttctttttttgagactgagtctccctcttttgcccaggctgtagtacagtggtgcgatcttggctcaccacaacctccaactcccgggttcaagtgtttctcctgcctcagcctccccagtagctcagattataggtgcccgctaccatgcccggcaaatttttgtatttttggtagagacggggtttcactatcttggccaggctggtctcaaactcccaacctcaagtgatccatgcatcttggcttcccgaagtgctgggattacaggcgtgagccactgtgcccagcctatactgtattcttataatgaagtaagctagagaaaagaaagtgttattaagaaaattagacccagcatggtatctcacgcctgtaatccttgcattttgggaggccaaggtgggaggatcgcttgagtccagggggtggaggttgcaatgaaccaagatcacaccactgcaatccagcgtgggcaatagagtgagatcccatctcaaaaaaacccacagaaaatatatatacttttcattaagtgtaagtggatcatcctaaggtcttcatgttgaggaggccaagaaggaggagcaagaggaggggttggtcttgctgtctcagtggcggcagcggcagaagaaaagcttcatgtaggtgatccacacagttcagagccatgtggtcaagagttaacaccttaaaccttctgtctttctcctttggggccagatgcttttttattgtatttttgtgggggtgggggtgggagagggatggagaatgcatcttcttcccgtgtgtaaagtaagcttttgtcctgtgaaggaagaaccgttcgatgtgacacaacaacctgcccagctggacattgtctcagtgctggcaggccgctggcactggcgaggctgtgacacaggagaagtggtcagaggctgcgaacctaccgtgtttctgggatgaatggagcgtttcctcattcctgtgcagcctttcggcagtctcaggtgtctgttggccactgtttgttctgagtgtggcttcgttcttcctgagtgagcttgctctgtactttaccttgggagttttattaccagcattgggttttcttcccaagatacaggttgtggacccttattctttccctgtgtgctaggatagtcaggatgatggaaataagcagttccttgaagatctagagggtcttcattttcacctgcaaaaccaccggggccaggctccttttcatggtgtagaaaattggcaaccttttcagtatctttctggtgttaattggtccccttgggttttctgtcttttttttttttttttggatggagtcttgctctgtcgcccaggctggagtgcagtggagcgatgtcagctcactgcaacctccacctcccaagttcaagtgattctcctgcctcagtctctcaggtagctgggattactggtgcctgccaccatgtccagctaatttttgtatttttagtagagatagggtttcaccatgttggccaggctgctctcgaactcctggccttcggtgatccacccacctcagcctctcaaagtgctgggattacaggcatgagccactgtgcctggctggggttttctgtgtcttgtagcagtgatgttgttttacattttcctctgaagttgttcattttatccacatatcattatgtgaacaattatttttctaattccctctacatctgtgaacatctgtcctttttagtgcaattttgtgaatttgtattttcatgttatttcttgatcagaatggacagtggttaatctgtgattggtctcttccccactgattccctccccccaccaaaaaaaaaaaacaaaaaaaaaaaaacagttcctgagtttacttactctacactttttcttgaatgcctaacgcatttctttttgttctttgctggcgtgggaatgaaacgtcatcggttctctgcttggcagcttggctggatcccctgagtttgcctctgccttgtgctcatggttgatattttctggattctctgtatttgtggtttctgtttcctctttagcacgtgaattgtttggaagcaagtttttacaaatctcaggggctccggctttttggtttctctcccgatactcattgctagttttattgcactgtggtcgggggcagagcgggaaccacaaccatgacttagtgtgcattgcgggttctttcttggtcttacaaatttttcgtgttgtaaatggcccgtaagcccgtgggaggagtgtggcgtttttatgtatccatcccggtcatcatattaaatttaatacttagggcctccgtatccctattttcatcttctccatccatgcgcattgtgtgaaaaccctgcactgcgtttgtgatcctgcctgctttccctgggcacgtgttgctgcgtgttcacgcaggggagaggatggggaattccatatgtgaccctgccagtcacagctgcatggtgacttcttatagctctgtcccagtcattgcttttttaattttaattgcggtaaagtatacaccacataaaatgtaccatcttacctatttttaagtgtacagttctatgccactaagcacactcacgctgctgtacaaccatcgccactatccatccctagaagttttttcattttgcaaaactgaaactctgtcccagttaaacactaaccccctgctgatttaccacctcccccagcccctgggacccacgattctactttctgtctctgactactctaggaacctgtattagtggaatcatacagcatttgtgactggctcatttcacttaaggttcttccatgtcgtagtgtgaatcagaatttccttccttttgaaggccaaataatattccactgttatggatagaccacactgtgtttatccattcatccatggacacgtgggttgcttccacttctggctgttgtgaatcaggctgctgtgaacatgggtgttcagatatctctgtgagaccctgcttccagttcctttgggcatatacccagggcatataccccggatcattaggtggttctgtgtttaatgttttgaggagccgccacagcgtttccgcagtggctgtggcatcgtgcgttcccaccagcagtgcacaaggctctggttctcaggggccgtgtgaggccacctctgccatgctgcaggctccccagcacgcagtggggaacccaaccttggagagccgagccggggaagaaaaagcgtctccacagccttggcaacacttgtgattttgttttcgatggtagccgttctaacgggattgaggagccattcgttacttcacaggtggacagcagcagctttgtcggggacaacattgtggtttctcgttgtctagtcttttgtctgtgtcatgtcccgccacccaccttttggatgttccccggagtcacttagctctttgacctggtttaacatctggttttcttgtggattttaatgttgtttaccaaatcccagggcctgccccgagggcctggtgaccctgggcaggccatttcccgtcctgtgcaactctgatctgcaggatggggtggtgtgggagcacccatgtccctgcctgaggactctccaggcctccgtgggggcggtagcagggcctggcccatgcggcgcgctggtgctgctcacccgcctttctggctttaagaagtatgcttggagctcatctaacatcttattttccattttctgtttcttaatacttacagaggcttccgactttttctccaggtctgtattttccttgttcttctctggtaatttggaaggtagacagtcagtttttagttcaacctgtgttttattttatgacttaaaaaaatgaggatttcttggcttgtcaacttcagaaatgaagagtgccggttgacaatgtgtagagttttactgaatggcagtcgggggcaggaccaaggctggggaggaggatggagggtactgtgtgcagtcaggggtctcccaccaggttcctaaggttggaggtgaggctggaggctgccacagttatccaagtgaggactcggaagggcctgggcatttccagtaagagtgagcaacacggatgcaagagagggacaaagaactgtgcacagcaaccccatccagcacaaagcaggcacttcgtgggggtagaggctctgagcccgagagaggggacagtgggctggaatgcagtgctttgctgtctttgaggaccaaaatcagatgacaggtggaggagaatctacttggtggaggctttggcggggtaagcggctgtgtgggtgggagaggaacaacccggccctggcccacggccccgaggacctttcctcttctcgcaaccgcccctgcactggctgctcagaggtgtcagtggatggcgggagtttctcagcctggacttgagaagttggaatgagagggtcttgccagagaaaggagagcaccttggggcttcagccagctgacccctagagagacaggactttagacagagcaggggcagggagaggaggagctcagacagctgagtgctttcactctagaggatgtcaagtttgacctggagggaagcaatggggagatatcccagccacacaggaaacgccaggccatggttgacacctcacgcaggcactcgcatgcctgaaacggaccaggccatgcagggagcagatgctcaccggggacagaggcctcgcaacccaccagggacagatcgtggcaactgaaggggccctgttcaggagagctagatgtcagggaggcagcagcaggcgttcctatgggctggggagctctgggttcctccaccgccccccgaccccaactcccttgggccctgggcacttctaccctctgggacagtcgtccccaactctcttggtcctgcccccgccagtaaaataatctggacacgctcctccaggatttgcttataaattagacccctgtgccactgcgctatgtgttctaaaatgtatgcaaaaataggcttctttaagcccaggaagtcaaggctgcagcgagccaagagagcgccagtgcactccaacctaggcagcagagtgagaccctgtctccaaaaaaggaagaaagaaaaccactagatacggtgatggttgtacaccttagtgaatttactaacaatcattgaattgtctatgtaaaatgggtgaatttgtggtatataaattatacttcaataaaggcgtgttttagaagagaaaaaatataggcttctttgaaaggagggatgctgagaatagtttactacagtcacgaccatctttccaccctcctgcgatggtatcgtccatgccttaaggatgttaggggttcttagcgggggcttcaggattgagtatggatcgagcctgcgcttagatggacgatgccagcccctcagccaaggagggcctggcacgggaaggagaggcggctcggcagcctattctcggcctgccctggtgctgccgggggcacctcgtgctctatccagtccatgcccctttgccaaagtcgtccactcagtgacggtgatgatggccacacatccactctcccagggcccctgtgctcttgggcattagtgtggggtggccaggtgactgcccaggtcgtgggactcacgcgtgcccagtgagagcccccgaagcctctcctgggaagcctgagggaggcagacaccctgaggaagcccatctgcagccggggctcctggccaagggtctcagagcctccacagacatgggtcacccacagcctttggggcaggtgttggggtctccacaagaggtctctgacctcaccatgcctcctacgtgttctgagatgagcgtgccagggattgcatccaggctgtaccactcctgggctgtgtgactctaggcaggctacttaacctgtctgagcccctctgtccctgccatgatggttatttgcaaggattaaataggctaatggtggccaggcactgtggctcacgcctgtaatcccagcactgtgggacgctgaggtgggacgatgcccaggagttcaagaccagcctggacaacgtggggaaaccccatctctacaaaaaatagaaaaattagctgggtgtggtggcatgtgcctctggtcccagctacttgggaggctgaggtggaaggattgcctaagcctaaggaggtcaagactctgcagtaagccatgattgtgctgctgcactccagcctgggcaacagaccaagaccccgtctcaaaatcaaataaaataaacaggctaatgggtgtaaggggcttaagcctggacttggcctgtgagctgcagctactagcatcctggactggctggtgggaggggagcagggaggcttcaggaatttgcatgaacttgacctagaacctgacctgcactctctgtttagccaccactccagctgggaggaggacagtgatggggtctgagattctctctctacaaacctaaaatacacagctacagaactggcctttcctgccccatgtggcacagaccaaacatgggcatcaagtgcatttgctgagtttgagacccattagctctgtgcctcttgtctccttagaaagcccaaacacctgatgagcagtgtccaggggtcccctgtggggggcccggctgccccgtccttctgtccccaccctgtcactttgcttgaggggccctccacctttggggtgcctgctatgcatgctcatttcaggggcgctgtcctgctgtggagaaggaagccgttgctctgaaccccctcaagcaacactgagttcctaacttacgcacagctcgagggaagtttcctgtcttaacacgccgagggctgagtgaggagcgcagccgtctacccagcaacctctgcacgtggcttttgaaagacatgagttatgaatgattacatttgcagtcacacagaggaatggaacccatttggccctgaatggcttgttttaaaactttggcaattttatcctattttaaaactttgatgttacctctctctgcaaggaaagaaaccacatcaggctcgtttaagaaaaacccaagcattcttcgcctgtacctaaaaaatgaaactggtttccagatttgcctgaacagctgcccctggcctcatcccagctgtgggactctgggctcccatagggcgggaaagaaagggcagcactggtcagggagggctctgtccctaaggagcaagggacaatgggctgggtatggcagtcccgccccttgggaggcagaatggctctaagagaggtgggggatgcagcatccaggagggaccagcccagagccaggccagggtcaaggccaccggaccagccctgcagccagacccggacaggggattgcatgggtggtggaagctagaactggctgggctgcaggagaggaaggcccagtaggctgggggcaggccgctgctctggacagcccaggggacagcaggagattgacctgaatttgacagggagggccaccctgtggcctggggtgaaaggaccgctgtcattgtttctggcccctgcacctgcattcgcttcacttgttggagaccccaccagaaggagcagctcggcctccgcacggggactggctctgcagggcggttgtgcagaccccgcttcccagaccctcctggggacttgggagccaccagggtccctttaccagatcctccactgctcacaccagccccagttggtttctgttgcgtgcagccaaggatcccgactgaggcacagacatgcctgttcatcttcatttgtcctagaagcggctcttccaaagcaggaggggagtctgcagtggttcatgaccctgacacccaatctttccactccaggcaggatagcctgaggcacgcttgcttcactcccaggcagaatggccactgagaaatccgggtatggccatcttatttgctggctcatttgacaaatatgaatgtgcaaagctgctgggtgccagcgtgagtcagaaaggagtaggagatgagagggcagccaagagggttctgagaaaagaaagagaccctccaccagccctgagtgaggctctgaggaaatgggctgggggacagggtaagggggcaggcttcccataggtaggatcagccgggggcctcttggaggacagggcagcggaggagggcaggtgggactgggacccaggattcaccagagaaaggcagtggggggcgggatgccaggagcagtgagggataaacagagggacgattctccaattgcagctggacaggcagcctggaattccttccctgagttgacaagtcagtgtctgagccctcctgagcccctgggagctcctggggcatcactgtccacagtaggtgggctttcctagggggcatcttgatggggcaggtgtcagaaatagccccttccccaaggctgccctgactgggggtgaaagaagcccccagggtggggggtgcatccacagcgggcccagccagccccaaggtgcactcacagtgctggtatggacatggtggggacacacctgtgctgtcgggaagcagcatggactcaggtgggtacagagcctcctgaggtgtccccggggtgcccggaggaggctgttctgccctcagccttcccagaggcagatgcagctccctctgtggccacaaactccaatgctgggcactcatgccaggggtcgagggtgggtgacccactggagtgaggtggggggactctgtctcgcttgctagcaggtcctgtcctgagctcctccgtggggctttttccaactcccagccttccatgcaggcccgactgcacccacatcactccctggcttcttgggctaaacatccctgattcaacacacctggctctttgggacccactcatggcctcagccccgtgcagggctcagcctctctggtcagcactcagctctctctagcagctgtgggctgggccagtgcccaggtgtgcagtgtgtgggatccgttcaccctgacacaccagccattgggcctggagtggtgctctgcaacagcacccccaccccacccctgcatggccacctgctcgccctcccccaggtgcacctccagggacatcaggccattccctgtacttcctgcctcccatctggtgcccagccccacagccccagaagcggccaagtgctctctggtccataccacttccggccatgggacctggggccgagttctgaaccctgaagcctcagttcccccatccgtaaattgctgatcgcagtcagatccactttgaggcggctgtgtgtgaagagctccagggtgcccggcgcatcggggcagctccagttcctctgcgttttactcagcagtccgaggggcccctcgagctcacacccaccccaggccacgtgccggagactggtactccagaacccctcgcccaatctgcctgcccaagggcagccacctctccttgggtgggctccctgggcccgaggctgcaaggggcaacttgatgtcctcactcatgaggcccagggggccaggcggtgggctgcaggggctgggtgcccccagcgtctcccagggcagctctggcctcccagtgccaagctccttccaggaatttgaaagggccaggccggtaggggtggggctgggggtcccccctgggcagaggatgtggcctggggggaaaaggagggggacctggggacagtgggagggccaggagccaagccctaaacagggaatgcaaagcttctgcccccagctgccctacgaggtggccaagaaagagaggctcagcctgaggaggaagaagaagcctggtgggtgggggaccaagggccatgctctccccgccacccccgcccccacccagccagcagtgagctacgggggaaattagtcaatcctgattctgtgcggggcatcgctgggcaggtcactgttgctctggtgtatggctcgaggcaggaggagggagcacagttcatgcttccgtttgtcagctcggttcatagcccgcagatagtcagacaggagatgtgcctgcagctcctgggctggggggcacagcccagcccagcccatccccaggtacccgtggaacaggggcagccagagactgtctccgggcccctctcatgctgcccatgcctggggcagcccgatggcataattgtgggatggaatgtgccctggcccaagctggcacgggcactgagggccaagccacccttagcaggcagggagggcctttgccaggtcacagaacaattgatgaagagcgtccacttggagccacagtcgccctctccaggggttgcttagaggccccgttctcgtggagtccgggctgcaggggcgcgcgggctggcggtgatacccctaggcctctgctgccgcccgccatctcttcatggccgtgtctatttcagcccatcacctcttcatgaccactgcctgccaggaggctaactacggtgccctcctccgggagctctgcctcacccagttccaggtagacatggaggccgtcggggagacgctgtggtgtgactggggcaggaccatcaggtgagtcccatggcccctggtgggcaggacacggttggggagggagagggggcaagcggaggaggagtggaccacgtgggagctgtggaagatcctttctagaccccggaagggttcttcccccagttgggggggccgggatgaagacagaggagggagccagtagcaggtggacgtgaagagtgacggtgggaggaggccacgtcctcaataatctggtctggggatggagggttcagactgggccatgtccagccagagatgcccgcggcctctccaagggcaggcgcctggggaatgactgagagtagggtctcatgcccagggtggccgggtctctgactggagcctggcttcagggacgtccctgctgattccctctgtccctgtggtcaggccaaagctgtccttcctggccccaccctgtccagggctcagagcttctggtaatggagcaggctgtcaccacccacagcccccagcaggacggcttcagccgaacccttccccacctggcccgatcctcctgcccaagggcccttcttcccgcttgaggggctccctcattgcctccctcagcctcctgggtgctgggcccccatcagcaggccggggggttctccccagcaggcccaggctcctctgcctccagagcggcgatcagaactcggcatgtccgcaatcgactttcaagtccttgtttctgcctccgtgggaggcgctggggtgtcctggggctgcagtgggtgagtagcggggtcagcagtgcatgcgtggagctgaaggccaccgcctccctgccatgcaaacttcgcacagagatctgtctgtgggttcacagcgcagcgcaagtcctggtgccccaccgatgacaagcgctttccccagtgcctgagagaaagggagccctggggactggtggggagggccaggggcagggaggagggcctcgggagggtcttcacggaggaaaggttgcaccaaggtcacacacgaagagtacctgtggctgtggtgtcccctgagggtccagacacacccgggcacaattctgtggggttgaagacccctagttggactcgtcacccctcccctgtgggttgcaggctggcgtgagcacagggagaaagcccacggctgggaggccctgaggctgggtggctcccactgcccctctgagcctgggtttgggcctccctctaccctcagagccccgctggccacagcctgccctcttcagtcctactgagattggcagatgagtggcctctgttttctcctcccaccggccatgtgctctctgcccacttcgtccaccccagggaactccctcaggcccagagtccgtgctcagtgcactgttgttgaggcgactctgtaccttgggagcccaaactttttaaaaagtaggaaagcatggggtatatgcaggtgtgcatgctgggatttaaaacaacagaaactccgtaccctctgctccagttcaggtgggagagttggtgctcccgaaggtgggagggccaaagtcacggctccagcctcaaaggcccctgataagacacagtgaaccagggagcccaccccaaccctctggggtctccaggggccctgtgccctcagcagggtctcctcactctactgtactgaaggtctctccaagatttcagggcctccttttctaagctgaaaaatgagttgagtgggaagaggttgttaaaaatcagaacagcctgttctttaggctaattggccttctgccacagctgagtcatttgtatttaaattaagattgcattttattatgatccagggaagacacaatggggggcccctggagaaaagcactctcccccgcctgctttgtggaagtgatggttaatttgtgtagattgattgtgaacgggaggcctggcagaagacagcagggtaatgcacacagtgttctacaagcagccatggtggagtgtccttagaaatggaagccaccacagatggcttcctgcagtgccagagcacaaagaggaataactagcgctgaggccagagagagttcgccatcctcggagccgagtggccatagctggaactagaaggagggggagttgctgggaattttcgtttttttattattattattattatgatactttaagttctagggcacatgtgcacaacgtgcaggtttgttacgtatgtatacatgtgccatattggtgtgctgcacccattaactcgtcatttaatgggttcagcacaccaatatggcacatgtatacatacgtaacaaacctgcacgttgtgcacatgtgccctagaacttaaagtattaaaaaaaaaaaaaatctgaccgggcactgtggctcacacctgtgatcccaacgctttgggaggtcaaggcgggtggatcaactgaggtcaggagttccagaccagcctagccaacatggtgaaaccccatctctactaaaaatataaaaattagccgggcgtggtagcacacgcctgtaatcccagctactcgggaggctgaggcaggagaattgcttgaacccaggaggcggaggttgccgtgagccgagatggcgccactgcactccagcctgagggacagagtgagactttgtctcaaaaaaaaaaaaaaaaaaaaaatcaagataatttaggaaccaagaaggaaaagtccacatcacaacagcatctcagcacgtcagcccaggcctgccagcccctggggtctgcgtttggcagaatgatgccccccagagatgtccatgcgtaattcctggaactgtcgatgtgtcacacggcaaaggggataaagtcacagacagaattggtgacactaatcaggtggctttgagatgggagatgcgggatcatcccggggcccggtgctatcacaaggtcccttaggttggtcccagctttggctactggagagccttcacactggcttctgtgtcctttcgacattgcccctggctgtttttgagcactttctttctttctggtaccacgagatgttccaggcttatcttatacattttgtgccccagccctgaagtcagccatttctccaaggaacactggttccttttgttagagaatggtatctagaaaccaagatatatgtgcgtatgtgtgggtgtacacacatcccagggatttagatggaacccacggaaccatacaggtgctagaagaaaacatgggtgaatccctatttaagccatggtatcgagaaaggctgggtaaaacaatattgtttcaaaaaattggcttgcccaatcccagggcccagcaggccagcaggctggaaactcttgggagccgacgcagcattcttgaggcagaatttccgaacgtgctggtaaggccttaccattggctgggtgaggccccacccccagcatcaaggattatcccctttacttaaagacaactgatgatagatgttaaccacatctcccaaatacccccacagtgacccctagactagtgtttgactgagtaactgggcactgtagcctggccaagttggctcataaagctataatcatcacactggttccaggggcagaggtctctgcgcaaaggtgtgttcagacaactggcattgtccctcctcctcctgcccctgcccatttctctcattcctttcaccctgttcccacccaattcctgtgggcaacttacctcatcagtttctggtctttctttcctgtatatcttttgcataaatgagcagatgcctgcattttcttacatccccttctttcttatataaagggttgtatactagtgacactcctttgtactttggtttttcttcacttaacaacataacctggaactctctccttgtcagtgcagagggagcctcctccttcatttttacagctgtatagtactccgccgtgcagagtctttcagccattttcctttcagccagggcagaagccaagcgagcagaggcacttaggttgtggccagtattttcccatttcagcatcgacgtggatggcctcacgcatccgtgttttcccagcactggagctgactcttcagaatagatacccagaagtggggtcgcaggaccaaaggtgagagcaggaggaatgtgttaggttttgcaacgtccctccagaaggctgatgccagtttgcattcccaccagcagcgtatggggtgcccgtttccccagacccaccaacagactgtgttgtcgtccattagagttgttactgtctgataagtgagaagtgatgtctcagcagcatgtgagtttgcatttctgtacttaggagtgaatccgaacatctttcgtatgtttacaggccgttcttttatctttttggcaaattgtgtcttttcctattttctatcaggtcgtttttaaagagttctttgtatgttagatgggttaggcctttgtctctcgtgtacattagagattttctcctagtttgttggttgtctttcaactttgttttttttttcttttggtgtttttgttgccacacaatttttttaatgtggtcaaaaccatccatctttgatcgcctctggattggagtcctagtggaaagcccctccccacatgaagggaaaagagggatttgccacgttttcctctagcctgtgtggtcccactggttccatcgaaatccttggcccatcggagtttattccagtttattcttgtgtatggtgtgaactatgaatcaaatgttatctttttctggatgcgctacccacttgtcccatttatgcaaacgtccatctctgctccccgtgacctgagatgccacctttgtcatgcactaagcttccctgtgcacttggcccgtgccttcttaaatcgtccctttcccaaaccttcctcatctcacctgaatctcatattgatctattctccagaactatcaatgggtcctcaccgcctgctgaatgtttacctaattatcccttaacttagtccaagaaacgcgtttactgtagctggcgtttattaccgcgtgctgggctttgtgtcgagcacgtaacgtacattggctttttgaggtcagcagcagcctggcggaggtggggctgttgtgattgctgcttcacctgcccaggctcgcacagctggtacccatggctccctcctggttcccggcggaggtggagggatgccctgcctccatataactgtggcctcctgagatggggatgcaagccttcaggtgctgcctccgtcctggcgatgtccctaccaacctggtgaggtccatcgcattgagacaccaagcctggcagtgggccaagggcagccttccaagggtctccagtagcagcgagggcctggggttctagggtgggcaagtttgtccaagtaactagtggaggagaagagggccctggagagaacacgaaggcacaaatagggtgagaggcgctaggctgcctgcaggcaggccatcaccaggtgtgggcaggtggcactgtgtctgttggatgagcgggaccccaaagtgaggctgaccggcaggcagccagacagccaggtggctggcctcagggaatgctcccagcccaagcagggtcccagctggtctcaaggactgtgagccaggcaggtgacctgatgggggacacaggctctgggaaaggcccgtctctgagccaagtgcagttgaggcttggcagctggggcagaagccaagcaagcagaaccaggcaattattggggtctggtatccaaaaccaggctggcatggaggccaggggattctgaaggcaggagcctctgggccagagctgccacatgcctgctgccgcccaaggtcatagctgtcccagggccctgggctgggcctgcaggtatcttggtatatggcagagggaagcttccagactcttctgaaatcagaggtctcatttaacaacagctgcgtgtcaaaggggactcaccttcctatgagcgacgtagacaaaggcggccggccagccttttatgggatacacacacaggagtaagtgggggctgagacatgctcgtgccagctcctagtgccggcccagaagtcttgcttcctctatcaaagcagatgggaaggaggccccccgtgatccctgctttactcaggacgttgaatagaagtaaaaagtgaatggaagactcctcatggcctggtgcagtggctttcgcctgtaatcccaacactttgggaggccaaggcagaagaattacttaagcccaggagtgtgagaacagcctggacaacaaagtgagactccatctctacaaaaattttaaaaattagctgtacatggtgttggacacctgtagacccaggtgcttgggaggctgaggcgggaggatcactcaagcctgagaggtcaaggctgcagtgagccatgatggtaccacttgcactccagcctgggtgatagaaccagaccctacctcaaaaaaaaaaaaaagaaaagaaaagaaaaaaaaaaaagaggctcctcctctgcacaggggtcattcctgggtccctgccctggcctgtaggtccacttttttttttttttttttttttttgcgcattcagggtttgtagccactgcgcttgccctgggaccttggctgcccggcatggatctgcacgcaggtgcttgctgggttccgacagcccttgccctgaccgtgaccccactcctccgctcatcctgttgctttgttacctggttggtggattttgtcaggttgtctgttgtgagcaaggcttgggggtgattcctgagccctttctaacacgtgttgggtgtcttccactcagctacatggaacaggtccctgaaaagtggctgaatgagctcagcggggccaggctcccctgcaagctggctgggccgtcatttaccaggggttatcatctcattaagctgcagccttggtttgctgatggaggcataatgtgatttaatgtattaactggagctacaatctaatttgaggaggtatagaaaacctggcaaatgtgtcatcgggaactctcatttccagagaccttcctatgggtgtaggggagggagagagaaggcagaacagagaagagaagaatctggaacgtgctggactcggctataaaacatgggtttttaaaagcctcacgtcagatttcctcacctaaataagaaatgctcggttgatttaagagggaaggggacacgcctattccaccccaccctgtatggcttcagggtctgagtgccatcttgggcaggggaaaggtgtcctcggggaagatgccagaggatggggccacagccttcccagcatctgaggtcactgggccccagagaaccagacttcacttccataccagctgggatgcctccgtccctctgccctaaagcttccaggtttgtaaatactgaccatggtagcctcaggtcacctcagctttggttacccgaggctgtcactgcggaccctgccctgccctgccgaccccatgctgggcaatcatgggccctcccccagcccaaggagctgctcagaggacggggctccaggccccagggagtggggctgcagcccagcgtggtagttgggggacgcaagacaaatgtctgcagtgcctgctgtggtacggcggctcagcatggccagcgccaggcatgacgctctgggtccacacgacgttgggcagggtgcaccaacactttggggtccttcccagcctgctgcatttccctcctgctgccttctttgtgtctcctgctaaaagagtcaagtcaggaaattcttcagaactcagcagcaacatgggaacagctgcttgtattttgaatttcagcaggaactgagagggaggcttcttctgaaatcacgagggctgtctgggccaagggcagggtgtcctcctggatttctgctgagctcgacccccacgaggtctcgggatgggctgttcacagagccctgcccgccgcctgcccctgcccggaggcctggccctggagcccacccacctccctgaggcctgtcgtgagcatcaggagctcccagtacagcatctggggctgcctcggtgccctcgtgggtttgttcatggcggtgtccgccctggaacttgccacatgcccacgagcactgggacccctctgtgctctccctggtggctgtggtgctgtcatctctgtgtgtgctggtggaatagcgtgggctccacggaaaggccctcaggcgtggacaggacagatggcagtgcccagcacagccaggtctcagaggatccaaaggcgagcattgcccaggccgaggccgccctccctgcctactgacctccctgcccaccgccacaccatcgctcctgccgtgcccctctctgtgtgtctgcaccaggcgtgaagccagttcttgtgaggaaagccctggctagatgtctgttcccccaccctctgccccccctgggtgggagaatctttccaggcatctccagagcacaccccaggggcacggaaacccggctgctgacccctgacctcctggggccttcagcactaatggccagccccgcgggaggcagaggagcaggaagagcccctgggagccgggtcctcgaagactccaggctatggcttacagaggagaagggggcagaggaggagagaaggaggtggctgtgccaggaaagacatgcagctcgcgcagtgacaccggtctggctcccctgaggacgccactcctgtggcctgcgcaggcatcagccggggtgccgggtccccatggggacgagctgtagacacagctgtccagggctgggcagagtggggcagtggctggggatatgccggccctgcccaggccgccccacgggggtgtcgttccaccttcctgtagtctccttggcgcgcgtgaccgtggttgtgcagggagcgccttctgctggttttcagcactggagaaataaaccagggctcagagtccttggcagccgcccctggaatgtgttcaggtcaggggttacctcacttaacgtgcgcgccatggtgggttctgatgaggatccccagaggatctgatgacacctgcctgctgggctggggggctctggaatggggaggaggagccccatttcccttctcagaaagctccaggagaaatgcatctgtgaggacccacagagaggagccctcgtgttgggggagcttggaggctggggctggagcgggcgactgctggcctcacccctccacacccagggaccaccttgtcatcctcagcacatctttttcggaagtcttctggccctgggggaaggcacagatggagagaccttccccagaccctgtggtgacttagcgcggagcgtggcactgagcccaccatggcgtctttcccatcaggtgattaactgcctggtttcacatcctcctgagtatggggatgaaatcaggcctgtgcgtcaacgcgaaaggtcagacatgcggtgacgctaaccagatcccggcagtgagtgaaagggtgggcaggtggaacacgtctggtggcgggggctcgtcgtagctcagcatccacccccgcctcccctgtggacactcgactacagcagccacgcccccagaaagccctagaaccatccaggctgtgcagacgggacttggctgtcctgggacacaggccagtttgtgcacacagggcttcactgagccccgaaggcggcctcctgggctgcccatggggaaggggtgggggtggggtgggggagagaggatgaagatgtgcccttgtgtgtgacacctctggctgtgggtcctgtgtggggagggcagtgggtagaggacagagcagatgtcccctcctaatgctgaccttcactccagcccccaggctgggccatggcatctcccaggatctatccattcatcactcagatggtagacatctcccaggcacaggcagggccagcagcattctcagtcccctgtgggagggcctccagggagcagtggcacctcacagccttccctgtgcatagttcgaggacaccgagtatcttgcgggacctaagcacagggtgccctttgggatgcgtcttgggacaggccttgggtctgagtccactcttgtttcagcttcttgtctcaatcaaaaaatggagaatgcactttctgaaaaagagactgagtttaccctcactgcccaggcagtggaggccgcctcactctagggcaggccacactggcacgctgtggttccctactcctgctcgagttaaagccatttcctggtttttgctattataaatgatggagctgggcacagtggctcacacctgcaatcccagcactttgggagaccaaggcatgtggatcacttgagcccaggagttcgagaccagcctgggcaacatggcgaaaccaggtatctacaaaaaatgtaaacattagctgagtgtaatgggcgcacctgtagtcctagggaggctgaagtgggaggatcgcctcggcccaggaggttgaggttgtgccactccattccagcccaggtgacagagtgagaccttgtctgaaataaatgacaacactataagaacttgtgtacatatatcctttgttcttttaaaaaagattttgttgttagacattcctgggagaaataattcatacaagtaggcttactgtagcatgtaccatgaacattctgtggttctcgggggtttttttttgagacagaatcctgctgtgtcgcccaggctggagtgcagtggcacaatctcggctcactgcaacttctggcttctgggttcaagcgattctcctgcctcagcctcccgagtagctgggattacaggtgcctgccaccatgcctagctaattttttgtatttttagtagagacagggtttcactatgttggccaggctggtctcaaactcctgatctcaggtgatccacctccgcctctcaaagtgctggaattacaggcgtgagccaccacgcccggcccattctgtggttcttgatagatttttgccagttgttcctctaaagaattttactaatttataattctatcagcaacatatgaaaatgcctagttcctcataggctcgtgagtattgagtttgtagggattttatttttgcaggtcaaaggagatttcctctgtagttttagtttgcatgtctttggcaattaggaaagttgaactggtctctgacagttatttggaatttgttttttctcaagtgcaagttacgtcaccatgacctttcctatttgtcctgtgagtcattgcccttttttcctttttttaagactttattttttagagcagttttaggttcacagcaaaattgagaggaaggtacagagatttcccatatgcccattggaggtatttttaatcttcttttacaaattcttttttttgtttgtttgttttgagacggagtctccctctcttgcccaggctggagtgcagcggcacaatcttggctcactgcaacccctgcctcccgggttcaagtgattctcctacctcagcctcctgagtagctggaactacaggcacccgccaccacgcccagctaattttttgtatttttaatagagacggggtttcaccatgttggccaggctggtctcgaactcctgacctcaagtgatccatccgcctcggcctcccaagattacaggcatgagccactttgcccggccatagattcttgaagaatatatatattaactatttgccattgtgctctaaatattttcttgtttcgtttgtgtgtcttttgatgttcattttccacactgtcgttcattagctaatctgtgaacacatggatgctcccattcacccctcatcagtcagtgaccgtgtgacctccgcacagctgtaactgtccacagactctgtcgtctcaattgtgagagtcatatgcccacaagattatgttctgtgtctttgtagttgttctgtgttttgaaatgatatgtatcttcttaacacagtggatggacagaaatgtatttccttcccacctcaattatcctaacagaatttgttaaataatgtcgccaacctccattgttttgtgttgcttaatttaacacataatagcttcctatgtgcattagagtctatttgaaataatttttacttatattctggggtcgtaccacgccatttaaattaccacaactttacaatatttcctacaatttagaaggcctctcctaccatgtttcattttcattatattttacattatgttttgcatgctttgatatattttctgcctatttttccaaaagaacttaagaatcatgttgctaaattccataaaaagtcattgcagccccgacctcctgggctcaagcaatcctcccacctcagcctcccaaatagctggaactacaggcatgtgccaccacacccagctaatttttatttttttgtagagatgaggtctccctatgttacccaggcaggtcttgaattctgggctaacgcaatcctcctgcctgagcctcccaaagtgctgggattacagtttgatgggttgttacctgatactgctttttagcgaatagtaggaaaactaccatggaccttggggaccaagcatgcagtgccaagtggggcccgcctgcagaaaccccgccggctgcgtccctccttcagcgctgtgagcctctgcggcctccccagtaaaatgggtatagaaagtgatgaataaggaagctccggattttcctctttgtgtttccttaatcaggttttagggttaggaccacgtttgcctaatgggatagacatgctagcccaccattagaatcaagggtgggaaataatttttttttttttttgagacagagtctcactgtgtcacccaggctggagtccagtggtgtgatcttggctcactgcaacctccacctcctgggttcaagtgatcctcctgcctcagcctcctgagtagctgggactacaggcactcaccaccacgcctggctaatttttgtatttttggtagaaatggggtttcactgtgtttcccaggctggtctcaaactcctgggctcaagtgatccacccgcctcggcctcccaaagtgctgggattacaggcatgagccactgcaccgagccagaaataatttgtgatgtgagaattacttatttcttagaagtttgaatgaattcatcactaacaccatcaaacctcagtaatttgggggatttccttctccagttacttcctccactattgatttattttgactttctagctcttgttttaacggttatcttcatctgtgtttatttggtctatgtccttcagatttctcagttaactgaaacatgctgcatagtattcctttacgtgtttaatatcccttagactcaagcttatgcctccacttttgtttttgctgtgtttcttctttcccctttttttctttgtttagatgctatttcattcatcaaaaggaactgagaggccactgtttaatgaaccgcacatgcccagttttgtagtctttagaaaataggccacactttgcatcaccgtgtcttttctcagtttttttgctttaacttttaccactcacttccccccttttccctttcttaaaattgtttctttcctaagatatgatttcaatccttagttcatcatttttctcacttttcttgaaaataataaagacatttaaggctgtgatgtgtttctctaaggactttcctcattcatcactttctataggttttgatatgtcagtttttttcattgtattctctttttttttttttgagacggagtctcactctgtcacccagagtgagggtgcagtggcatggtctcggctcactgcaagctccgcctcccgggttcacgccattcttctgcctcagactcctgagtagctgggactacaggcgcccgccaccacgcccggctgattttttgtatttttagtagagacagggtttcaccgtgttagccaggatggtctcgatctcctgacctcgtgatccgcctgcctcggcctcccaaagtgctgggattacaggcgtgagccaccgcgcccagcccattgtattttcttaacagacagatattgtcttcttgactttcttctcaagacaattttttccttaggtaagtatattttaaaatatactatttctatttctgtttgttcttaatctctttttttgccgtagggaggaaatgtagcctgaatcatttctgcttttgtatttttatggagatttgatttgagactagtatatgatgactttttgtgaacatacaatgaatacttgaaaaagaagaaattatctgtttgttctatttaatccccaccaaaacaaccattaatgttaccttgttttgatcttcagctcctttatgtgttgctgaatttcttatgtagttgataatgaagtattttaattttataatcatatttttatcatttctacttcttttttctcagagatatttgcatatatgttttgctctgtctttatggcatttagattccatgtaattatgctgccaccacccatgcctctcatcctgatacctctccttatcacatgtaatcatttttgctctaaattattttttgctatatattaacattggaatcccagcctttcaactacttgaagtttactggtaactctttttagtcttcctattttgttttaatgacctctcttgcccacagcttattgctggatttcattttttcttctggagagtggcaagccttttaacacaggaaattaagttgtattttttcaatcttcaggcactccaatttttgtcttaattgtttatctttccatgctgattacttttcttttccctcaattgttgaaacaccatgtgttttttctttctttctttctttcttttttttttttttttgagacaagctggagtgcagtggtgtgatcatggctcactgcagcctcaacctcctgggcccaagagatcctcccacctcagcctcccaagtagctggaactacaggcatgcaccacatcatctgcctaattgtttctattttttgtagagatggggtctcactgtgttgcccaggctggtcttgaactcctgggctcaagcaatcctcccatgttggcctctcaaagtgttgggattgcaggtgtgagccaccgtgcccagcctgtgttttctcttctattattactgaaatattggcaagctgtttttcattcaaccagccatgaaatgtgaagcaaacagatgttcttatcttgtatttattatcttacattgtccaaccacacactttggcctcccctgtgtgagatgacaggaatctgggttttgggcttcctctctctctctctctctctctctctcttctccatccttctctccctcccccacttcttccttctcctcaatgattgcaattaatgttctaaaacctactttttcctttctgtcttctatgtaatttggtttttaatttttacgctgtttttctgacagttgcactatttgcatacttttatcagtaataacccttgctctgatagggctcttgtttacttatctttgcaaataggttgttaattcaagcgtgtcttatttctagcatcattcccttttacatgttaccttttaaattcaggagattatttcaagtaggtcctagaaataagccatgtgattaatacattctcagaattcaacaatttctaaggagctctctgccgtctttgcaacgtgagtgacagcttggcaagataataaatctccaaggagcaaccttgttctgtgaagttcctgtagctgttgttccattgtctctgggtgtttgggatgtcatcagagaaggcagaagggattgtgatttatgtatatttttaaaatctgacctcctccttcctggcgtggttgcttgcagtattctttttggtttaaacattttgtgagaacttgttttgctgatggcctcgttaagcctgcagaagctttggtgtgcagtgcagtttcctcctcggactcctttctccaggaccggacactgacattccccgatagctgaggtttccggacatggttcctccggcaccctcctctgtcccctctgtgctccagtggaattatttttgccttctttcacttctttgtcatatcttgcactgtttccacctgtacatgttacatcctttttccagatacatttttccagataatctgtttttacttcctgtaatacaaattctgctttttactctttctaaagtagtttcggccgggtatggtggctcacacctgtaatcccagcactttgggaggccaaggcaggtggatcacttgaggtcaggagttcgagaccagtgtgagcaacatggcgaaaccctgtctctactaaaaatacaaaaatcagttgggcgtggtggcacgcacctgcagtcccagctactcggaggctgaggaaagagaattgctctcgaacccaggaggtggaggttgcagtgagccaagattgtgccactgcactccagcctgggcaacaagcacaaaactttgtctcaaaaaaataagtaaaaataaaaatactttctttttttttttttttttttgagacagtctcactctgtcacccaggctggagtgcagtggcgtgatctcagctcactgcaacctccgcctcccaagttcacgtgattcttgtgcctcagcctccctagaagctgggactacaggtgcatgccatgatgcccagctaattttgtgtatttttagtagagacaggatttcgccatgttgcccaggctggtcttgaactcctgacctcaagtgatcagcccaccttggccctccaaagtcttgggattacaggcgtgagccacttcacccggcctaaagtagtttttaattaggatattgtaattgaaactaattatactgcagtgaattaaagtttcctttatccccaagcctaatggacacattaactcacctctttacagggaggccagatttctgccattgtgggaaggaggcaggaggagccgggggcagtgctggggtgggagctaggccagggcgaggctggctgtggaagggccctttgggcagccgcaggccatacgtcctcagacctggggcagccaggaccaccagggaatgttgctgacaggcagcaccagcgcctgaatcccccgccccagatggacctggctagggggtgagacccccctgccacccctccatcccagaagccaggcggggctgaggctctatgggtccccaccacacttatttattggcaccttcatcctcctggtgcactgtggcagttccaaggcccaggctgtccaggtggcttttgaagtgtggagaggcccctggacggctggaaccttctcccttgctcgggtgaatgtggctccccgtggtgcacaaacacgttcaaagacggaacagagggacacgtgttcataggaggtgagacaaagcgttgccagccctggggaacaggagtggcctgttcctactcctatctggttgtggttctccttcgacaagttaggtgaaggcaccttggtagcagggtacccttcagaatccagatacctgattcagctcagcagccatttgctgagcacttagcaggcacctagccaatggtgccagccaccaagggcccagcagggcaggacctccccctccctcctggagccacggccccccagcaccatggcctctggagcccctcaccctcccttgaggtcagccctatggtggcgattgtagagcgagtcaggagcgagacaggaggccacgtgttgcctgcctgtgtggggctcccatccaaaggcagggcagcgcgagtcacatgcccaccccctgctgtgcaaaggggtcctgtgggggggtcatgggctcccatcagagaatggcatggtggtggccctctgagggagttctcaccacgctgctgctgtgagccagggatcactgaacccattttaaaggtgaaaacaccgaggctccgtaactgccaactcctcaaagcccccacagtgaacaccccacgttgggatgtttcctggcctggcctttccccacactcagtgttgccctgagctccaaacgaggtgagattggggcaggagggcaggggtggcaaggctgctaccccgatggaggcggccagttggtgggatgcccgaacagggaccagcatggtgcagggcgccccgtgggtgggcaggatgggtcgctgaaggctcgtgaagcccggcaggggtccctgaagagtctagtggcatcgggggagagtttcttgtgcagagagggcgagtatgctttgggccggctggcctggggctgagaccaggggtggataggaaggcagagcccgtccagcctccaggccagcgttgcttcacaaggacaatgcccccagggtgttagcatccaaatatagcttgccggctgtcatgcttaatcctgagactcggacacatgtcacacccatgtccccgtgaggtgggaaccctggggcctggacaggcctgagtgtggtctcagccccatcacacacagctgggcagctagacctgggtgtccccacaggggtgccaggacacctcccaggggttgtagtgagccctcagcacccggcccacaatgggcacagctcagcgatctcccagcattccctgatcctcggaccctgggacgcaatgcaacccctgctcaggcccagatgcagccagcataggacagtctgtgactttgcctgggacacccactgcattttaaaactgcacttcatttggcagccccaggagccagggcgctgcccaggcctgttctcagaggaggtattatgcccgtccgcccgcccgctgtggctgctctgtggggagcctgacttggcagctcccaggctgtgtctggtgccagacctggctgcacatggagccagggatggatttagaaacctctcgcttctcccagcatgggcagaggcgcccagattcctccccggcctggggccaccatagcaggagaaggggagggaggcagaggaagccaggcccagggagggccaagcagcccccaggcagacccctggaccgttccccagtctgcactgccgcctcagggacctccccatcacctcagcaagcgcccttttctgtaaggagggggtaagaacacctgccctcgggtgatgtgagaagcacactcacgcggggaaacaggtcttagtattttcttagactttgttttgttttgttttaaggcagggtctcactctgccgcctagattggaatgcagttgcatgatcttagctcactgcagacttgacttcctggactcaagcaaccctcttgactcagcctcccaagtagccaggactataggcacacaccaccactcctggctaacttttaaactttgtgtagagatgggggagtctctctgtgttgcccagactggtctggaactcctgggctcaagcgatcctcctgttttggcctctcaaagtgctggggttgcaggcgtgagccactgcacccagcctcttagacttttggacagcagaggggccaggcctttaaatgtcctgggggtgtgatgtgctgtccgtggggatggtggggtcacctgccccagcctcagtgggtccctcttttacatgcctgcagctcaccggatgctcccgtgtggcactcagctatcatgaggtgtgcatccgtccaggtggaccccagagccccgcatgcaaccacgggccccgcctgggcctcagcctccatcccaggaatgggagaaccagcttcacttcaggccaggaaagagggagactgaaagagcagatgacatgggacaggacagagcctgaggcccagacaggccatgagcgaggggaggtgagaataaggccacaggtggtcccgtgtctgccttccctgctcaacgtgcagagagggctggccattttctccggcttcatcagcatgctctacagtcactgcgagtgttgcaggaggaattgtggcctcctccacagcagcgagaacactgagccccgtttcatctgtcttcctcctgtttccttgaaccctcccaagattctttctttggtgcgttattcatgttgttccttttcctgcaagagagaggcctttgtcctccttgttcagcaagcacctagtcagtggtaaagtgcaatatttagctggtaacaaaggtgtggaatggaattggcttccatgatttggcgaagtatttgcaagaagcctatggtgaggcttcttgtttacagatccacgtgtcttagtggaaacctcagaaacacacgctctcgtggatgctgtcattcttctttttttgtttgttttggttttttgggggggggttttgttttttgtttgtttgtttgttttttgagatggggtctcgctctttctcccaggctggagtgcagtggtgcaacctcagctcactgcaacctccacctcccgagttcaagccattctcctgcctcagcctcctgagtagatgggaccacaggcgtgcaccaccacgcccagctaatttttgtatttttagtagagactgggtttcaccatgttggccaggctggtctcaaactcctgacctcaggtgatccaccctcctcagcctcccacagtgctgggattgcaggcgggaaccactgtgcctggccagatgctgtaattctttggaaagggatggagttggcatttccccttatgctgttgggaaaatggctttgctaagatgtcagaagtccctgttaatacaacttaaatagataaaccatagtcagagcctggggaaaattcctgtttaacatattcatttgcatgcagtgatgacacttatttcaaagcattcctgtctcagcaatgcagtaggtcaaatgtgtaggcatccctgggctggcacaggtacataggacttctaatgcttggccttttccctagtttgattgtactctctgaccagcctgatttaggaagggtttgatagtacaatatccgtctttccctcacgcgtgctgccagtcccagggggatgggagcagccactcacccgtaggagttccaggtgtgcacagctggctcagagcctgctggcccagcacacatttcccaggccagcacagtgtgctgaagtgcttttcatcaaacagttaacaagacttccttatacatttccccagtgtcaagaaaaacaaaaggtgcccagttctctgctgcctccagcagtgctgggcagaagtgagacaggaagccaggctcccgagctcacacacgcagacgtaggtgggaagctacactgcgtgggctttcacatccccagggcccgggctgaggcctcttaaagacaagctggccctgtgcttgctccacacctgacgcacgccaggccaggccacagcgtggctctctgtcaacagaggaagtggcgcagtaagtggccagcccctccctgctttggaaaggtcccgctattcacagaatcctgggtgtgagccctgacaccaaaggcagaaaccacaagggagaagccagccctggctgcctaaatgcgaaataagcctgttgctggctgccacgaaaatgccactgtgttccagtcctaaatggggtgcatgctattggtttgagacagtgatttttttttttttctttgagactgggtcacactctgtcacccatgctggagtgcagtggcatgatctccgctcgctgcaacctccgcctcccgggttcaagcaattctcctgcctcagcctcctgagtagctgggactacaggcacacgctgccacacccagctaattttttgtattttagtagagatggggtttcaccgtgttgcccaggctggtcgcgaactcctgacctcaggtgacccgcccgcctcggcctcccaaagtgctgagattacaggcgtgagccactgcacctggccgagagagagatttttatcacatgaagaaaatagcttctttctgtgttttcaaggttgtggcttttttaaaatcagaaaagaatattgagttttctcaaatgccttctcaatgcgtattaaaatgacggtacatttttttcccatggtgtattaaagtgtgattttgtagtaacaggtttaaagcattcctgaaattagccctcctttaaataaaatatgctatgtggctagatgaagtttgttagcattgggtaggggacttgagtgtctatttataggtggaagcgaagggcatctgttccgtccgtgtgcgcatgcgttgagacgcatgtcatgccatctcaagaggcttgggatcagggtttgttaacttttttaaatgaactgggaagctgcacatctttttctttcactttaagaatttgcagtggctcacgcctcccacacctgtaatcccagcactttgggaggccgaggtgggaggatcgcttgagcccaggagtttgagaccagcctgagcaacatagtgagaacctgtctcaattaaaaagaaaaaaaaagaatttgaaagaactgcctgggatctagtgccttttgaaacagcaattctttaataacatttgccatttttcttcttggaattcctcctttttaagtcgatatttgatagtttataatttaaccaaaaagtatcccaattcactgaggattttccaatttttaacaaaccttttttacgtattaatctcttatacttcttctttttcttttctgttttttgttttttgtttatttgtttgtttgtttaggacagtgtctggctctgtcgcccaggctggagtgcagtggcacgatctcgactcactgcaacctctgcctcctgggttcacggcattctcgtgcctcagccactcaagttaactgggactacaggtgtgtgccaccatgcctggctaattttgatattttcagcagagatggggtttcgccatgctgccccggctggtcttgaactcctgagctcaagtgatctgcccacctcggcctcccaaagtggtggtattacaggcgtgagccaccgcacctggcctatattagcttctaataattattgatggacaaattatgtgccatttggagagatttattttgttctttttaaaaaatatcttgctttggatacttattttgtttattttcatttatttttgtttaataaaataatgtataactattaatttttctcagaattcacttttgccccattccattcatttgtacatatagtattgccgatcttgttctcttaatattttgtaattgaatttttaaattctcctgtgacttcgaaattatataaatgatctttcatttctaggaattccatttttttaaatttatcctttttttaaaactaatttttagttttcagtattgtagcctgagaatattgacttatgatttatactctggggatttgatgagtctctttttgccgcctaacacagacccaggggcctttgaaaagccggctgagtctctgtagaatagaacctttatcagacagtcactgcatcggtttattaacattatttttcataatcactttatgctactgtttatctacctagccttgggaggtgtgtttaagtctcccacgtgtcttgcgttcctggcagctgcgggctgtctgtacgctgtggcgcagtgccaactgtcctgggtggagcatccccatcagccccactgatggcccttctcaccggcctgggccaggtctgctgggaagcccacacccctgctcaccttctgtctgcgtctcctgggtacatccctctctcgctgtcttccttcaggctttgtttcactttgccttggaggtggccactgtgaccagagtaagtgggatttttgctcttaccctccctgccccggtggtgtctgcagtctggttgttgagaccaacagtgggtgaataatcacatgagttcatggacagccacaaagtaacacccatctatgaaggaaaaccccactttgctggggaagccaaatatgattgaagcatccagaaaaggcctctttgaggacgtgacatttaagcgaagggcgagcatagggtggccttgtgaagatgaggctaagagctttccagttaaaaggaacagcatgtgcaaaggtcctgaggcagaacactggccactgtggctagaatgtggccagcaggagggaggggacccagttgagtgacccacacagaagcttctgaatctgggacaggtgtaatggtgagcactgaaggcgtgaagcaggggtgggaaggtgtggacggtgggcttgggcagcggccagggtgtgggatgtggcctggagagcccgtggtagctaagcccagcatgcagagtggagggcggtggaggggtttgatggctgcccctgactaaactgggggaggcagaagaaggggtagatagatgccaagcccccacatactcactcactacagaaaagtggaagctggtatgtaagttgtaataacccatccaccaggacgagtcacttctgccccatcctgggcacagtgatggggcctcaggaggggagggcacccttgagggaaaggggagccatgataactcaggggataggcatggcatgggggccctgagtcacatgtgttcacagccagaagtgaacagcccaggcttcaggtggaggagggagaatggggaactctcaggtgcagcccaaggccaagagagaaggagcacttcgcgggggatgcctctcctccgggggctggtaagggcccggggtcttcagtgagtgaggatgccccactgccacccggagcaaggctggagtgaggatgaggtgggggcctggagcaagggcgaggtggaagagggaggggtaaggagggatcgggaggaggaggaggggctgggaggaggagggagggatcagggggtggaggaggggctgggaggaggagggagaggccaggaggagagagggatcaggaggaagaggaggggccagaaggacagggagatggaggagggaacaggaggaccaggaggacgcagaggtctccgcagagggggtggggggaacacagcgaggaggaaagtggggtcctgcccccagggcccaccccgcacccccactcacccttccacagagccccttcctgcctcagagttgggtcccgcggggcccccagttccacgcaggaggccactgagactggagaggcccaacgccccgtccccgctccctgtctgccctgcacgcctcccccatgagccgctgtcaccagagggtcccagccctgcctgcacatcagagccctctggtgggaagacccaggctgccccagacaccaggcacggtggctgcagatgcagtgacgccaacatctagtttcctgtgagccttcctgctaaaatgagctgttaaatataattataaaaagtatgtatgctcaaggtagaaaacccaaaaaagttgagagaaaagtccttcgtgttattaccattctggtggggatcactcctgtgacattctgctgtgtccccctcccatgtggaccattttaccccaatccaggctgtttatggcacctggtctaacctgctgctgcttttcaaaactttatttatttatttagcagagagactgggtctcactaggttgcccaggctggtcttgaactcctggcctcaagcgatcctcctgcctcagcctcccaaagtgctaggatcacaggcatgagagctgttcttctgcccagctttagaacataaatgtttttccacatcttaaaattttcttcctaaatataattttaacagctacataatggagccactcataaacaatttctgtgaccgctgtcctgttgtttgctgtttttcataattataaatctgcagtggacaccttcttacatcactgttatctatatttcacattattaatttaggataattcccagtaatgcaattacggggtcaagaggcatccgtgagtttgagattattgatacatattgccaaattgtgtttcagaaaaattgtaccagtttatcttccctgaggattgctatgagtgcctgcctcagtatcctacaccttcactagcattcagcattcttttctttttttttgagacagggtcttactctgttgcccaggctggagtgcagtggcaggaacatagctcactgcagcctcaatctcccacctccctgggctcatgtgatcctctgacctaagcctcccaactagctgggactacaggtgcatcccatcactggcaaatgtttgttgttgttgtttctttaagacagagtctcgctctgtcacccaggctggagtgcagtggtgcgatctccgctcgctgcaacctccacctcccaggtccacgccattctcctgccttagcctcccgagtagctgggactacaggcacccgccaccacgcccggctaattttttgtatttttggtagagttggggtttcactgtgttagccattttgtatttttttgtagagacaaggtctcactatgtttcccaggctgctctcaaactcctaggctcaagcaatcctccggcctaggcctcccccagcgttgggtttacacgtgtgagccaccacgcccagcctagcattctcctttttaagaggagtgccatctggatgtttggtctttcatttcacatgcttagtagtcatttgtatttctagaagaaatattgggccgggctcagtggctcacgcctgtaatcccagcactttgggagtctgaggcgggcggatcacgaggtcgggagatcaagaccatcctggctaacacggtgaaaccccgtctctactaaaaatacaaaaaaaaaaaatagccagggcgtggtggcgggcacctgtagtcccagctactcgggaggctgaggcaggagaatggcatgaacccaggaagtggggcttgcagtgagctgagatcatgccactggactccatcctgggcaacagagcaagactctgtctcaaaaatagaataaaaatcaaaataaataaataaatgaaagttagccaggtgtggtggtgcacgcctgtaatcccagctattctggagggtgaggcaagaggatcacctgagcccgggaggcagaggttgcagtgagccaagatcgtgccactgcactccagccccgagcaacagagcaaaacgctgtctaaaataataaataaattttaaaaagcgaatataaagccaaaagtgctttcccctcagattttctgacaatttagacacacattgcctggtcaccttttgcttaagtataaactcaaaaaggacaagaaatgtatacgtcatgagccagtcaagtgaggacctgtatctttatcttaataggagactaagacttgaacaagcgaatgaggtctccaggatcactctgggtaagaggtggagctgggatttgaacccaggtctatgggtgacagggcccaggctcagatatttcatattagggccagccgggggtagctgggggacaactgcaacccagggtgtccccagagtagatgactcacctgtgagcatcagtgatcacactttcttaccagcaagtaaccatgaacagtggtgtcgggccttgacttgggacccagatatgctggaaactcccaccataggattcaggaacattccaagcaaagtttgcttcgagccccagaatagaaggtcctagccaaaaaaggataattactcagtgacacgagaactgaaactttagggagttaaagccagggtgtatttttcatgactattttgggtccttcagtccgttctgtgttcttttgggcagaagaatgtctgtactctgaggggaattcttttatcacatcctcactgacggagctcacaacatttattgaaagtttcagctgtcacttctgtataaataaacaggatgaagtgggcagccgactgcacattagagatatttttagacgtgggtggcactgcaatccagaaggctgacatatcaaggagagagtgcctgatcccagaatagcccacccacacacggccctatctgcctcagcgtggcctcggcgtgggttctgtggtggcgtggcttcctgcatccgctccttcctgttctgtttggccagtgcagagatggcaatagctcctcctaaaaatgccacagctccgctcctcagaggacaggggtcagtgttcaggatcatgtgtcactggatctgcagaacaccaaaaactaaactgcctgcgggtttggtgggtctgagatatgggagaggatcatcattcaaagcaggcttcattggtcagatgcagtggctcacgcctgtaatcccagcactttgggaagccaaggagggtagatcacctgaggtcaggagttcgagaccagcctggccaacatagtgaaaccccatctctactaaaaatacaaaaattagccaggcatggtggaccatgtctgtagtcccagctacttaggaggctgaggcaggagaatcgcttgaacctgggaagcggaggttgcagtgagctgagattgtaccactgcactccagcctgggcaacagagcaagactctgtctcaaaaaaaaaaaaaaaaaaaaggcagcattctcactgtttagccctgtagttgagaaggctggacttggttttcagcaacaataacacgtctaacatttaccatggaccggccacataacgtgcactcattcgtttttcccccacgatgagactcaaaccgtcacgacttcatgtggctttttccacttctgttttcttcttgaaacatgagtccttgttcacctggagagaccacacaccccaatgcctacaggcacggcacactctctgctgcctctccctcctcatgcctcatctactaggcctcttggatgggctaagggaggccctgcacactcagggcagtgacctagagggcagccaggaaggaaaaacagtgaccgtacgataggggcgggggtagaggggtgctgggatgccggagaggcccctactttttctgtatagcctcttaaagcccccaggggtctcctcacatttaatttatggcctctgatccatttactcactttctagattaaatataaggaaaagtacccttctattgtcttcattttcactgtttttggagcccttcatctatttatgtggatctcaaactctttcttatcactgaagaactttctttgacatttcttgtagcacaggtctgctggcaatgaattctctcagctgcttttttctcaaaaggttcttatatcaacctcttttttttttttttttttttttttaaagacagtcttgctctgtcacccaggctggagtgcaatggcgtgatctcaactcactgcaacctccgcctcccaggttcaagtaattctcctgcctcagcctcccgagtagctgggattacaggcatctgccaccatgcccagctaatttttgtatttttagtagagatgaggtttcaccatgttagccaggctggtctcgaactcctgacctcaagtgatccgcctgccttggcctcccaaagtgctggaatcacaggtgtgagccaatgtgcccagcctcaacctcattttcaaaaggtatttttttctaggtatagaattccaggctgacaaatgtgtttcccctccccgcaacctctaatactttcaagatgttgcccattgtcttcccacatgacaagcctctgataagaaattaagaaatctgctgtaactcactgttcttctgtatgtcttttttcctctgacctcaagattttttcctttttcttcggtgctcagcagttggagtttgatgtgtctatttggttgtttgctgttgtagctgctttgttttctgtcctgcttgaggttctccaagcttcttggatctgcgattttatgtctttcattatttttttaaaagcctgagccattatctcttcaaatatttcttctgctccattccctctcctctttctgggactctcacattatgagttgaggttgatgtcatttataggattgtcatgttacacagttcttggatgctctggttttccctcacttttttttctctttgtgttccagtttggttaatttctactgacatcttcaatttctctctttcctcagttttcgtgtctgctgatgggcccattgaaggaattctctctgatgccatatctttttatttctagcaactgtctttgactttgagttttcacttctctgcttaaattctccatctgttcatgcatattgtctgccatttccactagacccgttgtcatactagccattctaacataactgtctgatagttacaacatctaggtcgtctctgagtctaactccattcattgttttgcctcttgacaatgggttggttgttttttgttgcttctgaacaaaaaatatataatttttattgaatactgaacattcatgtatagaacagaggtgactacggtcaatagtatttacatatggaaatgggtaatcctcttctgtcagaccgttagtgtgggatttgagtcaatcttgttaggaattgagctgggtttgggatttgtcattgttatggttatcttcaatgtaccataggcctcaagtacctctagcaatgagctgtcattgccttgtgcccagggttgggactagggcactggaggagattcctcagtgtggtgccccaccctctgctttcagctttctcttgcctgcctgtgctgcagcatggatcttaccccactttctctcggcagtagacagctgctgcttgttattctaccaaggttatgttcaaggcttggggtgggttctctgtgtactggtccagcctcagtttagacaggcccttccctgtgcccttcaccccagcattcctacccctcttccctgtggcaaactctgtcggggtcttgggtgtgactgtcctgtcccttccccagtgagaagagacctctggtggtggtggtggtggtggtggtggtgtttttgagacagagtcttgctctgtcacccaggctagagtgcagtggcatgatctcggcatgatctcggctcactgcaacctccacctcctgggttcaagcgattctcttgcctcagactccctcgtagctgggattacaggtgcccgccactgtgcctggctaatttttgtatttttagtagagatagggtttcaccatcttggccaggctggtctcgaactcctgaccttgtgatccacccgcctcggcctcccaaagtgctgggattacaggcgttaagccaccacacccagccaaggcctctgttttctatggtgcaggatcgtaggccaggatggtttcctggtgcccttccaaggaaaaagagttccttcctatccttcccctagccatggtgtgtctttgtctgtgccctgggggtgacaggctgtgctgttcctccctcagcagcctaaggcatctgcttcccaggagagaagagtctgggatggtggaaagggctttgagcctgttcctaccctggctgcagccctggtggcacaacttccacagcaagcctggcatcacactggcatcatggatacgggggtgaaggggactcagcacctgccctagaggcactcaggctgcccccatggggcaagggctcattcaaggctctctggcttacggatgcccactgtggcctcaacccccagtgagtgcaacttggacccagacaaggaagtgtccaagctgtggccagatctggccaccgagggcgagggacagtggtgaggtgtgagacccgtgcagtcacaccctggccctctcacctggcagccctccagccttcccaaacctccatttccctgtctacaaaacaatgggtaacagcggtccccgagcatgagcgagctcacacacaggccttgccgagcctgtgcctgtcatgcaggggtacccagtggaccttcatgattgcagcagttatcatggaatggtgacaacagtgaatgccaccaagaccccttcaggccatcagtccccaagaacaggctctgagccccatgaaacgccagaggggcctttcttcctgagtctcagggctgttctgtgaagcaggaggtcacagggggttggagggaatgcagggctggaggcagaaggagccggcgtggtctgggctctacccacggccagtgatgtctcagagcctcagtttcctctgctgcaagaggcacttgacacccacgtcctgggttggaagatgacacagaaaagcaccgatggctgggtccacttgggttttgtccacttcatttcaaagggcatcctgtggcctacaaacccacatctatggagaaagttgttcagaaacagatggcgtttgctctccccagagagccctggggagcagagtcctgagagcacctaaggggcagggtgggaatgagctcacccgctgtggcttcgagggttaaaattcctggagcagaggggactccgcgatggcttctctccaagccaagcccaaggaacaccccaatggcacaccctctgcccgtgccgcccaggcccctggctcggcacggccacctccactcccttccttctagcctggtggcagccatacctgtgggtaaaggcacctgcagccgtggcaggatagggtcagaggccctgtggtgaagtccatatggggtcacacgtacccggtcacacacacagaataacacagtcacacgtgcacacacaggttcacacacacagaataacacagttacacccacacacagggacacacacagaataacagttacacccacacacagggacacacacagaataacacagtcacacacccacagacaataacaagttacgctcacacacagggacacacatacagagaataacacagtcacacacacacacaatcacacacagagaataacacagtcacacacacacacagagtaacacagtgttgcacagtcacacatagaatgtcacacactcagagaataacagtcacacacagagaataacagtcacacccacacacagtcacacacagaataacacaattacatatacatagtcacacacacagtaacacacagaataacagtcacacacacagaataacagttacacagtcacacagaataacacagtcacacagtcacacacagaataacagtcacacagaataacacagctatacacacacagtcacacacagggaataacagccactcacagataacagttacacagtcacatagtcacacacagagaataacagtaacacacagtcacacagaaaatagtcacacacacagtcacacacaaaataacagtcacacaatgtcacacacagtcacaaagagaataatagtcacacagtcacatgcagaataacacagttacagccacacacagagaataacagtcacacacagtcacacacacagaataacacagtcatccacacagagtcacacacagaataacagtcacacacacagagtcacacacagtgaataatagtcacatacacagtcacacagaaaatagtcacacacacggtcacacagagaataacactgtcacacattgaataacagtcacacacagtcgcacacagaataacagttacacatagtcacacacagtcacacacaaagaataacagttacagtcacatacagaataacagtcacacacagacgcgacaccagcctgcgaccttgcccagggtggcagaaggagctggtggcagaggagctggtggcagaggttcgggccttatttggccacccagcctggcttgtcctcctggtgcagacagagctgcgaggggccccacggccacgccagggcttcctgcaccacgggccgccatgcaggtcgccttggagtccccttggagccatcgggcccctgccctcctggatccagggccactgcctcggcgtcggggcttctccgagccaagcttcagggctgcatgaggggccacggtgcagcagcccgggctggggtcccgcgttggatcccccgcctgcccagggtcttaccacctcctcttccatccgcaggagctacagggagctggccgactgcacctggcacatggcggagaagctgggctgcttctggcccaatgcagaggtggacaggttcttcctggcagtgcatggccgctacttcaggagctgccccatctcaggcagggccgtgcgggacccgcccggcagcatcctctaccccttcatcgtggtccccatcacggtgaccctgctggtgacggcactggtggtctggcagagcaagcgcactgagggcattgtgtaggcggggcccaggctgcccgcgggtgcacccaggctgcagggtgaggccaggcaggcctgggtaggggcagcttctggagccttgggacagagcaggcccacaatgccccccttcttccagccaagaagagctcacaggagtccagagtagccgaggctctggtattaacctggaagcccccctggctggaggccaccgccaccctaggaagggggcagggacgtgaccttgacttacctctggaaagggtcccagcctagactgcttaccccatagccacatttgtggatgagtggtttgtgattaaaagggatgttcttgaacttggaaagactcattatctctgggtacccatcactgggagaagggtggaaacccaggccctgcggactctctttcctctaacaggaggaatcaggggcctttgctcgggggtggcattggagccagtgctgagtgcactgaggtgctcctggggattctggggcccttgctgccccccggcgacacagtccagaccagggctggacacactgagctcacagaccaggaagggctgggaccctccccacagatacctggggccttgggtgcaggctctcttcttgtctgtccccgaggcatcaccgggcttggccctctgcccgtcacctccctgctctccatccatgcttctgcccacgcccctacctgcagcttccagaagcctctggctccccaaaggagcccctccacggtccctccggggtgtcccctgagttcagacccctcctctcgggtccctgcagcccccaggacctgtcccttctccagtgactgagaagagtgtccactcccccatcaccttcagcttgtcctctccctctgccccacaggacagccccatccaaacacggcagccggtgccgtggccttgtaggttcagctgtagcccaccacagccacgtggggccacccaccgcccaggctgggctgagcccaccagaccccaggcagcccatcacagcagcctcccccaacagagcccctgagcctcctcctgggtgttgcggtccccaccccacgcccacaaggtgcacccatcacgggcagtccccacctccccacccagccagtcccaagaggcatccccagcctaagagaccagaaggagccccgagtggcttctcggcttctccagcggaaccgtggctgtggtgtgggcccgttttcccaagaggagcaggcgtggctgcaccttacactgggtcaggagaggagcccagggtctactgacagtgggcggtggcctcagggactgatcctagtctctgtcttgttgggaaccgccgggactccactgtccgtgacccagtctcagccttgggccctcagtgagggtctggtcagtctgctacgccaggccccagcttcctccgcttctaggatgtcaccacctgtgagtggagaagccgagggtgctctggggccagtggctttgggccataaggaaataataagaatgacaacagcagtagcgtttgcgtgagccgggcactgcgctgtgaacttgtgctcataaaactcccagagaagccccttgagggagagcctgtcgttgtgcccatttcacagaggaggaaaagagagttcaagtcacttgcccgagttacttcaataatgtgtccaagaagattccttgagagactccaatacacaggacagatgaaggcgaagaggggccaggatgctgcctcccccttctctcctctgttcccccctcagctcctccccgacctgccccctgggccacactggggtccaggcctcacccctgtgttcacaagctggcctttcctgagaggccccagtgagggcgaggagacgggaggtgggagcttctcacacgatttcgacctgcgataccgacggcatctctcagacaacctgcagccgggccaacctgggttggggggctgtgctgggacctaagtcagggaccaccggaggaggtagcccttgagccgccctggagcccgggccatggctgggtcggccggctaggcaggcgtgggagcttgggatggagtcctcctgcaggggactggggaaaagagggattcactgaaaattaccaccaaaacagcgcccacggggatggcccacaggtccactccgggaacattatcagtgaggccaggctggggctgtcctcttaccagtaagcatttgtcaccttagttgacaatgctttttaagacactgtctagtccacaccactcactccgccatctccacttccagaaatctcacccctccctgggatccagggacccctgagccctcagccagctcttcctccatctgcctcctttcctaagggcccagttgtaacccacctgcactcatgacacaaagtggttatgagagctggaagaaaatgggacaattgtctcggctcatcccccacttctcccctagaaagccagggagtcctgaggaccctagtggctagcccacggtcacaccaccagtggcagagccccaggccctggcttcagcagccccgcggcccccgggcccccaggtggggatgcagagcccactgctgcacatgcagaatcctcccagaatccgttttagggctgtagcatcttcaaggacaaggccctgccatgtgctctgccagccgtgtgtgtgtgtgtgtgtgtgtgtgtgcgcgcgcgtgtgtgcgtgtgtgtgcgcatgcatgtgggtgcatgtgtgtgcatgcgtgcgtgcgcatgcgtgcgtgtgtgtgcacgtatgtgtgtgcatgtgtgtgcgtgtgtgtgtgtacaaacagtaaccttcaagtgcagctatcccttccaatgttctattgctttattcagtggtcacgacgtgggtttttcactggttccaggcctgctgtttgctgctggttgtggttgtggaggggtgtgttatactttgtggacatgaatctcctgccacacatctttctaggtggccactcacagctgtgctaccacttgcctcagattaataagatttgttttgattaaggacagtaacctttcccaggacaccgggaccgtggctgcttttcacatcacagcaccgacagaccctcatgaccactgccccattatagggaagcagaccaagggaaactagacactgaaattcagaggctggttttatgtaggagaaggtgttcccagagcactctaatcaaaaaaggtctgatccaaaagatgtcacccaatttcataaacttcagagtgttggctgttctggaaggatggtatgcctattctacaacttggaaaagtatgtctactgtcatcagaaataaatgtgacaggccgggcatggtggctcacgcctgtaatcccagcactttgggaggccaaggtgggcaggcagatcacttgaggtcaggagttcgagaccagcctggccaacatggtgaaaccccgtctctactaaaattacaaaaaattagccaggcgtggtggtgcacacctgtaatcccagctactcaggaggctgaagcaggagaatcacttgaacccaggaggcggaggttgcagtgagctgaaatggcgccactgcactccaggctgagcaggagagtgagacgaagaggaggggaggggaggggaggggccgcagaaaagaccacgctgagaccaggtcttccttactgtcccgcctccacacactcccaactcacagggacaataatggcatcttcctcaagtgggtattatgttaatgaggtaaaatgggttagtctgagttttccgagaagtagatgtggagactgggtttcagatgcagggtggttattggggcaaactccagaagcattagggagccagtggggaagacccggggatctgccctaggctgccatgccgtctaaggttccacaaagccatgggggtgtccttgcaccaaagccagctgtcagagccttcctgggggaggaggtctgcctgaatcccttcccaccccagcctcaagcagcggggcagccctcgtgaagcgtggcctcgcaggaagccacgaggcatttcagagccagcagctggggccctcggtcggctctgctcccttggttgaaccaaagaatgtggccttatctggaaataaggactttgcaggtgtaattagttaaattcaaataagattgtacttgattaaagtgggccctgcattcagtatgcaggtgtccttagagaagaggggatacaccaggacagagagagaaggccacagagattggagccatgcagcgaagaaacgggggggccgaggtatcactccagaagctgcgagacacagaggctccccgcagagccttcagaggacacagcctctgcagcccctcctgaaatcacggctcagtaggcgttatcattagaatgctttagacagtactaacagtgcgcaatgtcattactttaaaattatccaagctaagggaagagacgagggtgatggagaatttctcagtatttagactggacttcagaatgtgtgtttgcgaaggtttagggggagcaagagagctttcggttttccttcttcatcgtcaggtcacgatgggcagcgggtgaggtctacgggcaaggccagctgtggctgggatgggcaaagctctgcccttaccaggatgccctgtccgctcaggttcctggtcaagtatttgcacatcacaaggctgggaaccaagaactgaacgccggcacgtagggtggtaaaggagaggtgggccgggcatggaagcaccgtcccttctccagccttctctgatgggcccaggacgggaggcagtgttgacacagggagggtctggggtctctactaagctgactgggaaaccagtggcaggggtgtgtgtgtgtgtgtgtgtgtgtgtgtttgatttttggttttgggggggtattttgttctttttttttaattaattttttttttttttgagaaagactcttactctgtcgcccaggctggagtgcagtggcatgatctcgactcactgcaacctccacctaccaggttcaagcaatctcctgcctcagcctccggagtagctggaattacaggcatgtgccaccacgcccagctaatttttgtatttttagtagagacggagtttcgccatgttggccaggctggtctcaaactcttgagctcaggtgatctgcccgccttggcctcccaaagtgctggcattacaggtgtgagccaccgcactcggcctccaaagccaattttaattaaaagaaatgagattgagtggctttattgtgtcctgagctggagaaacactctcttatccagagcttgtcataaaaatccatgtcataaaatgtcacagaaatccataggaaaaaaatgaattggaaatcaaaaaagctttaaaaagcaagggaaaaatatggaatttagcatgggaaatggaattgcccaagtacgtcacttaatgtttgtcttaatgagctcccagaaataaaattgctctggggacagggtttcttgtaaaccaagaagcagctctggattggaaaaatcttcaaagaaaggacatccctgttggatttgctactaaggaggccacagacagcctgggagcggaggggcagaggcagcaccagaatgcacaatgagcctgagcctgggaacaggtcactcctgccggagagaaagccctgaggcctctggagatgcaatctgcctcttgtttgtcagaaatgaaaactaggctgggcacggtggctcacgcctgtaatcccagcactttgggaggctgggagtcagggcggggggatcatttgaggtcaggagttccagaccagcctgaccaacttggtgaaacccccagtctctactaaaaatccaaaaaaattagccaagcatggtggcacgagcctgtaatcctaaccacgctggaggctgaggcaggagaatcacttgaatctgggaggcgaaggttgctttgagctgagatcacaccactgcactccagcctgggagacagagagactccatcagatagatagatcgatagatcaatagatagataggtagatagagtagatagatagatagatagatagatagatagatagataatggtaccatctttctggaggccaagttggaaatatgtaccaaaagtcttaaaatgcttattcccggtaatttcccttctaagaatatatcctaaggacataattaaagatgtgcaaaaggacaggagggaaagatcttcactggagttatttataagagcaaagggtggaaacaccctcagtgcccaacactggaggactgtcaatcagattaaaactcagatgacagggaaaaactgttcaatccaatcaaatccagatgacagggaaaaaactgttcaatccaatcaaatccagatgacagggaaaaactgttcaatccaatcaaatccagatgacaaggaaaataggttctttttttttttttccagaaacagagtctcactctgtcacccaggccttggagtgcagtggcacaatcttggttcactcactgccacctccacctcctgggttcaaacgattcttctgccacagtctccccagtagctgggattacaggtgtgcaccaccatgcctggctatatttttgtatttttagtagagacagggtttccccatgttggccaggctggtctcgaactcctgaccacaagtgatccacccaccttggcctcccaaagtgctgggattacaggcgtgagccatccaccatgcctggctgggaaaaacaagttcttaaattaagtacatgggaattttttttcatagtgtagagttaattggaaaaggcagattatgaaaaaggagagtgaactgatctcaattttggtgtgtgtgtgaacacattccccaggccatatccaagtagggggagagcacataatacaactagcagaaacgataacaacacaacaggctatggtctggatctaggtgccacatcccaattactgggctgtcactccctggcattagatcagccttggcaggttctgagtctttttttttttttttttttttttttagacggagtctcgctctgtctcccaggctggagtgcagtggtgcgatctccgctcgctgcaacctccacctcccaggttcaagcaattctcctacctcagcctcccaagtagctgggatcacaggcgcccactaccatacctggctaatttttacatttttagtagagacggggtttcaccatgttggccaggctggtcttgaactcctgacaagtggtccacccacctcgccctcccacagtgctgagattacagacatgagccacgatgcccagcaggttctgatcttgactggacccctttttagctgagtgactttgagcaaacttttcatctttctgataattttgtgtgcatggaaaagatgacttagcattggtcacatgccctattccaaggatggtgtttgagctccaaagagcaggccacctgccagaggacccgtattttttggggacagggatgagaatgggcaagaagagagcagatgtaggctgggagccttgagaacgggagaggaaagaggtttcaagacatttttctctagattgtgaacataattgcactttggttccccctagaacaaatttaagaaggacctaaattgcttttcaaggctattttaggaagtgaacttggatctgactttgttttttttcttcctgggcctgtgcggaggtggaccatgggtgcccatctttatttgggttacaaaaatgtgaagggggtgcagaggaacagcgggaagagagcagccctccaaagcatccctctctgccccaccccagccacaatccttgggcctggggacagtgctcatgcccccacgtgaatcgcttccccacagacactctgacaggaggccggggaagtttgcttcctgttttctgggggcagggcgggaggcagacaggggtgactggaggtgcatgtccatgacaggtggcagctgctttccatccccagtgcatcctgccatgagagcacctacatcccagccctgcccctgccacctaagatctcttcttacaagaagcagtgccacctttaaaatgtttcaaatggtcaggccgggtgcaatggctcccacttgtaatcccagtactttgggaggctgaggagagcagattgcttgagctcaggagttcgagaccaggctgggcaacacgacgaaaccccatctctaccaaaaatacaaaaacttaaccaggtatggtggcgcacacctgtggtcccagctactctggaggctgaggtgggaggatcacttaagcctggaggtgggaggctgcagcaagccaaaatcatgccaccgcactccagtgtgggtgacggagcaagaccccatctcaaaaaaaaagtttcagatggtcataggtgtgaaagtatataatgtaaataaaatgttttaaaaaacaatatttttaaaagttgtagcatagaagtgatggcaccaagctgccttagttgaaaccaaatcctggctgtgccgattaaaaatggtgaggcaggctgggcacagtggctcacgcctgtcatcccagcactttgggaggctgaggctgaggctggaggatcacttgagcccaggagtttgagaccagcctaggcaacatagtgagacctcatctctacaaaaaaatttaaaaaattagctgggtgtggtggcatgtgcctgtagtcccagctactcaggaggctgtgggggaggatcgcttgggctggggaggcagtaagccatgatcacaccactgcactccagcctgggtgacagaataagaccccatgtcaaaaaaaaaaaaaaagaaaggaaggaagaaaggcgaggcaagctcctcaaccctctgggcttcagtgtcatcgcctgcagagtgctggccatggacacttcagggactcacagtgaagacagcccttggccatgtggcaggcacatggcaaacgctgctaaccggggccatagtgattcactttcacagcagggctgggagctgtggctgcacgtgcacgtgaacacatgtgggtaaatgctcccgtctctcagtgttcccagcccttctgcacagaaggtcgggtgagtcaaaaggagaataatcggtgatcataatgataggaaacgatcgagtttggggattgtctcctcctcctcgggctcggctgaggataaagcagtgcagtcggagtctgcccaagctgctgctataacaggctggggacttaaacaacagaagtgcgtttctcgcagctgtggaggctggaagcctgagatcaaggggtcggcagggttggttccttctgatgcctctcttcttggcttgtcatttcctccctgcctcatatggtcgtctttctgtgcctgcatcctaatcttttttttttcttttgagacagggtctcgcccagtcacctaggctggagtgcagtggcgcaatctccgctcgctgcagcccccacctcccgggttcaagcaattctcccacctcagcctcccaagtagctgggattacaggtgtgtgccaccacgcttgactaatttttgtatttttaatagagatggggtttcaccatgttggccaggctggtcttgaacccttgacctcaggtgatccacccatattggcctcccaaagtgctgggattacaggcatgagccactgcacctggccctaatcttctcttcttataagggcacagtcacattgggttagggcccacccagtgacctcatttaaccttagtcacctctgtaaagaccctgggtccaaacccagtcacattctgaggtactgctggttaggacttcaagatgtgaagtcacattctgaggcaaggacacaactcagccaggacaagagccacttccccaaccataaaagtgtcacccagggcagtgggcttttctacctgacccaacacagccaatttaagctggaatggaattaaagtgttgtaattcacgtgaaaagtcatggaaaacggcactgcagtaaggcattggctacggaaacatcacaagattgaataaagacctgctttgcatcaacgcacatcatggcacgttctcattgtgggaaaatgtggtttaatgagggagacacggggaggggcagaagacctcagggagattccaaagaggattcccaagcaggtgcattcacgggcattggtgaaaggcagcaggggcttgtcatcccgcttctgaaaaatgggcaactctccactgatgcctgtgttcccccat

SEQ ID NO: 408 - DNA, 916 bp, Homo sapiens
gcggccgccgcctcccaccgctcccgcgcccgctcccgcccccggcgcgtctcctccgggcccgcgccgcggcgggctcagtcctcagcggggcgcgtggcgagcggactcgactcggcaccgctgtgcaccatggcccgggccctgtgccgcctcccgcggcgcggcctctggctgctcctggcccatcacctcttcatgaccactgcctgccaggaggctaactacggtgccctcctccgggagctctgcctcacccagttccaggtagacatggaggccgtcggggagacgctgtggtgtgactggggcaggaccatcaggagctacagggagctggccgactgcacctggcacatggcggagaagctgggctgcttctggcccaatgcagaggtggacaggttcttcctggcagtgcatggccgctacttcaggagctgccccatctcaggcagggccgtgcgggacccgcccggcagcatcctctaccccttcatcgtggtccccatcacggtgaccctgctggtgacggcactggtggtctggcagagcaagcgcactgagggcattgtgtaggcggggcccaggctgcccgcgggtgcacccaggctgcagggtgaggccaggcaggcctgggtaggggcagcttctggagccttgggacagagcaggcccacaatgccccccttcttccagccaagaagagctcacaggagtccagagtagccgaggctctggtattaacctggaagcccccctggctggaggccaccgccaccctaggaagggggcagggacgtgaccttgacttacctctggaaagggtcccagcctagactgcttaccccatagccacatttgtggatgagtggtttgtgattaaaagggatgttcttgaacttggaaagactca

SEQ ID NO: 409 - protein, 148 aa, Homo sapiens
MARALCRLPRRGLWLLLAHHLFMTTACQEANYGALLRELCLTQFQVDMEAVGETLWCDWGRTIRSYRELADCTWHMAEKLGCFWPNAEVDRFFLAVHGRYFRSCPISGRAVRDPPGSILYPFIVVPITVTLLVTALVVWQSKRTEGIV

SEQ ID NO: 410 - DNA, 101636 bp, Mus musculus
  misc_feature (1)...(101636): n = A,T,C or G
aatcacaaatagtctatttaacttgtagagaaaaggaaggaatgaaaccctgggcaggtgttcagagtggtttctcccagatcactggccaacttcctcatttctcttgagagctggcagaactagctgaggcacaactcaggataataaacaggcattatgtttactaggtgtcggtgtgcggtgcgtaaatgaatgccagtgtagccgtgacttatttaagaccctcgtggacaacagacaatccacaaggcggaaacaaaagaaaagcctcaggccaggctataggcagaggcaaggcacatccacatccatctagcacctaagctccttccactcgctctcccctccacaccccagctcctttccagaatgttctacgccgtgtcagagtgccataaaggtactttggtacaaactaatctttaaatattaaaaataagactgtcttgtgtgcattctggattatttgcctatgaccatccactacagcagttggaagggctggaaaatctggaagcttccttctgtcactttaacccaccattggaaatcattttggtgagaggatcttgaggttgggatgtaggtctttggtagatcagttgcttagtatacttaaggccttggatcaatctcagtgagggaagggaaggaggagaaatgaaaaaagtaaaagaaagggagaggagaagggaggaaaggaaagaagaggttaggcagggagaaatcccagacccgagatcctctcacaatggtgatttccaatggtggttaaaggggcagaaggaagcttccaggttttccgtgtcatgccactgctcttctgtatgattatacttagatgattaaactgcaccagaaatgattttgttaagttaaattgtctttactgttatatactgagattaatctagaggcatgggagaaaattcagggaaaaaaaagttgtaacaaaatgttttctcaatagttctgtggtttcctttatgttttgatttagcctacagacttaaggtatggagtttatcctgctgtcttcaagctagctgaacttctcagtatttggacaactgagtgtcatgtagtggatgcttaaaatatctgttcagtattgtgtaacaccatgtactgtgcctggttacaaaaccagtatttgaaatgtcattagaaatttctttcttttatttcccccccctttttttaaatttatgaatccttttatttgtttacattttaaatgttatcccccttcaaggtctcccctccataaactccatactcctcccctttgcctctaagagggtgttcccctactcacctactcactcctgcctcaccctctagcatcccccttctctggggtatcaaacctctacaggaccatgcatttctcctcccagtgatgctagataaggcaatcctctgctacatatgcaggtggagccatggatccctccttatatcctctttggttggtggtttagtcctttggagctctgaggtgtctggttaatcgatattgttcttcctatgtggttgtgatccccttcagctccttcagcccttcccctaactcgtccattggggtccccaggctcagtgcaatggttagctgtgagtatctgcatctatcttaatcaggtgctagcagatcctctcagaacaggcataccagcctcctgtctgtaagcacatattggcatcagcaatagtgtccggatctggggtctgtggatggaatggatcacatggtggggcagtctctggatggcatttcttcagcctctgctccatttttgtccctgcatttcctttagacagggacaatgcggggttaagactttttaaataggtgtgtgctccaatccctccaaggggtcccatgtctgtctactggaggtagtttcttcaggttctatctccctgctgttgggtatttcagctaatgtcgtccctattgggccttggaagcctctcaaatctctggcatctggaactttccagtgtttccccacactccccaccccaccccccagtgctacttatttctattcattagaattgtattgctataactttattatgatgatccttcattttcttgcctcgtggaattgacacatgaatagtaactgtgcagaagttaggaagtcaaccttggaattggtcctaatcatttatcctctttgagatagggtctctttttgtttatcactgtatgcccggttcactggacacccgcttctgaatattctcgtgtctccacttcctatcttgcagcagggtctctggcaattacagacatgcatgctacttcatcactttgtatgagttctaggaatcccctcaggtccccacacatgcatagcaaaccctttgcctcctgagccatctccatccttataatcctacactaaatctagtggaaagaatatcagtttatagagggctacgattatttccggggatgtgcccgcagcatcagcttcacactcaggctggccctcttacttggaggggtgattgttttatagtttaacttcctcaatatggcatctcggccatcttccagaataacaagttctctttatataataaaacgtactgaaatcttttagagttgtatgtgtcaggtcatcatttggatacattattttcatcttgagctcattctacatattctacttcaaaaatacataggagaaagatgagagtgtaccaccttagcagtctgagctgatgagcaggcttccaggatgccagtcgaggaggtatttacgagtaatggttcaaaaacacagagaaatcctttctttccatttctttgagtactgtacatagtccccagccatgccaccctgaacatgcctgatcttctctgaaaatttatgtaaagttgcttttatccatttgatcttatgtatgaactcccaaatccataagtatttttttactggatattgtttgtatgtgatttgcaaggaataaaggaatcattatgaaactgctgacccaaaaggaagaatgcaagaaacaattttactggctcctgtaaccttaaaacatggtgggatacagatagccaactggtagtgagagcctccacctctccatgtttaagcttttctgcctgcagcatcagcttcacactcaggctggctctccccacacagtagccaagatggtcctcagagactgcaaggtagtatcatctgtatctttggaatctctgaacatgagtgattctctgccagcatccatatggttgtccttgctttggtcgtatgttcaccctaactgagcactggctcagacgactagagctcattgaaacgccagactggtgagcgtcctcttcctgcagtgagaagagagcatcatgattgatgggcaatctcagtagatggggtagtgagggatttcgaaagagctgccagaggaagagacaataggagctgagcggatataaataactgttcacttaagtactatgtcttttgaatacaacctttcccctagaattgcgactaattaagcacagttcaaacaggcatcgtgtgtttttacaaatttataagtactgaggggaccttgattccatgtgcacctttggctaacatttcattctcttcgaacacacatgtcatctgaaaaaatcagaataatagttgccttatgactgtaattaggaaaaaaattatatagctgaggatatcttgcaaactagaaggtgctttcaacagagtaacataccatgtgacttctaggaaaaatcagtccctaaagcaaagttaattgtgtcaaagtttatgaagtttttcctcctttaaaaagatgtaatgtcccattacacctgctgaaaacttccctgaggaatcagtccttaaatacagcactatgctttggctgctgatagaattgctggcaagcacagaccctgctcaatagaaacctagagaatcctccacattgctagacttgggggcaatgctgcgaccaagtagttcactaagaaaactagaaacggataggtagtagagaagagttgaatggcaggttggaaggttggcctgagcccaaattcatagttaacaggcagtctttcatgaagagactcctaaataccacaaacttaatgaccaagatggcacaggggtgctcattcccaggaaatgtttgttcagtgagcgtattcttgcaaccaactgcagagaaataagaaaatgttttataggtgatttggtttcatctgctatgtgcacatttcaagggaatgaatcagtcagtctgtttgaatcatctttgtacgttttatttagtcaaaaaatcagttaaatgactcgcactatttcaaaaagaaaaaaaaaaaaacgaagagaagtagagagcaagacattctgtgttgaagtctgattcagacccatcacaggattcaatggatggaggcagaaatatatggaagtgagaatatttctgaagtctctaccatcataaacattcaaatttttgtcctagcccggtttggcatagagctaggggagaaagttggagtcgtgaggtaaacacgattctcatatattcaggttgatggccccggagtgacgggtaattgtagaaaagcagtcccagagatcaggattgtcacagttggaacatacattggagttgattggttcacttcaggaatgccagtaaatatttcataaccattccagggtggaaggacaaagctctaatgtgcaatatttgccaatccctgtgaaataacactcccatcatgctgacttttggttgtcaagataaggtggctgaaatgtaagtcgggaagaaactcacaagacaggtgtaactgagctagtgctaggggactgacgcatgctactggttcaaaactcactctacaatcgggaaagatgcccaagaagttaagtgacttactttgggtcatacaacgtagctccattgccacaaactgaaactagcttctactactcgagattatgaatgcattatgagaaaagcatcctaattgattgctaagtctacttaactctatagcctggctacatttcccttctttgaacttctcgccttgagtttaagctgctgtgtgattgtctctccttcccatcactctgtattctcattgatggtttgaaagtaatttaatcaccttcaactcttctcagtctctgaaacatcatagatacccacccatgttttccgagtctaggaaagaacagtgatcatacctaccatgggccagacactatgctaacatctactcctcaaagaattcaaagagcctccctcagaaatgaggtggatcccataatacacctgaccagagtatgtgtctgtgcactgggcaccagagtctgcccgtggcactcggctctcaccaacacacacctctgtgggcaggtcaagtcttaattgcacagaatggtctagaaaatggtgtgtattaagtgattaatagcatccttcctccctgctagcttacttctgatttgctgtcccatccaatgagacaacaacaacaacaacaaaaatctcattcatacatttgctggattttagtttgttaagcatcagcacggtacgtgacatacatataaaccttagaacatgtttcttattttaaaaacataggtaactcgtcagaatgtaaaaacaaaataaagattattctgaagcttctttcacaagagaaaacctaaaagccatgcacactcaatactgcactactgggtcagcttggatgcaaatgagttataagattgcttggccttcccttagggagtcagcattcatttatttaccttcagttttttggagaaaaatataaagattgtgttctcattcctggaagatatactgatgtgtgtcgtgttaagaaacaatttttcataaaatgtactctggactgatatgacaatttgtctcctatccttattttttattccctcttgtttccctcaccagcatcaaaaaaaaaaaaaattctagtatatttctgaacaatgagaagtacacttaaaaatagcaagttcagctccagtcgccatatatactctaagatggtcatgtatcttcgaactgtccgctctttttttatacttaaaaacaataagggggagtgggtgtgtaggggagtgggggtgggtgggtatgggggacttttggtatagcattggaaatgtaaatgagctaaatacctaataaaaaatggaaaaaaaaaacaatcccatgagaatattgagctgtgggtgcagaggtgaatgaatgaccttaagtcacatggctagacagggaagggctgggattggagctctgatggggaaacctgctccggcagtgatctctctctctctctctctctctctctctctctctctctctctctctctctctctctctcggtgttaatgaagcatctgggcatgggcgactgtcggctaggcatggattgagtcttggttcacactgggtgacttctgtcaagcaccctcatccagaagaggatactaatcaacttccttcttcacaggatggctgtggagagaaagctgacggtgtagcagaacgcttggcatgtggtaagcacgcagtgcacatttttgttgtttttactattatatggcttatacctcttccagtaatttagcctattgaagctttcctttgctctctggtattagtgtggctttctggcttcgttacacatcccctgaaatcctatatcctcactcagatacctctacatggatcccaaagaccaccatgtcctcaactgtctgtgctaggtttcttctctttcatgcacgcgaagcggtagccacgacaggttgaatgtatcttatcttaaaggtaagacatcttagcttaatgctgttcttttgaatttcttgctggcctcagtttgcatgctcttctttggttatttttgaacctcttcctccagctgaaatccctaacccctcctttatatccattacttgaaacacatgttcatgtactctgacttacttgtagaacatggactttctatgttctgaatcctcactgctcctgtattgtcctgtgacctctcatctctggctctacatggacctctataggaaccttgtgaccagtcttctgctcctggaatcttggaaatactcgtttggagtattgcatcatcagccttatcactcacttgtgcctgtcaccccacctctcaggctctactacttgccaccatcctgcccctgttacgtgcctcccactggtctctgctctgcacaaagccactgtatctgtgaggacacctcagtcactgtcctccttgaggaatgaactctaacctcatttacagtctggtgtcctcccaactcacacagctgataactcatttgcctctaccaatggactatgagctttccagagcagggcactgtttttgttggtactgaagcagtgttagtaaaagaagggaaagtcttgcaaataagcatacatctttcctacaatttaagagtgaaatccaaacaactgctgttgccttctgcttgttcttcctcaaaacacacactccgtgcaccttaacagcctttttgaaagccgctattaaatggattgaaactactctttgaagggcaacagatagttctttcctgtatgagctaggtgcctcttgagaccctcacctggcttctgtaaccctgaaacaatctcttgatgtctcaatgacctgagccttcttgactcttcctttagttcttttactgtaggtattcgcccagatttaactcgctgaccatctccttattcatcttgtcccaccatgccaagcatgccaacctaggttttagttatcagctttttgcagtttgttttacacagagtcttgaatttgcatcccttcctaattccacttgctaccggatcactcaaagcagatgtgtctcacctggaccactcacatccctcgtccataatggcagctctcctcagaaggctttcattattcacctcggttccttggcataggtgttccatctgctcagaaaattcattcctcatgaattccaagcacctgattcctgataaatagcgtgaactgtcctaatcattcctatgggagaccttttctcggttcccattacataataaaacttggcatgcttaaaatctgtatcttttagccaccttcctattgctgcctgccatgctgttgtaactcagtctacttctgcccggatgactccccatcatccttaccttccttttattctgtctagccagatgtcaaatgctacgtactgaactatgcgtcactatctctttctgttcttaggggcaatatattgcttctggccctcttttacttcgctccaggccattatatttgctggtcaaccatttctttaaagctcccaatttttagaaatgcaagagaacctaagtcagaaagtatggactaaggttcttggttttgacccatactacttatctttatttacacagagattcggtatatattagtttaatgccagactatgtttcaggcttctctgtactcaatattggaatatagtaatgagtcagacagatgtcgtcctctctcttctggacctcaccacatgatgaatatgtgcctgtttctcatatcataatccaatacagggaccatctctccgactcttgatgcttgtagtttgggatttgtcctgtatggagtgtcttaatgccaggtagtattgtcagtctatgtgtgttacatagtagccattttttttaggttctgtgaaaggcaggaaccatgagccattttccattttccatagtgtaagcacagaattatgcacatattagttgcttggtgactttggtgtggtttcatacatccaaggttagtagtctttgccatcactgtggtgccaaatatggttttaagcatcattcagctcatgttaggtaattagctttccttctaaagcctctcttttgcataacaatacccaaccccgcccataactattatcagtagaattcacatgtttttaacctgtgtcccttatgttttttaaaaaggaagaacaaaccagttatggttcctgggagaaaaactggtccaattgcataccacggaatactgaaataatgttctttttactaaagagctttttggcttgataatgaacaatatgttgttttttcctgggaaatagttctaaaacttcagttccgaagattaaattttactttcacgcatttctgcctgctgtttgttttgaagtcctggtgatcttgcattaagcatttgtctgtatgaaacaataggttaactatagccaaattattaccataccttttccctgcacacacacacacacacacacacacacacacacacacacacaaatcctataaacagcgtgtgattgcttgcttctaggatttatgattgttttcttccaaaaggaagctaaatttagcctagtgattctacatgctcccaaggaaacaatgcctgctgtgatttctagaataaatgaatctgagccacagttcctttacttgactaaacaagaaagtttaagcatcaacctagtcattagccacagatagaaacccacattaagcaagcagcaagggttaagacacaatgtgctgtgtttcttattgagctgctgaatgccattcagttgctgtgtggcctcaacacagaacattgtttgcatcacagaatggtccttgaacatgactcgtttgtggcctgacttctaaaattaaactatgtggagtcatgtccagccctacaatacatctttatgtgaagctagctagcagtttttttctttttcattctatgtaaataaaattccagttaggaaatgttatttctgatatcgaagctggaggagtcatgcttccatttctctctttgtttctaatgacgactaaagggctcttgcctgaatgtgtcttggcagatcaactcctcacaatgaaggctcccaccgtgctggcacctggcattctggtgctgctgttgtccttggtgcagaggagccatggggagtgcaaggaggccctagtgaagtctgagatgaacgtgaacatgaagtatcagctccccaacttcacggcagaaacccccatccagaatgtcgtcctacacggccatcatatttatctcggagccacaaactacatttatgttttaaatgacaaagaccttcagaaggtatccgaattcaagaccgggcccgtgttggaacacccagattgtttaccttgtcgggactgcagcagcaaagccaattcatcaggaggggtttggaaagacaacatcaacatggctctgcttgttgacacatactatgatgatcaactcattagctgtggcagtgtcaacagagggacttgccagcggcatgtccttcctcctgacaattctgctgacatccagtctgaggtccactgcatgttctccccagaagaggagtcagggcagtgtcctgactgtgtagtgagtgccctcggagccaaagtcctcctgtcggaaaaggaccggttcatcaatttctttgtggggaatacgatcaattcctcctatcctcctggttattcactgcattcgatatcggtgagacggctgaaggaaacccaagatggttttaagtttttgacagaccagtcctatattgatgtcttaccagaattccaagattcctaccccataaagtacatacatgccttcgaaagcaaccattttatttactttctgactgtccaaaaggaaactctagatgctcagacttttcatacaagaataatcaggttctgttccgtagactctgggttgcactcctacatggaaatgcccctggaatgcatcctgacagaaaaaagaaggaagagatccacaagggaagaagtgtttaatatcctccaagccgcgtatgtcagtaaaccaggggccaatcttgctaagcaaataggagctagcccttctgatgacattctcttcggggtgtttgcacaaagcaagccagattctgctgaacctgtgaatcgatcagcagtctgtgcattccccatcaaatatgtcaatgacttcttcaacaagattgtcaacaaaaacaacgtgagatgtctccagcatttttacggacccaaccatgagcactgtttcaatagggtaagtcatataggcttctcgcttaaaagttggtatgaagcagaataaacgtctgtcttaaaaaaaaaaaaaagacacggaagctattctgtggttgatgaatatttgtaaatattcaaaatatttacaaattctttgtaagaaaattaagaaattaatcttgattaatgattaagataatatcttatgaaattcatgtggggctgaagaggtagctcagtcagtgaaatgtttattatgtaagcatgggggagttgtgttacaggaaaccatgtgaaaaaaaaaaaaaaaaaacaggtgtggcagtctatgcttataatcccagcactaatatgagaaaaatgtcttgggctcactggtcagccaaccgagcactttccaggccgatgagaatgaccttgtctcaaatgagtaaataaaaacaaacaggtccctagggggtgataaccaagtctcacttctgacctccatgtacccacacacaaaaaaagtaaacccacgtacacagagagaaagagagagagagagagagagagagagagaaagagagagaggagaggcagagtcacagacacagacatagagacacacagacacagacacagaaatagagacacagacacagagactcagacacagagacacagacaaagagacacagacacagagacacagacacagacacagagacacagacacagacacacagacagacacagacacagacacagagacacagacacagacacagaaacacagacacagagacacagacacagacacagagacacagacacagacacagagacagacacagacacagacacagacacagagacagacacagagacacagacacagacagagacacagacacagacacagagacacagacacagagactcagacacagacacagacacagacacagacagacagattaataaaactaaaagaaaatattactttaaggcttagatttggattcccatccaacactttctgttttagattgatgaccattaaaaatggtattttttacaggaaagcataggaaaattattggtggttttatttaaataaagtagaatttggaatctataagtatagaattatttttctgctagccctttgatcactttgtgacagagaaagagtaccaacctaagggggggtccatttctgtcttgggaattgttgtgttgggcctagatttacacatagagcatggctgtgcctcctaacaggggaccctcagggaccataactgaacaaatagtgtcactttgagtcttaaaaacacttggtctttggaaacatgtgtcttgcccaagcagttttcagtctaagaaacggaggttgtaagtgcaaccgggaagagcagtctctttggaagagactcataggaagagaacctatgtcattccgctgagagggactggggctcatgaacacgtgccggctctcgatgagcctggagtactttcttagatggaaaattatttctctgttttattgagttcaggaactacaacctttggtgaaacagacaaagcttccctcctttcccctccaaagtcttatagtacacaaaacacggacacaccagtccctacgaagatgtactgcccacacacatgtttaatatacattgtaagctctctaaggtacaatggaattcttcatcaggctgatcttttttcaatagaaaatattacaaaataatggaagaacactgaaggcctttcagaaacctggcattcagaaatgcaagtgcgatactcgtagcatctttaacaaaaatgctttgcccacagactgtaggctagttgagcaacacaagtttaaagagcctactaggagttccccatggcttccagggcttatgcccttgatgcttggattttgtactgttaaacgttaaaatgagccttgattttgcagggcggaccggtatcttatctcactgttttattttgtacatttcagcctcccacttgcaagcatccttactcaatttagaaaatctcaaaaccctctgaactttatcttacccgctttgcccattttgtagtgttccagggggaacaaagaggcaagattatccaataaaatgcaggccagttttatcacgaaggaaaaatgccccaaacgccatacctgaaatcattatcactcccatctcaaaaaaattcttgtgggaaacaagatgtaacttgccaacagtcttcgtgcaagggaagccaagtttcgcgctggccaaattccataatatgaaatacctgtagacatcctcttcttctttgcctgttaaccttctccatttactaatggctgaagttttgctgaaactgagactacacacattttttttcacaagcctggcccacggaaagagttccaatcgtcagcctatagtcctagctttgtcctaaacgacaacaaaaccaaaatgctttacaggaccgagcccgtaaggaataagaggatcatctaagcaatacgatgactccggttttgcttggctgattaacttggccagatatcagatgaaccttctaataatatcttggagtatagtctttatttttagcatgaagtttcatgctagaaacacatcaggcagttttgctattaatatctctaatatatgtatgggcagacttaagtgtgttctttagacaagttgaaggatactgtggtggtacctatctacttaggctcctgcccagtcctcagtgtatgtgagaagatctatcagagggactctttgcccttctgtctccttgtcatacggaaaatgtatttctactgcaggatcaagcacagggatgccaggaaagaccatctattcagggatccagcagatgtttcaggagcaactgatttattgatggtcaagttatgctgccttctctcccctcacacttcatgactgtatctagccacagtattttggggcattttctcagatctgcaacaggaaagacccctttgagtcatctgataattctgagagcacattcttctttacctgtgtcttacttgtgcttaaaagcttgtctctacgtataatgcatatgtagagaacttatcccaagccacaagtatgcatccatggaataccagtgctgttgctcataaccttctgtaagaatgtggtcttgattttcacaatgcacacatttttttttcctgttgaatttgaatgtaactcttaaagggcatatttacagtgatatctaactttgaattctatccatttgcatatccacaataatttaaaactcattttaaatatcttttctgacctttctttaacctattcataggtaaaactttataagcatcttaagttattatcagttcatgttattctaggctagtgcatattccactaggaacatgttaatgtgcaaaataaaatcactgagaaaatgtccctctaatatggaaacttgataataattcaattttagagggaaaaaaccctcttccttctatatgaagataaatacaattatacatttattcatttagttctaatttctagcatctccaccaatcattcataagaaattagttaaattgaaagtccagaaagaaatatttaagaacacattgagatagtttctgcaaattcaaatcaatgttcttttaagtcttttctatatttacatcctaaatgctcccccatctcagttcccccctcccagagttcttcacatcatcccccctcccttctgcctctgagaggatgctctaacaccccccccagcatcataaataggagaaattttaaaatctcacaatcagcagcaatcatattctggaagtatactatgtattttatttggagacctgaagtaccacattttagaaatgattttttttttgtggatgttgagatagggaagatgttttatataaagtactggtaattcgttgcactgttttccttagagcaccattaccaaagttttgctctattatataaatatctgaaaaggtaagcttgcagtgaatgtctccccaacaacttggtcttcctttttgtttgtttgtttagttgttttcatacatacagcatattttgattatattcctccccctcgcccaactacccccaacctccctacccacccaactttgtctctgcccccacctctcccttcctcaagaaaaaaaggaaaggaaagaaaaaaaaaacagaaagacaaaacatattagaaccaagggcgggggagaaatcacaccaaaaaaaccacgaagtctgttttgcgttggccagctttgcctgagcatgagggcttgtcctggcatgtggttgatagacttggtgacatcctggtaatcttaatggtgattagtgcaccaattgagggcaccaatggcatttggtagcagccactcgtgtgtgaaaggcccggtttgcagcactcttgctgtatgacctctgactgctgtatgaactcctcgcagttcgggtttcatctgcaacatgcaggtaacacaacctagttcacaagcttgcacatggcacaataagatgactagaaaacccagaaatcagtagagcctaatgagaggaacatgaagcccaaatatggggtcagtcctgcaccccattgtgttttccctggtacccagaaaatgtaatttacattctccagacggtctggcctcacgctgaagctatcatgtggacaagtacaatacctaacacagtcctgactcggtgctatgctcatattaaatgacagctgttgctatgaggatgcttgtctaaagagaagtggactctaatgacctgtttatttctttaaaaaaggcatattgtagttcgatccctcatgggaatctttcacttccctccctatatattatgagtgaccaaactctatccaagcttaattagttcatgcttaagtttgctgactctgagcgggacaacactgaatcaaattgcattacactccagacagaagtctgcttttttctctaacttaaaatttaaactagctatgacaaagcaagataccctgctgctgtagttaaagtgaaactttgcattaagaattacacaatacagggccagaaaaaagtcaacctcctaggttgtttttattgcgcttccttgtttctcaaataccacttgcactccaattcaaagagtagccaactgcttcccaaaataaaggaaactaaaggtagtaattttccatctccgtcctagagtgccaaagttaaagggtcaccactcagagcggtcacagagagaaaggaaagcaattagaacaattttcaataagagcagaaatcaaaacaagatgcaaacaaggagtatcaggcagaggcccgagaaacaagccttcggtgatgtttcttatcactaccataaagatgatggatggataaaattgagttacatttaagttgtaaggaaagaaaataattgcagcgttccatcaggaaaccacaaggtccattattgatctgtcctcttcagggcatgtcttgtaatatttaataaaataaacagagatttataactctctataggccgtgtatctataatcccccacactattcaaactatggatgtagagtgagcattagaaatagaatccatgtcatttgattggtctggcacggcttatttagactgcagtgctctcgagggaatgcattttgtattaggagtgataaatgtaaagtcagattataaagttgtttcttacttcctgtgttcaagaatgagggaacattaccctatatgtacactgttactggggagtgatgttagacagttctccaaacttaaacattaaatatcttggctgtacagcaaatgtaattgctaccataacaaaatcttgtaagagagaaaatccttgaggtacatggattggatatactttatgtttttaaaaatctaagtaaaactctatttcctcttgcttcctttccatagccgtctctcccagactcagcacattgctgcctcctgtcttgcttgaactctctgtgcatacaaaacggcatagtgcaattttttttattttaaagaaacttacaatcaatttctttccagaatttcaaaacaccctctgagttcattggcatgggtggcatggggctgtgagggtggggtgtctttaaaaagtaacaaatgagagattagtgacttttgcctttctccccatcttcctactaccccccttaaatcatcacatatctgttcctgcccccccccccagaaaagattttaagattctatagcatgatgctttcatcaaccaaatgccaaaggataaagtcaaagttgaaagtcaggcaagacataaggcagcctttacctgggcggcactgactcaggatgtgagtaacagtacctccgtgtgtggggtacttgaggttacccgtgccccttgcgtttgaagagtgcttcctgtcctctctgtcttctaaagcccggcatgactgtgttaagttgctgatccctggatggtgattcatttggggaaactgctgtgtcagacaataagtccacaggaaaagaaatcaatcttaaagttgacttttgaaaaaaggcaaaattctgaagccaaaacaccgagatctgaagtttgcattcccacgatgatccacggttggagattactggaagcatgcagagccccacatgttgataaggataataacctacttgagtaataacatatttttttaagcttactataatataacacctcaaatcttgggtgtcgcattcctcctccagacttctgtcttatcaatggccatccctccctctgctcttatctcgtctctcaaacaagaaaagcaaggaatttagagaagactcaggaatttttcctgttgcttattcttggtttggcacaaatacaagtacaatgtgtttaaaatgagcaagcgcccaggtactgctataaagtcacacctccagcatccatggagggctggaaagtaccagggaaatgaaatcaaaggcttgtctactcttgaagtcaatacaactcccttgactttctttttcttttttttttttttcatttctttttctttcttctttttaaaatcatggatgtagtaagtgactctaaggtcctggatatgttccagtcggctcattatatatttttcaaactaatcttttccagaagagttcatttgcatgtgaatcactggctaagcaatattgactacttattctaaaagctaggctttaccttaggaaagcaatttgtgggagctaggttaatgtgggagccgatggactgtgtgtgcacagacacttcacgaagattttccagtctttgggagggaaaggaaaatgtctagtgcatgctatcatagaataaaagttccttttgaccatcctccgtgttcatacatggccacagatggtttctaagtgacattattctaaaacgaaaagatgcattgttaattccgactaatgtctgacttcccttatcttatttggggatatcgtcgaagggaacatcaatcagagaacatgaaatggcaggtgacacttcagattatgctctatgtcaaaggggtgagttaaggtcagtttgagtttggaaggcactgttttgtggagatgacttcatgaaaatccagggagtttctttatgtgttgtcatcacagaatacataggtggttcatggtggcctggttgtaggtcagcatgccgggaacatgtaaatgtgaatgcgaaatttcttattgagagtttacattggaaatatctgtttatcacttagcatcactagactaacgtgaagagccacttaggatttggggacaaagcaggattgaactggctcaccagctctgagggaatcaatagtgcttagagctaatgcactaaacaggttacaagcactaatgcagtggcagtcaatagcaaaagtgagtgcctctaagaattaccttgacaatgaaatgtgtaatattttccatttattttcagctaattacatcacaagcttgttcccccatcttattagcttaagcgaagcacccagaagcctaacagttttatttaggacataaaatgagcagatcaccattttcagcaagaatccgaggaaaggatttattatgcaaccacgattcaataggaagcccagtagttgcttcctgagtgctaattctattagtagggcagtggtgagccacctgtatgtgacacttttcttcatgtggcagtgagtgagtggagatggcagtaaatggccaagtcactccagtggacaagatgtcctgataattcatgaaatatgatgtgacctgtgaatacaaatgaaggcaatgtctaaattttatgatttgatcttaaaagactactctggagtgataaagttaactcttccacaaagcttaaaacagtacaaaatgtgttctatctttagtatattttgtttggggcaaacaaaagccaagtatccaatctactaataatcacagccatctcatggccttttgtcttaagcataagctgctgtgtttcactttaacttttttaactgacttggagccattagagcacattattttctacttaacaaaaaatatcagaaggtgtaatgccctggtgggagtttaccatttgaaaaatatattcagccgggtgtggtggtgcacacctttaaacccagcactcgggaagcagaggcagaggcagaggcagaggcagaggcagaggcagaggcagaggcagaggcagaggcagacggttttctaagttcgaggccagcctggtctacaaagtgagttccaggacagccagagctacacagagaaacccaaaccaaaaaaaaaaagaaagaaagaaagagagagagagagagagagagagagagagagagagagagagagacagagagacagagagacagagaaagaaagaaagaaagaaagaaagaaagaaagaaagaaagaaagaaagaaagaaagaaagaaagaaagaaagaaaaatataaatatattctgttatgcaaaattgtcggtgcatttgaatagggcttggtgtaaagtaggtaatgtgtgcgtggctagaagctgcagacctcatttcagctaggctcattcactgactcacagcctaccacaccatcagcttctttggaagttggtctctgctgggctggattatttcttccttggctccctgcctctctttgtgtcaacactcagtatttgcgaagacattcttttttcttctgcacatgaaaagggttctcccattactcatgagtcctgtgacaaagaatcacgcaactcagaggacacacaaataagccctttggaagccctcagtattatgaacatcaatagaagttaaggcaatgtgatgctgaggtggcccaaatcccgtcgtccttctgtatctgcagagtgtatctacccttcacaattacatccctttttactgtgtttcctgctcatgaggatcatgtggctgagaggccaagtggaagccaagtgctcccaggcctcacgcacatcttatgagcacctcctgaatgcccaagtgtgggccctccaaccagggccatctttgtgttaccagtcctttcatctctggtgcccttacactaaacttttatgtctcccgttaagttaatcatcttcatctgctgatctgtttaatcacacagatatctaagtgagggaaggtctcagaagggaggcacttgccaggctttgctaccaaggcattatagatcacagacaatacatcgtgtcaacttgttcttagaggactctaaaacaatctatgcatttgaacgtgaaagaaagagcatacaaatcacaggcctatacaatctgggtaaattttactcaagtatttttatgaataaattgtagacagtgttttcatcatctgcataaactacaaagatttgaagtgcaggtgtaaaaatagtctgcaggattcaaagaaacactcaccgttctctgtgtttgtctgttcactgttgtttggccaacaacaaagtgatgtttgccaagggaataggaggcatttaatcttcagagtttgttcctgtgcctacaagtcagggaggtcattggcttgccccttcctgcagcctgtaattacaggcagaggactatttattttccagtaaagtgaccaactcttgaatgtaataagactgcttataagagcaagtggatgtaagaaatatatacaattttggaaaagacaatgggaaagtgaaactattgtcttcatattttcaataatatgaggtagtctgagtctctagaaatgacctaaagtacagtacaaaaggtgaacctcaggtcacgttaggtagtcccagaccttaacattgtgaattattatgggaagtttacaatagggtagaatatgtctggtaattcattaagttagaaagtaattagtggctccaccatcatagtaaacaagaagcaataattatattagtaagaatgatttagaaatatttctactttggaaaagagcagttacattgggttagctggagacactgtggggaaaaaatagcaccatttcttgctctccaatatttttaagattaattattataaaagcagtgactccgggtagagttgggtatgtaacatacaacttcaattccactatcgtcccaatgctagaactatccataggggtttaaaaccacactatgtaagtggaagtttaacgatagtaggtgaaccttatgatctatgtggcaaagccaaaagttctaagttgttgacatgtacaaagagaacttaaacatatgccagccttaagggtggtgtcacattgtggtaaattgtgacaatttttccacctactaaaaacaaagtttcctattgacaattgaaacaaaacaagagcaatccatcacattttcctaggatctagggtagagaaagtgccggccactggtgtcattgtgaccctagtgaaaagacaacagtctaactgagtgtatctcagctcatgaagagaagaggtgtcagccatttgggccgtgaacacctgcattttcttaggtaaatactgcttttatttcaaagctttccctgggttgtggtccatggaagcagaactctcagagccttatctaatgctctgtgtgttagaggttcaagaaataattaagacagttgaattttccattttgtctgtaatatataaaaaatatctctcagagtgaatggatggataattacttcaataatgaagatagtatagcttcattttacctttcttgccttagcacagtttttattttctactctgagctacaggcaaatcacaaaataaattgcactattgtttgcttaaggctctctttccttcaaaccttattcctgtctgtcaacctcagcccagttccccaatagctcaggaaaacctccactgggattaagtaatcatttacacaacctctcattcattaacccatgttgacattctccttctctagcccatcctcgcttaaggattccttaagcaccttatccagcagctggggtgggtgcaaacaacgcctatttaatcaagaaattgaatatttccaaggaatcgtttggcctgcctcagccttcttcatgaccacaattgccttctatttcatcttcaaagtaaaatctggattcttccctagtaaacgtgtacttttaaaatccttcatttatttctgcgtattcataaagcagaaatagaaaatattattgcttctaaaaaaaatcttttagtgtgctaaaaatgatgccagtaagagaaaatgagagcatcctggatttgttctcatctccacccaatctgtttgtctcccgagtaccagtgatgtggtagtatttcttgaaaacagcgtgtttttatagctgcaactttagaaatagtttgggggctcccccaatttcttcagagcacaatccacacttatttgtatgatattcaaggagtgtcttacttgggccctggtttccttcacatggagtagaatgccagtcaagaactaaactcctggcagagggtagtagaaacccctgacttgcagggctggccacttcctagcattttagtgtcccaccatgtctatgccaagctaccactgatacaagttttgtcattgataaaaaactagggacaaacctgaccatatggccccatgaactggtacacagcagctcgggtttgggctctgccctatacctgggctatgagtgctgtagcggatagtgtctgtgagtcaccctcccagcccagccttctaatgcctgtcccatggtcagccttcgatttccttcaacactcgttttgtcaaacttacatttcttctctattttttaaaattctctccttagatattatcttctccaggaactattctctagattccatcccattcagggtgacgaactttggagaacatctagtggataaagctcgagttacagtgtcaccatgagtgatagtcacagtgggaacctgccttgacatttgccctggaaacccgcaggttttcaccgctagacaccaaccatggtctcatgtttaaaatgatgcatagattaacagaaaaacgaataagtgtctgtatcagaaccaccattatggacacagggctcctcttactccgcatcacttcacaggcatgaagggtgtgctaggtagagaagccctgtcttgaactagaaaggcccagttgaaaagagagaactgggttggcgctcaggacaccttgcccacttacacaggttttgataagtagttcaagtctgaaaccaaatgagaaaacaggaaatgagtctcactctataatgctaagatggaaaagaaggatatgagctaatgcccgttggctccatgactagaatatagtcatgggcttgcaggagcatactagggcatgactgaacactctcatttcatctgtctttctcctcttctgaccttctgctaagacatctctatagtaatagggagcgttctgagcctacaaagaagctggggctcttactgtattcagggaaaatggcttccttttgaaaggttaatgttgggggttcgttttgtgccttctggctttctaatacttctatgaaataagtgaattacaatttggtttctattaacttaatagggaaagagagagaaacttcctcatagcatccaaacctgccatacctggagcaatttgatgaatcactgttgcttctcgctgactgaagctcagtgtgaaggctgctaaccaaaaccacatgggctcagcctgttttatatctgattcaccttaggaaatgataaagattcgaaagtcttaacatttccaattccaaagcccatatcactgtagaatgttgagtgttctaaccccaagagtggatatatatttaagtatgaatgcaagcatttgtacacatgcatatagaaagccatagccacacataaaatatattctgttccaagaatctttcctcctgttgtccaacctctgccaagacctagctctgcatcggtctctgctgcaaggttctgcagctgttgaaggccactctgctctcatccttctctagtctgatagcacatgctgccagtgcagaactgtagttacctatctgctgagctctttgtcttacataatcagttatgtgcttttatgggttggtccctgctctccctatgtgcacagtgccttcagaagatgggctgaaaaaaaaatgttggcacacatgccaagttaagagtgcttttacattttttaagagttacatatatacaagaaaagtgaaatatgtcacatgggtcctatgatcttcaatgtctaatatataatttaatgtatttatatttaatataatgttttaattctttgaaaacttcataaacacatgcagtgggtcctagcctactcagcctctactcaccctctctggcttctcctcccccttccagtttcatgttctttttttataacccactcagtccattcagtgctgttttatatgcacatgagtgtgggtcattcatgagggcatgaacgcagtctccttcgagtccatcttcaaaataaaaggattccactaaggatggagccttgagagtccctcccctctccatgctggaatttgtaactggtcttgagcaggtatccacagtaaaagtgcaatacttttgtaataaaataatggaaaatatgaccggaggggtgtagcttggtggaacatgtgcttagcattttcagacctttgggttcaatattccacagtggagatggctgggggggggggtggcaggaaagataaaatggtttatagaagtcctttactgaaggagagagaaaagcttccctcccaaattgggagggaaagtcatgggtttgagtcagatcaatcccaatgtagcctgcaggcagatgtggagatgtacttgccctgaggagtacaaggcagatggctgtgtagagttaggtcatcagcagtaggcaaggaaaagtctaagacattgtccccaggtgactcaccagtgttgagccagcagcaagccaagcaccggaggccggtttgtgctgccttgacagctagcctggatgaaagcatgtggttctgctagttttcctttaactctgaaagcagctttgctctcctcctgggcctgcagctacagctagactaggcaggtgtcacatagtcatgaccccagggcaggtgaagacagcacagaacttcttcatctagggaagtcaatgggtgcagaaagagtgacggaccatcttcctttcatgctgtgccctgagaatatgaaacctgagttctcttcctagcacaggacaaggtccagacaacaccaacttttcacatgaaagactagtctgctctgcccaagagctgattcttctgcaccatacagaaagccctgccttcggtgtggatcactgagaagttctagtgactgggcacttaaaccctgggatggtaacagctcaggatcggtggggtaatgggcaatgagcctggctaccacgaaggggagaagcaaacatggaccagcctaaacttcctctgtaagaagcgtagccagatgttgaagtccctgcacccctgcattgagcagctccactgcacccctgcagggatggcatttaggaaagaaaacctaacagttgagtgtttagctaactggctaaaagaatctaagagacagaactttccattttgaaagttgagtcacccacaaagccattactataccttctgtacaaaatacgactctgaataacgtttatatgaaaaaaccttatgttaattttccatggtcaaggatggaagaactggtatgagtcagatggactgatttaacaaaactaaatcttaaaacgttatctacatgactgatttaaattagctatagatgagctaaatctgtcctatagatcaattaaaagaatcgctatttcaaatatatcacatccttaattacactgaattaaatgtaattgcatacttgcttcatacatcacagtgttaattgagggaaacattttgagtcaaacctactgaggtttctagcacttcaattttctctttattaaaagaaacaaaatatatatttgagtcatgtttaaaaaagtaacaggcaagatatgataaaatgattttaaaaaaaaacacaccttacacacataaacacaatacactgatttacttaaggtatcacttcaaagagtatagtgcagagtaattccatatatctctaggatgagatataagatagagcccggggaaaggagtttgtaacacctttaaggtgtgtgcctgtgcatggtgcacaatcgtgggtgtgcatatgttgaggtcagggacatcctgccaggacatagtgagtctgactagccctatttgctttgcagtgtggacagacacaccccatcaactcctccagtccttctgctagtccccaactgtgacccctgagctcagtctgaaggttggctccaagcatccatatcgtgactccttattaaaatccgattgctaaggctcagagagcatgcagctctgtagaccaccctgcagcagtctctgcgttgcccaacattctcagcagggagagagataaggagtaatgtcccctctccctcagcgaatgctggggcattaattcttcccagaagccagtgttcttgttgctgcccctcctgctctctgctttgggaaaagacaaaaaagaagtagatatggatgtgtgcataatgaaaccagaatatacgtgacgctgtttgtttcttagctctaaattgcacaatctttcaagatcaaggagcccttagatcctatcccagcattgtgcaatgtctccacacagaaattttattgggcagagatagcaacataaatccttgaaaagatgagatttggagaccaatttcctgaaggaagggtcttgaagctcacaatatatatattccgtcgacgctgatgctgatttatttttaacctttgcatctgggacaacaggtgtataggggcagagcccctggttgcagcacattttccactgaagaaaaagtcagcaagctcctgtagatttgtaggcactctaagaaacgcccagagatcacctcacctgctctcctgctcaccccactcagagaggtggacctgaaagcaagctggttaagagaagggccttatctctggtggctttgcagatacacacatcttacagcaatggttattactcactgacatcacctaggcatgatggaaggaaactgggtcaaaagtattgaggaagttcctatgtcttgatgacagaggccgacaatagtttatgattcaggatggctccacacgatacacattgtatttgcatctcaggaaaatccattgagaaactctgtggcctaggtcaagtttgaggttttaaagttcccagtggactactgagatctagaaggagcaatggagaggctagtaagggaaggaacctgtccctaatggagcacttcagatggcttaagatttgaaattgttcgttatccctttaactggcttcccttggctctgagttctacaaaatgaatcagcaatcgccggtcaaaactcaattatcaattgatgtatctctattgaatagctggtacatcccagttaactgctactcctcagaataatctataatactttagtgaagaaaggcttctaattaaatagtgagctagtgctttttatacatcaaaataagtgtccagaaccgaaccattttcttaattacgagatacaatagatttagtctctcctaaggctctctcagtttgctaattgattgccaattaaaatgaagaaatcaccaatgcacaaaaatagaatattttaggtggctttaaaccacagaggcaaaacataagaactttacaattccatgcaatggatggtcagccttaaggaatgaagccactacacagtaatataactgaatttttgttattcttaacaataagttagaggtcaggtgatgagggtaaggaatacatgcttgcccagtatgcacaaagccctgagttcaatcataagtaccacaaaagatcaagtttctgagttttataatagatgatagtaacaaaggatttctaacatctcaatccttgtcccaaatgagtagctatacataaagaagtcctgccgggcagtggtggcgcacacctttaatccgtacattccatgaggcagaggcaggtggatatgtgagttcaaggccagcatggtctacagagtaaattccaggccagtcaggactacagggaggaaccctgtcttgaaaaacaaaaaccaaacaaacgaaatgtccaagcataaaccttcatttcttttcttctaagttagccttcattttccttactatgttccccctacccccttcaactggcccagatttaccgactcccagctgccatcagcaacacagaggagccagccattctttgttgctcatgaactcctaactgccctatacctgaaaatggtagtttccaaactactagttcccagcttcctactcaagccacgtctgcctggcttatcctatcgttctgttattatttgctagctctctgtttggtgtgatgttcagtctgccacaggcaggatagttttgaaagagcaactacagttgactgaagcctgacgtatacaagggaatgttgagttgccgcataaatagctaccactatacttgatgcgcgagcaaaagctaacatgagaatctacaataggagcaccggaccttgatatgagcatcatggcaagtctcgtgggagactggtgctaaactcacgaatagaggatatttaggagctaactaggtgagtggaggcggagggcagaccctggaagagcaaaccacttatgtcagacttgttattgggaagatgcttgcaacactcgcacagctgaaagcaggcctgaacgctgagacacagagaacacagaaccagaagatgggtagaagccacataatatgaaacctagtaggctacgttgaaaaggtttaccctaagagcagggggatgaattatatcgtctaaatagaaaggannnnnnnnnnnnnnnnnnnnnnnnnnnnnnnnnnnnnnnnnnnnnnnnnnnnnnnnnnnnnnnnnnnnnnnnnnnnnnnnnnnnnnnnnnnnnnnnnnnnnnnnnnnnnnnnnnnnnnnnnnnnnnnnnnnnnnnnnnnnnnnnnnnnnnnnnnnnnnnnnnnnnnnnnnnnnnnnnnnnnnnnnnnnnnnnnnnnnnnnnnnnnnnnnnnnnnnnnnnnnnnnnnnnnnnnnnnnnnnnnnnnnnnnnnnnnnnnnnnnnnnnnnnnnnnnnnnnnnnnnnnnnnnnnnnnnnnnnnnnnnnnnnnnnnnnnnnnnnnnnnnnnnnnnnnnnnnnnnnnnnnnnnnnnnnnnnnnnnnnnnnnnnnnnnnnnnnnnnnnnnnnnnnnnnnnnnnnnnnnnnnnnnnnnnnnnnnnnnnnnnnnnnnnnnnnnnnnnnnnnnnnnnnnnnctagtgctttttatacatcaaaataagtgtccagaaaccgaaccattttcttaattacgagaatacaatagaatttagtctctcctaaggctctctcagtttgctaattgattgccaattaaaatgaagaaatcaccaatgcacaaaaatagaatattttaggtggctttaaaccacagaggcaaaacataagaactttacaattccatgcaatggatggtcagccttaaggaatgaagccactacacagtaatataactgaatttttgttattcttaacaataagttagaggtcaggtgatgagggtaaggaatacatgcttgcccagtatgcacaaagccctgagttcaatcataagtaccacaaaagatcaagtttctgagttttataatagatgatagtaacaaaggatttctaacatctcaatccttgtcccaaatgagtagctatacataaagaagtcctgccgggcagtggtggcgcacacctttaatccgtacattcatgaggcagaggcaggtggatatgtgagttcaaggccagcatggtctacagagtgaattccaggccagtcaggactacagggaggaaccctgtcttgaaaaacaaaaaccaaacaaacgaaatgtccaagcataaaccttcatttcttttcttctaagttagccttcattttccttcatggaaaggacagcgttttgttcttactggagtagatacttattctggttatggatttgcctttcctgcacgtaatgcctctgctaaaaccaccattcacggactgacagaatgccttatctatcgtcatggtattccacacagtattgcttctgaccaaggaactcatttcacagccagagaagtacaacagtgggcccacgatcatggaatacactggtcttaccatattccccatcatcctgaagcagctggtctgatagaaagatggaatgggcttttgaagacgcagttacagcgccaattaggtggtaacagcttggaaggctggggtagagttcttcagaaggtagtatatgctttgaatcagcgctcgatatatggtacagtttcacccatagccacccaccccctttaactggcccagatttaccgactcccagctgccatcagcaacacagaggagccagccattctttgttgctcatgaactcctaactgccctatacctgaaaatggtagtttccaaactactagttcccagcttcctactcaagccacgtctgcctggcttatcctatcgttctgttattatttgctagctctctgtttggtgtgatgttcagtctgccacaggcaggatagttttgaaagagcaactacagttgactgaagcctgacgtatacaagggaatgttgagttgccgcataaatagctaccactatacttgatgtgtgagcaaaagctaacatgagaatctacaataggagcaccggaccttgatatgagcatcatggcaagtctcgtgggagactggtgctaaactcacgaatagaggatatttaggagctaactaggtgagtggaggcggagggcagaccctggaagagcaaaccacttatgtcagacttgttattgggaagatgcctgcaacactcgcacagctgaaagcaggcctgaacactgagacacagagaacacagagccagaagatgggtagaagccacataatatgaaacctagtaggccacgttaaaaaggtttaccctaagagcagggggatgaattatatcgtctaaatagaaaggaggaggtattggatcatataaaaaaaataataataaagacgtactgcaatatgggcagctaacctgacagtggcaccggatgaaaagctattgccccagcacagcagaaggatggatggcgagggcaggtatcacagtgatgaagacagaaataacagggatagatctgggaagtagtctgtcgatgaaaaccagcccaaactagaggcccttgggagcagtgaaacctgaagtgaggacgtacctccatcagaacggcctacagacagttctgtgtggccttgtcttgatgggtggttgaagtggagaggccctgcccaatgtgggtagtagtatcatctctgtgcagctagtcctgggagggccaagcaagatagctggaggcaagccagtgtggagctttccgccatagctcctgcctccgcttgaggtcctgccctgacttctgtcgatgatggactgtgatttggacttgtaaaccttgaaacaaacctgtcctctccaagccgcctttggtcaggaatggaaagtaactaggacggttaggaaatgtaacggatggagtttcaaggtaggttacacgggagggatgaaggagaagggaaccgtgaagactcttcgatgtctgactcatatacagctagagcgatggaagagccattctgtgatgtgtataatataaggtcaggaagggacaaagggtcaggctaagcctgaggtctctcagttctgtggatggagatcacatgtagagtcaataaaatagatatcacaagagaaacggattgcccgggaaagtatggtacgtgtatgggccaggcatgtgtggtccaggggtgaccctcgaagctttggggaatctgatgtggatgctcaggcgtgactggtcctgcacaggaagcagagaagtaagagagacaccagaggctggatctcgacatagaggacaggatcctcagggcttcaggctcatttcccggcgttgttgaacagtatttcttgtcacccttccactacaatctgaacattaccagattggtgcctgtctttcaagaaggtgcttactgagatatttgatgtgcactttgaaaaaaaaaatctttctcccaacgatgacagggaagcatacagggaagttccgtatgcttgttccattgccagagattcatatgagctagttaacttaatctttgcaaaaattctgggttgtggagacatttttttttctgtagcaatctgttttacagatggagagaataaaacacagatcacctcaatttctgaatgcagaaagattatagaaattgtacaaaatgcacgcatactcaggaccgagacttgatgaaagcagttggtataacgctcggttacctccccatgaattctctatagaactacttccctcaacttctgtgccccccaaaacatgcacatatgcatggattttaagatatatcatagagtgacttttaacgtcatcatcaccaccatcaccatcaccatcatcatcatcgtacctgaaattcattccataggatttgctggtaaggcactatacactaatgtcaagaaatgagacatttaaagttttgcttttcttcttaatggcatccaggttcccccatcttcatgagtgtgcattcgaaccacagtgtaacattgagatttacaagctgtgcctcccatttttgagagtctgtacacacaacagtgcctggagccccaacagtcactacagatgttcatgcacagttaaggctgttgtctgttcatgtgactatccttgatattctgagcaaactctttaatgacacacagcaaagtttcctaccagcttgtttgtccccagaatctaacttttggtggccatgttttactccagaccctgctgagaaactcttccggctgtgaagcgcgcagtgacgagtatcggacagagtttaccacggctttgcagcgcgtcgacttattcatgggccggcttaaccaagtgctcctgacatccatctccaccttcatcaaaggtgacctcaccattgctaatctagggacgtcagaaggtcgcttcatgcaggtaagagcgttcttagggtagctggctttgtacagttatcgctgaaccatgtttaccaacaggctacaaagtgcaaatcaggtcgaagctagagacagaacccaaaggggtaacaacgaggcatgacctactttttatgaagtgggttgcttgtttttgtaaaggttttgaatctttcagcccaaatgtgactgctttaatcttcttgtctagaatcaggattttttcccccattcataacttttatcacatgattggaaagtaaaaaaaaaaaaaaaaaaaggaacaattaagcacttccaggcaatgttttcctgtttcaggggaaaactgggcataaaggagagctattgtgtggccaatgcctgtccatgagaagagacagccacatcattcacatccgtgagagacactggcaggaatcagaaagggacgctatcaaaatcccactgtacctcgggctcgcctccttctgcaaggcagtggagtctcacaaagaagttcagatagttcttttttttttttttcagagcaggatccattaagaaatgcttctaatggctagtgacagtatttccatacaataaaagttcacatttcagacttgatggaattagggtttcctagatacaagaatcagagcactttgcagaaattaacaaccccctcatgttggctatattttattgctttaatagttattggtgcttctcaccatgagttcgtgagtaaattctcaattaatgtggagggacggtgacatctgtggaacttctatgaatagtataagggaaaatgtttacttcattgtctaatatagtaattaattgtataatgtagttgatatcctgattatttaagggcatctagtaagccactcgagagtgatgagattttcctcttaatttatccatcccatccctacatacagtatctatattattttacaaagcagagttttgcaaattctcatcatcttgggagtaatttggatgttggtcatcgccataatttaagaactacaaatcgtggttctctcatgctcgtcggcatgggaggacctctctccagagccatgaagcatgtcactcaacctcctgtctctaaaatgttagcaaacaccccatgacatgaatgtccccacactgtcttcaccctcacagctgacctctcctctctgccccctttcccagtctagtgtgctgtctgcctgcatcgccagtcttggtcacttaaatctattcttgcctgtgaaggtggggcacatattccttccgcatacatgcaagctttaacgtatgactgttacgtgtgatctctgaaatggaatcctatcgcgtgtgcttgtaggcgttcttcagttacactgatcactgctataaaatccaaagagtctgaaggagaagggggcatctggtaaactacttactcaagtgtgccaatggcttgcttccctcatctttatttgtccatttctgttttcttagttccccattacctcaccaatccaggtctacactaatacaatttaacaatcagttacaatttgaaaggtatttttttgagattataaaataattgtatttctcccttcctttccccccttccaacttctcccatatagccctcaccacgttccttcaaatacgtggcctctttttttcactgttagtgcatgaatatatgtaaatttatttgtatatatgcctatgtgtatatagagatataacctgttacatctgtagagcagtgttttcttaatcatgaaaagggtcatagtctatttccacatgttaaaatgataataaaattctatttttaagtaagttaatttaataaaagagtttgtaccatccaaggaatagatcacgtgtctgtaaccctataccccttgtaactaaaactctgtagttgatgcataattcttatatcttagtgtatttgggtggtggggggagctaccttctgctatggtccaaacagtgaaactgagaacttatttcataacaggtactggcatcactgcctgatagatgtgttatccaggtcatcttaacatcatcaagcatatattaagattctactgatttgcttttaaaaacaaaaacaaaaactgggcaagagagtgaagccaaggaaactcggaacctgcttttgggggaataaaattttgataaaggagagtaaaatgttttcctggcagcagtggtgctgatagagaactccccccagccccccccccccccggagcacaaaggactatgtctgtgatagttgcgttccatcaagttttatataaataaacctaaagcatttgaccggcaacagagtcaggcggccaaccacactgaaatccactttgtttacatcaaacacagtagtggggggaggagggtaaagagggtggagaagacgtgagacctggagctgcctttgccagcctgacttactaccaggttctgtcagtgttttgattggacttctctggatcttgtagccaggctaagtctctacaactctcgtgttagtaaatactgtggcatttctgttacaaaatagaatcaacatatttttttcccctcccaaggcagctgctacacatgagaaacacagagaaatgattttacttccttcctacccacaagcctaatggcaaagttgcttagcagattttttttttttttttttaccccaagagtttgcagctgtttctgcccttcctattgtgctgctggtcagcttaggctgggaacacaagctatagccccagctgttgggtgcaaagtgaatcaggtatttcacagtggttatttgattagaaagaattatattgtttagctaacaatagtctgtgcatggcagaggagacatcttgggcatgttgctaacttttaaacaagtgtataacgtgtcccatgcaggtgcccgggagtctgaatagaacgatgtgcacgtgcacccagagctgagcctagatccctggaaacagcgcagtaatagaattcaaaagcggttttggtttgtgcgatcactctcttgggatgctttgaagtagatcacgaagcagtctttttagatagcagaagtaaacacggggagtttgtgtccttccagggaaacctagcccagtgagcagggccatgtgggagaacagcggattctcgtgaagatcataggactaatcacagggattgccagcgtctccccttctgagctcctcatctaatctacatctaaacaatgcttgcttgattttttttttcttacagcacttgtataaggcctttaatctctaaatgcaaagcattgctattaaaatatttgtgcatgactttcaggctggacagagtcgatatggatcagggatgggggtggggaccagaggcctttccaaggcctgcttcaaactcaactcacagacaattgctgtgtagcaaatagtacacggttagcagtgtctaccgcctgggcacaatcacagctaccatcaagctctttggtaccactctggcctttcggcatcatccaactcctttcctgttctggtaccttcattgatgttaaagctcattattttcccttctggtcttatcgggactagttgagtctagcaagaaactaaagaggaaagatgtcgtttggtcatgattattctttatggccatcacttaaaggatcacgttggtaaggtgagagtaatcactccctttccgtaaaccccgttcatttcctcacctcctaccattcgattgcatggggcttctagaccctcatctggcgtgccatatcagggccttccatctgtgagtaatgacatgcgcatgttgagaattactgttgttttctaataggtagatgcaaccatattactccaaaaagggagcattaaattgagatgcatcggaatgaagattaaactcaaacattgtttctctttagggattattaattgacacatctcttataaaatattcacaaaagcatcattaaaaaatgtcatttaaaatgaaaaatacagcactgacctagatatagacctacctaatgaatgttagcactagaatctttttctttttttgaagaaaacatgtgtattgagttcagaagcttccttctttgtgctacgcaagaacttactgtaaataagaatctcaaggtcatgcccacagctaaactttttaagctgggttcttaaaattaacgtatacatgctcttgaaaggcatatattttgttcgctatcaaatcacagaaatttaaagcatcataaatatttgaaagcctgggaagatgtggaattttgtttgttttgcttgtggataacaaagagaaagtaaaatttatttcaatggatgctttgtagaaaataaaaataaacccaaaaaccagagagacacataaactaggaaacagatatcattaatttatgaacctttattaatcttaaatattagtagtagatgaactctgttcatagatgaattgtcctatggtcaatgtgttttactatgaatttggaagttgcattggttatttatctcatcactgtaacgaaatgctgacagaaccaacttaaggattgatttggccttgaggatgaagttctttactgccatgcatatgggatgtgatcagcagcgactgcaggctgtggcagaggctgcttctcacacctgggtagctgagggggcagagacagacagaaagcgaggtctggatagaaacctcagggccccttctccagcagccggcttccttcagccggactccacttcccaaaagtcccccaacctctcagagcagtgccaccagctgagaaccaaatgttcaagcacaagcctgcaggaaacatattcacacccaaactctgacaaatgtattggctctttccatttctttttacagtgtcactagcgtattaggggtttagatgcttaaatttcattttgactcttttcaaataattgaaacacagacacaggaagagttgctattttaaaagatttacttgtttattttatacgagtacactgtagctgtcttcagaccaccagtagaggacatcggatcccattatagatggttggagaattgagctcaggacctctggaagaatagtcggtgctcttaaccgctgagccatcatcttctcagccccaggccttgctttttgaatatgcctgtccctataatgtctgcttgatatggaagcactcatatccatctagcaaaaataaccaagcaaagtacagaagaaagctccccagaactagatttttaatgaacttcatgcctttattctgcaacacagagggccctatctttcctctcctgctctatttacctcactaacttttgtatctggtctcccacctctttgagttctgagcttccaatcctaatcagcaattcccactattattttttttctatttcattaaactagtttccttgattgaagcagcagctcttcatgttatggcttctttctaataaacatcgttttgtagatgctaagaaatctcaagctgtccggaagcataaggcctcagagtcattccttgaaaattacacattaaactcaaaggtacagtcggaaacatttgaaacacttgggccttcaccaaggcataagtgggcttcacatttaaatctgcaaatgtattaaaacaacagacatgagttggagacatactatgtccatactatggaccaagagtctgatctatactggaactacaggaaagcagattaaactctaaatctgtagcactatatctagttataacttggtctgtctatcgatagtgtcacctttactcatatttttctccttgagtccgaaattccaataatttgactctttcatggataattggtttgtccttactacttaacagaaatcctggccttcttaacatttcaaataaatcaatatcatagatggtgccaaaactcaagaggagttttgattacctttaaacaggagtgtagattttcagttcttattcaaggaaaattcactttggtcgtccaacaacttcatacaggtctcttcacctccgagagatctgccacgcagacaactgtgtttcatctctcactctgtttctccagtgagagtctaccccgccagctaccagcttctctagaaccctgcactccagaggcccactctgaccctgaggaaacattctcccaagccttgactatgggtgctgagcgggggtagctaagcaagggtctccagtgagtcgtagactttcctcttacaacaaagcaaaacaaacaaaacaaaacaaaaacacttggtaagaaacacaaacccaaaccacagaaaagtattacttcacacctacggaaatgtccataataaagaagtggaaaatggggtcaggctcggtggcactcacctttcctctcatcactccagcatttgagaggcagagacaggcagatctttgtgagttcgaggccagcctggtctagtgagttccaagacagccagagatatgtagagagacacgctgtcaagaaatgggaatgtggaatagtacaaacactggaaaataatttagcaatgcctcaaaagcataaagataaggttaccataaggttttaaaaagaaaaaaaaaaagccttatcctggatgcaacccacaagagaaataaaagtatatgatcccacagatggtttcacatcaatatccacagtagcattattcagaggcaaaacatagaagcaaccaaactgctccccaagtgatgtatacgtgcacagaatgtggcatggatatacagcacagtattgcttggcaataaaaaaggaacagggatgaatcttaaaaacatatactaagtagaaaatgccataaacaaaattccagacagtgtcagattccatttatatacaatgtccagaataggaaaatggagagatagaaagtaaattagtccttgtcagaggctcgagagattgggcaatgattgttaagggatgttgatgggtgttttttgttttgttttgtttgttttttgagcaactaaaagtatttcaaagttgagtgtagtaatgattgcacaaatctgcatatactctaaaagctaggcctctataagacaggccagaagctgtgggaatggcagggagaacaggggattctcagaaacagtcagagtgggagatggagcacactcccagcctcgtgtgtgccaagtcttgtgggaaggctgtgggacagaggaggtggagtggccttgtggtcatattagtacagcacgggtgacagtgggttccctgaaggattggggaagcccctggaagtcagctgacgatcagtctgctgatgagtctgctgtagattaaggacatttccttctcgagtgagcactgaaattcctattggccctacaaacatcaccatcactccagctcttctacctccttctccccttcctcctcccttcttcctccctccctcctcctccccctcctcccctttatacatgaaactattgaattgtctaaaaagagagacagagcatttgaagaaatagatagctacctagatttattttttgttaaaattatcttcatctaggagcctgatgtagctatctcctgagaggccttgccagagccttacacatacagaggtggatgctcgaagccaaccattggtctgagcacggagtccccaatggaggagttagagaaatgactgaaggagctgaaggggtttgaaacccataggaagaacaacaataccaaccaaacagacccccggagctcccagggactaaaccaccaaccaaggagtaaacatggctccagctgcatatgtagcagaggatggccttgtcaggcatcaatgggaggagagatttttagacctatgaaggttctatagatgcctgagtgtaggggaatcaagggctgggaggcgaaagtgggtgggtcagtggaggaacaccctcatagaagtaggggctgggtttccaggaggggggcaaaccaggaaaggggataacatttgaagtgtaaataaagaaaatatcatacacacatacatatatatgtgtatgtatatataaaatcttcatctgttttaaacaaaattaacttgtaaggatgtctagttgaaaataaaatctatatatggtagggaatttggtctttatgaatcataataaatcacaaaaagtattttcttcacattttaagttttccaggtgaaaccacagatttatttttctgttcatgtattgatctaccacatcttttctcagacaccttactgagagagtttatgtggcctcataacagcaatgagcaagtaaatttggatttttccctctctccaccctccaaacagtgcattaggcctatattttcagaatcattaaagaaaaagggtttgtgacctaaatactaagaattagtcatggacacagtagaaattcaaaagataattgccagtcttctatttcatactaattgttctcagattgccaagtgatttatcataagaattaaacttacatgccaaattttgttctgtccctagaaatatctccatgacaacaaaaagcaactcctaattcttgtaagcattgcttcgggagtattttgaggattttagtggttactcaattatttaggattctggcaatgagagaaagggagggattaatgatagaaaaagtattcttggcatttccttacagtggatgctcctgcagagaaaaggctaatgatcaacggaaagggtatttgcatctgtggtaaggtctctgctcaacactataaagactaagattcgcccccctctttcctttgtctcccttccttctcctgcggtctgtccacttttcatagcggacagcacccattctagtccagcagctttttcatgtgggccttcagtactcacttaaacagagaggccttcgccttaggcacacttaactcctgccgccaaggttactgaaacaaggagtcactggcaaggaaatgcattgtgaaagctgttctagcttcaactccccagtgctctttgactttatattggtactcactccagggctccgagagccaagcagctgggtgtttaagaaggaatcaaatactcagatttgggcattaaataaagtcactgggaaacctgactctttcactctccagctcaattctccctctgattttattgagagtaaaagcagcatctatcttccagaataactgtgacctcttcttgaagcactgagcatagtgtctggctcggttacctatgatgaaagtatctatctgtatggtgtctcccgctgaaaaatcatgagaaggcaaaaaacaaatcaacccacccaagcccagggatgcaacgagcttctttttaaaaacaaaaggaagggttaatcattcctaggaagcacatataatcagatatgtgataaagtcagagataacagtctagtaattaagaagggattgcttattatagattcgagaaattctaaaccgagcaagaaggttatatatagaattgccataaggctcagcaaccagtcctgacatatcacgtgacagcagtctaaggaaaaggaaacatagcctttcagagggttctgggagatgatcactgtcatgtaataggtctgaggagatgagaagaaaccagaaagacaggtgcagcatgcaaatatgcaagagttgatccataatcatcaaagaggtgaaagtcacagaaaactgagtattaagataagctgatatgtcttagtttgggttttattactgcaacgaaacaccatgaccaaaaagcaagcaggggtgggaagggtttatttagcttttacacttccatatctgttcatcatctaaggaagtcaggacaggaactcaaatagggcaggaacctggaggctttagctgatggagaggccatggaggaatgctgcttattggcttgcttcccatgacttgctcagcctgctttcttatagaagcccaggaggagaaccacccacaatgggtgtggccctctcccctcagtaactaattaaagaggtgtcttacagccagattttatggaaacgttttctcggtttagtttctctacttttagataattctagtttgtgttgtcaagttgacctaagactagccagcatactgatgtttgtcttggttttgacttgtgcatgagaaaggatttgttttttattattattattattactattaattattattactatggattttgttttgggttttttgttcttttttgcttgtttatttgtttgtttggttagtgggttgattgatttttgggggtttgtttgtttgtttggctgggtttttttggttttctagatctttattttcaaagtgaagtcgtgggctggagaacgacagagaatgggaggagctaagcaccagaagaggtttaagattgcaaaactgaatagctgaaatccaggtgctgtgctacaggggtttgggatcttcagcatctggtaggggagtaggccaagaaaggaggttggggactagaaattaaactcttcttcattttgcccacaaaggtcactattgggccctaaatataagaaataacagtaagttccatcctgcccacatgacccttgaaccagtatttaacttctgtgtaaatataaccccctgattaatggaggtgttttgaaagtgttgactgtgcggaggagaagcaagctgtcataatgttaaacctttacggctcagtgagcacttgcttagttttttctattaacagctcatcccatgagaacaaagtaagcactgggaaatcttcctaaattgtttcaggctacttgacttctttattgtgttgaagaagaaaacgaaatgaccattttccccagaatatgttcattttgtgtgtatttgaggccaaagcacttaatctccacttctgttttgtgaatgagaaaactctggccaagggagtggtttggttttgttctttttgtttgtttgtttgtttgtttgtttgtttgtttgtttgtattctaatctcagggtccccatcattgtccagaggtttcatataacaaaccagtgcattttgaaattacaacttataaaagtttcttggaagtgtcaggcagtttctcagtagatctgaagcccagtgctgaatcaacctcttactccacactccctgtgtgcaaactgatgacctacttaagagaccctctgagcatgcccaaaccctcctaaaatctgcaatcagctaatataacagttctgatctagtctcctcagttgatctgtctaaatttccactgtcacttgattctagaaacaggaagggggaattgaattgctggagaatatccctaatgccaaatacctggaagcgagcatatcaccatttatctgaacacatccttcaggcattgttaaagccccaggccttatttttaaagccaggacaaaaggtagtttatttgtaataagttaaaacctacttttattccttttcttttattggacattttctatatttacattttaaatgttatcccctttcccagtttctcctccggaaaccccctattccatcccccttacccctgcttctatgagcgtgctcacccacccacctactcccacctcccctccttcttattcccctatactggggcatcaagccttcataggaccaagggcctctcctctcactgatgtcccacaaggccatgctctgctacatattcggctggagccatgggtccctccatgtgtactccttggttggtgatttagttcctggtagctatgggggtaatgattggttgatgttcttcctatggggttgcaaaccccttctgctccttcaatcctttctctaactcctcaattggggacccggcgctcagtccaatggttggatgcaagcatccgcctctgtatttgtcaggctctggcagggcctctcaggagacagctatatcaggctcctgtcagcaagcacttcttaacatccacaatattgtctgggtttggtgactgtatatcggatggatccccaggtttactttgtaaaagtaatagtatatcatgagacagtggtgtgtgtgtgtgtgtgtgtgtgtgtgtaacattcagttcaaatagtcagagtctattttgacctcagaagatccataaatacagtttaagagtagcaaagctggagtcagccccaggtttccagactccctcatgctctacatttggagaaactgccccatggggagggttaaaaggacagattaagccaggtgtggtggcgcacgcctttaatcccagcactcgggaggcagaggcaggtagatttctgagtttgaggccagcctggtctacaaagtgagtgccaggacagccagggctatgcagagaaaccccgtctcggaaaaaaaaaggcagattagagaataatccgggaatgatggagcccatgtggtgtcttcctcctgggagagttttggatccttcttccccacgcacttgtaaggatcggtctgaatgtgctgcctgattgattggaagatctcttcccctagctttgctgaggccataggcaaaacatgagggtctggacaaattggcttcaaggcaggagatgcaagatgttgcgttggtttctaacaggatgcactgtgggtcttcagttggaacagtagtgcactcttcctgtgtttgtaataagtctattggaatgagggtggtttcttctgctcctcaggtggtgctctctcgaacagcacacctcactcctcatgtgaacttcctcctggactcccatcctgtatctccagaagttattgttgagcatccatcaaatcaaaatggctatacattggttgtcacaggaaagaaggtaaggcctgctttcatgggaatttccacggatgaggttgttcttggatggataatgtgtggtggtgtttacattccccatctctgagacttagactcatgcctcctccatttagttctttctggagacttgaagagagcttctgaagtagaattatctactagtcaaagagcactaggcctgaggtggccttctttagaatgtgcatggctcctcaggcctgtttctcagtaaaacaaacaaacaaacagggatatgaattacaatcctagcagcagaaccccagagcaagcagatgataaatcctggagacacacactggaatgtgacaccagcctgtaattcctttcgggggggggggggggagctcacagacctgtgtcagccttccaaggagcgggcatctcaggtgcacactatacctgccagtgttaccgttttatcatgtgtgtgccaagggtagaaggaggagtttggcattttaaagatcacttaaagccatcgttttggaatttttcacatagatgctactcaattagatgccgtgaactgatactcatacgagacttttacaagctcagtttttcaaaacccttctagaagccctttctttctcttctctttgcagatcaccaagattccattgaatggcctgggctgtggacatttccaatcctgcagtcagtgcctctctgccccttactttatacagtgtggctggtgccacaatcaatgtgtgcgttttgatgaatgccccagcggtacatggactcaagagatctgtctgccggcggtttataaggtaggaatacctgccatctagtatgagtattttttggtaaacgcaaattccaataatgaaaaagaatgcaaaaatcaatgtattcatctacgtgggggacatcagcccaagtcgcccctcccctctgtcttagctttgtctttaagatagcatttaagacaccctctcattctgcatctgaagtgcttgcttcatgctccctaggtcctctctagcgtgcttgctctcccttaggtccatgtgtgtaactcggtgaggtcagagatgaccagtactgctccccagttcagatctattccctctggagtcacccacactcattccgcactgcctgctctagactgggtgccccaactgaagcttccagctccacagagataggtgtcacactcatggcgtatgtggatcccccaagctgagccatgtggactgatgagcctcaacataaaggttggtttccaggttcatctgtgggtacctttaactctaatctcaatgtccttgatcacgaaatgatgacacagagaatagttatactggcatctacacttcataacgtatggctttattcactctgaaaatacttactgatcgtacggcaagacatgcggcctgctgttgaagaacctaactcctggcagagatggcaaccttggcaatgcagccatactgcatacaaagtggtgcttcatttctataaagtttggtttgacactatgaaatctgaggtcgtttcttaaaacgccttggtccccgcgtattttgcttgaaaaagattttccaagtgaagacccagtgttaagttttctgtctacatgtagaatacttttgaaaacagtacctgtgaaagattcaagttaaagggccgggtcacctggtgcactccaaggagacaaagtagcagagtagaaaccagactggagtgcatggctgcttccatttagttacggtttagaggaagatttgcagtgggtaactgggctttcgggaaaatcattttctgctaggtgtgacacagttgccaagccttggcttggtcagtgacagaatgaactgcaagcagtaggaaagtagctccaggtctgtagcatgttgttcagtcttcttctaaaactcacatgcaactgagtactttattaaacaaacagccttggcaggcagtttcagatgccagaaacttgtactctttactgtctgcgacaactatactgagtgtgtgtgtgagtgtgtgagtgagagtgtgtgtgtgtgtgtgtgtgtgtgtatgagtgtgcgcgagtgcacaggttcacacaattaaaccacaacggtttcttttaaaaactacccacattactgtttacaaaatcaggctggtaaactgactagaaggagcacatcatcttgacccttgtgcctctctttattaatcatcagagtcttgttaaaatagctgacaacagagcaaatagcttagagttttccagagcaacgtagttttgcatacaagccttcctcttctctcatctttcaaaagtccagccatctgcagttggtgacttttaaaggtttcagtgtatcatgcacacatcgatgaggtgtaggttttatggcagaagaaaagtagcaaccgcacagctgagtctacaaacccacacacccactcccctctgtccatagctgttaggaagatttcatgccatactagaccgtgacattgggcattcttactgaaaaaaaaaaaaaggataaattgtccctctttctttttctgccttcaactctacatgcacaaattcagccaatgtatagaatttcactttctgatacatactgctcaaggtacatgctattcagtagctgagctcctttgccgtttcagatatgagtgatttcgggattttaaacccaatacattgtttcaaatgtgtcctctgacctcctacttcaagagcaatgaggaatgttcagaaaaggaggcgtattttcacagtatagtctgaatgtatcggggtgggatcatcttcatacagataatcttctgaagaccgtctcagagacacaattgaactgcatcattatcagaatcccagacacagaacaacagcagaccaggcaggacattgccagcagcatatttgtgactttatttttcctgttaaatcagagagtggcttcactggtaaatgttaatagttgattttttttatgctttctcgtattttatttttatggggtgcactaacattatcctaacatcttgatggaatgagcccagcagtaatgtgatctttcacctgtgaaaggataggaactactttgtggtggtatcctccccagccagacaggtgggggacccggcttctgtctgtggctcagtgcaggacactcatttcctgcctggagaatttctctgcacttcaggataactccgagtttgccagcccattgttggggctatacaagggtgtgtggtctacaacagcttccttccttttcccctggaagagggacagttccttcataagctactgggacagcattcagctcagagaatgctaaacagagcgaacctttctaactcagggcaggggcagggaggggggtagtgcaggttttatagccacttgtcacagttgttacttgtcactagtagtcacagctactagacaatgctgtctttctcagtgattgccaactctctttgccatttcattggaagcagtgatgacgtgtgctgagtgacaggcttcagttctgacatggaacaggggaagggctggaggcaggagctggcccacattgacttgggcagctgttttggaaggggggacctccttacagtgagcagcagctgggcatcagccttggcctgaagagtcctgaggagtgattgtctcttctgtcctgctggtctgccaatatcataataaacagattttccccctagcagttcgcatttgactagacatagatgaggtgagttttcatgaaaggcacaactgtgtaatggatttttatgggtaaaaaggcgattataaaagcattaagctgagactttagaggggcttggcaacaagggtgagttaagacatcggtttgtaattatttgcttaggaaggatgggaatgtttgcaaatttgagttctcctgaaagttcttctttcctgtaagagtggtgcaggccaggcttttagtaagtacctcagctggttctgagttgccctgagctccacacttctttttcccaccattgtactttacagtacaatttacaatatgttcccccccaaaagagcatttcctctctcaattgtcacacggctccctgggaggagcttatttttaacttggaaatgtgttttgcctaaataattttagcctcggaacagtcttcaaaaatgcctcgtgttatggtatgtgatggctgccactgtgttagagtaactccgggggtcacttttaacacaccgaaatgagcctattatccactgaggataaacatctctcattttcaaaatgagagaaaataatgtcaataagtagaattagaaaaattactgcaatactgatttgaggatctctcagtttagatttttgccagtagaaatagcatatggtgggctggagagatggctcagcggtgaagaacaccagctgctcttccagaggtcctgagttcagttcccagcaaccacatggtagcttacagttatctatagtgagttctgatgccctcttcttgcatacaggtatacatgcagatagagcactcatatacagagagtaaataaatctttaaaaaggatagtgtgttgtttgtactaaatattacataatttcatgtaggttctggatcaaagtttcaccatattttaaaagcaactaaaattctaattaagaattacaaattggtagacattaattactttattctgagactcggagagatgctcaacagagcccctgcgtttagcgcccagtacccacgttacagctgtaatgccaggatcgggggagcaaatgccctcttccagcttccatagtcagtgtgttcacatgcacaaacccacacacaggaacacacgcatgtgaatttttcagaataaaaataaacattaaaaagtagtacatagtttgtttggcttccacactatgaaagataatcatattctgttgggtttaccgttgtaggtgttccccaccagcgcgccccttgaaggaggaacagtgttgaccatatgtggctgggactttggattcaggaagaataataaatttgatttaaggaaaaccaaagttctgcttggcaacgagagctgtaccttgaccttaagcgagagcacgacaaatacgtaaggagcatggtaactttgctgggctggccttggaagctaggctggattctttaacttggttttctaaaaaagagaagaacaattgttcaacatgctcatccaggaattcacaagggtcttgacctgtcatagcatttgaagatgtgtttggttttcttcttgtaatcttactttattaacagacaaggagaaagacaaaggtgacatggcttagaacaattcaacatccacgagttgtttttagacttgttcacttgatttaatctttatacggagttagagtttagtattttcatttattactgtggcttagagtgtttggcaagcatctatgggtgcagttgcacatgttgtattgcgtgtgaaagtcaaaagacaacttcagggattcggttacccccttccaaagtaggttccagggctcaaattcagaccattagtcatgtgtggtaactgctcttccatcctgctaggccagcatctaggagatttgaaactactaaagtaaaaactctgcagaaattgcctgttcaatatgaaagaatggacctttcccttcagacttcaaacactgccccaaaggtctctcatgaacatcaataaacagctgtctgtctgtcctctgttcatgattcacctgctagtccttggaacaatggtgacgccatcaatcgaatcgaacagttttaagactttttagatgaacttattttcaggtcatattcattggtaccgtgccatctgggcatcccccaaatcttcggaggagtcagttccattcttgcctaacattaaaagagctggggtacagcctacctgagctaagccagagaccagagctgctgctctctgatcaagaccttattctcctatattcttcatatcccttctacaatccctagatgccacagtaaccaggtagcccagagattatttgttatagtgcaggagcaacaaccaaagttttaacagttgaatcattgtggttgagtctgttctataaagtaaatatatctagccgggcgtggtggcgcatgcctttaatctcagcactcaggaggcagaggcaggcagatttctgagttcgaggccagcctggtctacaaagtgagttccaagacagccagggctatacagagaaaccctgtctcaaaaaaaaaaaaaaaaaaagtaaatatatctaatatagatttcattcagagacatcatagaagaccttaatatagtaaccaaaaccagttaatatcaagcttgctaggccaaagacaaaagcaagttcactctagaaacattccttgttctctcaaactcttaattattacgaagtgaattaagatctataaagaaaaagacaattcattaactctttttagaagtaacttatttaaaaaacaaattatatttaaactatatatacatatatatacatatatacatatatatatatataatatatacatatatatatatatatatatatataaaactatataagattactgataaaaatgctaccattggtagctaaggagatgctgtggttgctaatgtgcttgtcaatcaagtataaggaccgaagttcaataccccacacccaaattaaaggttgagtgtggtgatgctccttagtaatctagcactggggaggcagatgcgggaagacccctggagctttctggccagccactctagcctaatcagcgacctccaggtcccagagagagagctcatctcaaaaccaagtagatagcccctgagaaataacacccaaggttggtttctggcttctatatgcatacttgtgcccccaacatgacacagccataataattctatggaagaaaactgttacagttgcattagcctttaagtggtttaaataaatttatgacaacaacagtcatagaaatagagttgttggcataaactgataaagagctggcttattcatagctggaatactgattgcttcataggctgctgacatagcagccatgatgttacatgtaccaagcaaccaagcgcataactttacaggttaggttagcatacacttcttagctggtgagtttgcatgggtgacatgaagcttcctacaacagtcgatataaagtttggcataagtaagtattcgaaaaatagaattacgtgatgtttcagccttcatgcttccatgaaactgagcttgctatttggagtcatgagctcacaatttggggtttaatatcccatcacaacaagcagccaaaccagaaaatcagaaaatgcctgtggatttgaaacatattaagctctgccttttttttttcaggttgaaatgcacagttggtcccgcgatgagtgagcacttcaatgtgtctgtaattatctcaaacagtcgagagacgacgcaatacagtgcattctcctatgtagtaagttcaagcagggcttttcttcatgacctaggacatttggcttttctgtcatctgcttaaaggatgcaagtaaccagtccctctttggttttgctgcccattcaggatcctgtaataacaagcatttctccgaggtacggccctcaggctggaggcaccttactcactcttactgggaaatacctcaacagtggcaattctagacacatttcaattggagggaaaacatgtactttaaaaaggtattgtaaatattgttgtttattaatatctgtgtttaatacttgcccagccaagctcttttgcgtttgtgcggagcacaatatagatgttttccgtgattctctcccactaatgattctctctgtccaaaatccatctgcttccttttgctaatttttctatccttccctttttactgattaatccccattctgagttttgacttgctacccactcctttattttggtgagtcttatctgagctatacggtgaacttaaagctctggtcattggtagtacatcaaaatgagcatttctatcaagattcaaatataaagaagatatgtggtgggacaaaatgggtgaggttaggtttgaaaggtagttctgtttctccttcttagagttgaaggagctaagtttattcaagtaccaaatgtactttgaagcttgcttgaaccaccaaatgttttgaagtcacggatggcctttcaacaaggctaagcgtgggatctagttggatgtaaacaagctacagtggggagagcttttctcctaggccacctctggaaattccactgagttacatttttttgacttacagatgtaattttggaatatgtatatcactaataactaatatctgctctttattcttttccttcctttctttctggtcttttgtgtctgtttgctgctcagtgtatcagatagtattcttgaatgctacaccccagcccaaactacctctgatgagtttcctgtgaaattgaagattgacttggctaaccgagagaccagcagcttcagttaccgggaagaccccgttgtctatgaaatccacccgaccaaatcttttattaggtaagtaaaagcttctggtgggtagaagaaaagcaaaagcagaaggatcatttggctgaggaacacccaagggctatcacatttttaatccctcatttatttaaacgctgctgtgtttcttttgaaggcacctttccaatttagtgggaaattgtattccagtccttgggacagtctgactttatcgatgttacttcctgtcaagagcagttcttcctattatacatttcctgttatgctttcaacacctagataaaaacagttcaacctggtgccatggtatagatgcatctatgtcatatatagtgtctccatctgtgtcagttccatactgagctgcaggtcgcctttcccctctcctcttgttgcattttgcgatccctttacacatacgtatttcttccctgcaccagactctgttttagtcagcatctatagagcctctctcccacctttgctcgttctatcagtccaccaacaatagtcactagcatttttcttctccacatttagtcggtaaaaattcagccatttctacagctaatgaaatgtaattttctttaaatattctcgaatttccaaagaagagttaaccctgaactctcattcaatcctagcgagtcctctaacatcataagagtatagtaaggataaagctgagtgtataagactgaacctctgcacagctggtaggaacgctctgaatattcctgttttctattttgttttaccagtggtggaagcacaataacgggtattgggaagaccctgaactcggttagcctcccaaagctggtaatagatgtgcatgaagtgggtgtgaactacacagtggtaagtcttagagtggtcattctgcctatgctgccaagcttttagggcacaaggacattttggctttgtctagtaacctgcagcagaggtcaaatggtacttttattcagtggtagaatcttggcctgacatggtaaacatacatacatatacacacatgtttatacaccaatgaagcagttttcagactttttgatatatatacaaacttgtcacaagcaaagggtcatgtgggaaaaggactcacaactgagaaagtgcctcaatcagactgccctgcaggcaagtctctggggccattttttattattattgatgttggaaggaccagtccactatgagttctaggtcctctagggagggatagcaaaggtagtttagcatgagcctggagactaagccagtgtacagaattcctctatggtcttccctgcagttcctctttccatactccttccttgggttcctgtcctgacgttcctcggtgatggagtgtggttgggttcctgtcctgaggttcctcggtgatggagtgtggttgggttcctgtcctgaggttcctcggtgatggagtgtggttgggttcctgtcctgaggttcctcggtgatggagtgtggtttgagagttgtgagatgagttagaccctcttctcccacgttgatcttgaccctggagctttgtcacagcagtgcaaacctaatcagcacaccccgcaaagagtttctcaagtgaaagaaataggatagacatttttatgaatgaggtgcataaatactatttttaatcataattatgtatttttcttttctttaaacctattctacatgatgccaataagccagataggactaaattatgcacacaaaagcattatatgtatagatattatagatagatgtatttcttgtaacacatacataatcaaagacgattttgactaatgaaattaagaaatgttcaacaattacacaccccttgattaaagtaataatataaagcacagcacccgctccacttgctgtgtccctcaaactatggatcaaaaccttttccttgcacttccttacctcggtccttgtctctttattatcatacaggggatgataataaaatactattatcaagtatttcaatggtatttttcatttctctacatttttttatttgaaagcacaaccataatttaaccttaacagagatggatccatctgtagctgtaacagttttacattaggcctagcatgggagtcagtaataacagcatctggaagatggagacagaaggatcaagagtgtagggttggcctcctccacctagcaagttccagtccagactagggctaaatagaccatttcaaaaacaaaacgaaacaaacaaacaccaataatctaagtctaaacctcagaatggtgaatgtcttgttatagaatttttctgctgtgaaataccacacatcagttggacacatgcactcaacctgaagtaaaggctctaagttcgattgggcaagtggtagattgaattatagcactttctttgaaattcccccatccaatatttcacaaggactaaagccactctggtccttaattacagaaagcaatttgggactaaaaatgtcaagccgaatcaccaaacactaaggtcatctcaaacgagattcctcttgaccctctcagtcatccacattgcatcacctctaacaagtgttattagattcttatcatatttccaagagaagatgctccagggagtcacagcatgaagttaaggaccttaaagccaatccccatacatggccacaaacaaagttagaataccaccgttattaatttaggagccgtcacttctccacaaccaagatacgattttactttaaccaaataaaaatagcagtaaccctctttggtgttggcatgtgactttttaaagttgggtctaagaaatgattcatttactgaagaccaagcctccattattacgataatggctgagcttgctttcatctcccttacccaaagatgacatattaaatgcttgcttgaagccttcagtgtcagatataaaagaggcataccctagaaaagactcaaaaagtggtagaagatttttaaaaagtcctaatggtctatacatctggaagtacaaactcctcttgtttgagttaaaaatgcagcatactgtaactctatgcattagtactggactggagtgagaaatttaagggattttctactatttactttttcattattccttaatttactgtcatttctaaactcttccccattccctgtggcttatagagtttaaagttgattaagatgaattgaaagcatttattatttaacaaataaaaactcatggtctgatccaaccacaatattttttttaattccagtaaactcagtgcattaaaatgtagaaataattaatttaacacaatgtagattaatgtgttaatgtgcgctatgtcccaattattttgtggttcctaggttcttattattatacagagaattattatggtagcagtgaaatctttcatttccgctttacaagatcataggaataaatagctctcagtgctatgacattatatttgatataaaactaaatattgcaatatattttatccatatagtatctctgttttatctgattccaacatacatttttaaatacagtctgttttaacattattaagaagaaaatatcacacagtaaattctgtgctttttatgtatatcctgaggccttttgctattgtgagcataagtaattgttttatctccaactatacttgtcaaagaaaaggaaatctaagggatgttgttgcctgtttgtcttttccttgggggagaaacacagccctttgactttaaatataccactttgtgtggctggttttagtcaagtacaatcaagaggaaactgcattttccaaaattccataaatcagaatttcaaagaggaagatttgaaatgagagatgaaaggatataaaataataacagcagagcctttgttgcacggacagcattatttagaggtgctacagagccaaacagaagcaaggccaagagccgtgatgatagtgaacattgatgtttaatgccttggtaactccctactccatccgttagatgtgtgaccagactgaatgaagtatgttttccaagttcaatgtctttgtctaaaaatggagccgggcaggtggacactgagttcgaaaccactccagtagacaaagtgagttccaagacagcaagctccagaacaacaaggactatacaatgaaaccctgtccccaccccttaaaaaacagacaacaggacaccttcctgtaggaatatagtgaccattagatgagactgactttatcttttggaactaacccttaccagtaaacacactaatagagtgcatggacatcgtcagctgtggtgctaaccacatggaactttctaagttataaaccatatcatgaaacatctttaaatcttatttgctaggtgagggaactgagtttctgtgtgatgcctttacctcagttcttaaaacttaaaagtgggatatgaatcaaaagtttctaagttctcaaggtccagcccctcttggcccatagctgctttacaaaatgaggaagccgttccaaccaggaaagtgccttgttgatctaaggaaaatcacatgatggagggaagagccaactgccactacatcatcgtaacttattcgcagcatgtgaagctcggttgtttggaaatttttccctccattgtgtttcccaaaaatgtgttcctcgacgttaggaagttaaatgcagaacatgtgtaacaactgatgtgttttgagttgattctgtagttatgaaatagctaagttgtatagatgctgtccgtgtcctgctgacggtgggaactctgtcttctgtaggcatgtcagcatcgctcaaattcagagatcatctgctgcactactccttcactgaaacagctgggcctgcaactccccctgaagaccaaagccttcttcctgttagacgggattctttccaaacactttgatctcacttatgtgcataatcctgtgtttgagccttttgaaaagccagtaatgatctcaatgggcaatgaaaatgtagtggaaattaaggtaagagttgcttaaattactctcttaaatgaacttgaactgctctgttggcttcgcagccatgtgaatagagtcattgtatgtgctcagtgtatcctattctacatcagcaaatatcaaagctctgaaaacaaatctctttggcagaaactaaaagataagggtagttatccattgctttctaatgaagcatttaagacccccttccttgtgtatatattaagaagtaacaaatgctgagcataaatctatcaaacaggctcccgccaatgctgtcatgatgatgtgatggcatgcatgccctcgtgggcttcaccgacacatgcttattgagagacaaacagtaagagctgtgatgatagatgcatttgtgcagtttcgtgtttccttgtagtttgtgaagttctgtatctatgtgtagccagttgcgggggaggggcgggcatgccatggcaaatatttggagacaggaggtcaatttttcagagttagtttttcttcttgtaccttgtttctatgtctctctctatatattccttctctctccatatatacctatatatatagtataattatatattatggtatataatatataagaagtagtatatacatatactacttcttagagtatttcataggcatattttgttcatattcactcccctctcctccctgtaattcttcccagatacctgccctcccccttctcaattttatgtcctctttaaaaaaaataaaatgaaataacctaccaaatccaatttgcatctcccttactacattcatagacctgggccatccactggaatgtacttgtagttgacttaccagagaccacaccctttacaaaacaaaaatcagctgtcctccaaaattcccacacgtcgcagcaactccttagctcggggtggaagctcacgtacaggttctgtgcagacagctgtgtgttcctgaacgaacagttccgacgtgaactgtttggaatgaacaaccagcaagcacggcttcacgctgctcatccccaccctctgactcttacactcttcctatcctcaccacccttccccgcttccaagatatggtccctcaggcctggggaggaaagggtgatatggatgctccatgcctggcttagcactctgccagcactgattttctgcactttgaccaggtctgggtttatgttgtaaccaccgagcaatgcacaaagtcccctgacaaagtctgaaagctacactaatctacaagcacagagataggaatttagaagacagtttgattttatacctatttggcaaaataatctcccccatggaacctgtcagcttcccggccatgggttcttgaccacattacacagcaaggcagagtcttattgtttgtgccactccaggctagatggtccataagtttctaagcggttctcttacctctgcctccccgtcataggagtactgggattataggtgcacagcattcagttttggacatggtctttgggtattcaattcatcttatacccactgggccatttcataggtgtgcttaaatctaagctgatttataaatgggccaggattaccaccaccttgggaatgcattagcttctaaaacctacttaatacatggtaacggatcaccttcctgctgcagataaagatcactaagaaccaggcagaaacagtaaggactcagatcagctgtcttctgttctttgagtcattttcacttctgataataagaaagctagcaaaatgatcaagatttgagctttccgtagtccactgaaatagcaaactagacatccctcacaacctgttgtctgagacattgagaacgttttctcctgaaagaacatcgaatgcaaataagagcacacatgagcagcagagtagcccctgctcaggtgtcatgtgggtggcatgcgtcatcgccatccgagtgacacttccactgcaatagttctgctttttcagggagatcttttttgtctctgaaccaacccatgcgcacactcaccctcacacagtcactaacctcaccattgcattttatacaataattaagtaaacccagcatgaaattaaatggaagcctgcttcactgaacagcatgtttgccccaccaaagttctttcttctgcttctttaattagttttaaaagagaaagggttttatcacttctttcctttcccccccccaataaaactaatctagtgtgaccttttgctttcaacaataacagtttgctgtttgaaagattccatttgttttttcttgatgaaaacaaaacaaaacggtttgtgtgcaaatagttttatgccaccccaaacactatttctctgttcctgtgtctatgatggacagattagagataagaggttctttaaccacccttacaaacctggtatttgatggaaaagaaactcctctctgtaaactaagcagccgttattcaatgtcctacaaagttgttggaccaagaaaaacatgacttgacatcaccctaagtctgttaatagtatttccaacatggcccaagttccctagagatgggcacaaagcagtcacctttcttcgctatataaagttcactcattctctaacaatctatagcacttgtgtgtcacaaagctgtgctctagcagggacagaaaagtttagggtaattgttttaatgtcccgattcactcctttcccatacaccattttctgtaagtctaggaggaaatataagtggaaagtatgtcttattgactgatgctttctcaatttctaaaatccatcactttgaaccttctgcctctcttggacacccagtagtgtgtttttgtgaaaagaatttcttgtacttatcccactgccattcaaacaggagtgcaaagggtatttgccttccattagtgatagtgctatggtgctagagtgtgacttggttgtgatctctcatcgagcatgctcaagaccacaggcctaaccaataatactacaaagataaacctgttagacaaaaagcaagtgggagctggaaaggtgggtcagtggtgaaggctgtatactgctcttgcagaaaagctgagttaggaattgtctcccagcacccatgccaaacctcacagtcatctgtaacttcaactccagaaaacccattgcctcctgtggagtcagcttgtgcaccaagaaacatgcatgtgtgcataacaactaaagaagaggaggagggaggagccagaggggagtaggaggagactggtagttaggagccatagtgcctgcttggaaccccactacggggagctaggataggaagataagggattctaggccagcatgggctatctagtgaaacaatgtcagaaagcaaaggaagcaatatctatgggagaaattatgctatgaaatttgttgtttactgccaggaggtgttcacattcctcaaccaggtgtacctataagaatcccttatttaaagaggaccatgatagttttcagccccagttgtaggatctgcctcagcaactagttggcctggtgactgtctatgcaaaaggactggccaccatagctggtcatttttaatgatagatcaggaatcctatagatgatagaggtagttccagaccaccaagagcacttgtgaaaggtgttgtagagtaagcttctctttggtagtaacaccgtggggttcccatgaacaatagcactcatgtttatgaatcattttacagtaacacaaggtttttgctttatgttattcgatttaaatcttatgcagacctttgaggttagaaggtcagtaggtattgttccctattaacaagtaaataaacaagtttagaatgattaactcaattgtcttggggtcctctggggagcaatcagtggtactaagacttagatgcagctttcctgagtcccagttctgtgacattcacagtgtttctaattattcagtttcatttaatgaatataaaaatactttatagtagagaaatttttttatcatgtgacataggttgtgcacacttatttgagtgaaatagctctaaacatttttaagttttattttattttaagtgtgtgtgtctgtgtaggtatgtataggtgtaagtaggggtacctgtggagtccaaaagagggtggatcccatggagctagaactataggccatgttgtaagccccgtggatgatgggaactgaactcaggttctttagaagggtagtaaaggtcttaactgctgagccatctctctagccccactctaaactttcttcgaacatctaaaattcgatgagtctttgttttcccctagttgtcccacattgggtgacgagtagatttttgcatcagatagaatttgctaaactttgtgacttagtccctccttgaagcttagcccccctcctgtcaatcagcaatcacaaaataccaagagttttaccggagaaaatgcgatcattgtaattccgagttgccctgtgtgtctaaagaattgaagctctctctctctcacaacattttatttagaatcccgtatattgtcacttcaatgtctacttaataaatagttgataatcagtaatggaagctttaaaatcatttccaaggctcgataaagctacatttactttgaatacaaaacttaagctgcatccatttttgttcttcctgctttgataccagttccgcttagatagctagggccaccgggattactcttgccatatctatgccattctatctgatttcagcttataaagacatttcatcttcagtgttgttggtaacatatattctattagtcagtgctcatcatgtgttccttgatggttatgaatcaaaaagaattcagccttttagttgtttattcttctgattctccaaggcgatcataaggctgaacacatgagtcctggagaaggacgtgtattattgtcctcccttcccccacccttagctattatctaagcactcgaggcacatgttagggcttctcataaatcaagccctccggttctttaatctctttcctctgtcattcgctgaattccctccgatatgtgagtaagggcctgcgccctttctagacctaaccaacaagttgtcatttcaagccccaaagtgacccgtgagatttatgtgcttctctgtggaattaccctgtgcagctgacctagatcaatggcctgttcctaccgcctctggaagtacaataagggcagggtctgcctgtgttcatttctttagtggagccgtggaatataaagatgtgctttctttcagatactcctatccctagaatctcaggccaacctatcttgaaatccatgaggcactacaggaaaagcagttttggacaccctcaagagcttggaaaacaaagttgttaggagctgttccttgtccataagaaagacagtaataggttttgatagctctctcctctaagtaacagcctatttaataaattactactcattaagtcttgatatgaaaaaaatgtattcaggtttgcacttctttcccaagactaatgattgctttcttgaacaaaatgttgatgttttaacatttaacattcctggtgttaactcaagttaactatgccaagttgggtaatgtttaatagtcctcaagaaactacataattatttaaaataatgcaattgtgctctcaaaacctaatgaaggtcatacggcatcttctgggaatttcattgaaatgaatttatttatgtgcattgttcaactaagcagaatcaaaagaaattgctgaactcaaacagctaacggaatgtattgtcgagggagttccttggatcgctggagatgagacctgggctttggtattttccaaagtgttcagtgtggtgctaaaagtgaatcattgcaaacgacagtgttaagccaatcagcaggtttagctgctaagctcgaagctgtgttcttttttgccaaacgcccatacttcatgtgaagacagtaataagataattatgcgtgagagttttcaacgtaaggacacaaacaatatctccttcccttttctctaaaactgagcctgatggaaaatctcctcttatcattcctgcccagtgtcctgaaatgctcagactccctttcagccagctcaactcccatgaagctgaacaccataaaaaatcagatttcttggaaaacagcgtctgcatttgttgtattcttggcttccttctagaactgccagccttcctactgacctgtgaagtgttaatgacctttcatttctgttttctttttcccttccagggaaacaatattgaccctgaagcagttaaaggtgaagtgttaaaagttggaaatcagagctgcgagagtctccactggcactctggagctgtgttgtgtacagtccccagtgacctgctcaaactgaacagcgagctaaatatagaggtggggttcccgcaagcctctcatgatgtaaatagggatgccgttgtaattatgtcaccaggaggcttaaaataaatcattaaagctcatctgtatgttggctctagctcatcagctcagcctcagttcctagctgtgatttgagaaatgtctaggtttttaatcacactgtctctttcccctgggtcaaaagtatgattctcaaaagtcatgccacactcttgccaaaacatgctgccgttctccgaaggaacagagcacatgcaagactgtcccttctccctctttttaccaggctaaggggccttcccacttcagtggtcacaatgcatagaactctataaataaaaagaatcgtatccacttggcagagtaaagtggaaacccagttgatgttgttttttttttttaatcaatctttttgttatcatttttcttaagttttatttatttattatttatatgagtacactgtagctgtcttcagacacaccagagaggggcatcagattccattccagatggttgtgagccaccaccacgtggttgccgggaattgaactcaggacctctggaagggtagtcactgctcttaaccactgagccacctctccaccccgcccccaattgttctgtattaccttctttcgcatccacaactaagtcagatgacccagaagaagaatttcttttattatttttaacagtttatttttgatatagcgcataaatcatataatttgccactcggaatgtacagttcaaggggcttggaacatttaaattgtaaatttctttaagttgcggtaacacagccctgtaacctctaatctacttcttttctttatgaatttgctgacctgggtatttcatctaagtcaaatcatacaatatttgtcttttggcatcttgctcatttgacttggcaaatatttttgtggttcattctagtttatggctgaatgatatcttatttcatgcatatcatatattgcttactctagaaatggtagctttgaaggattcctgaaatattctggaaacgttaagaaatggaaatatacaaaagaattacaaaatctgagaccgaatgtagaaatttcagaatgaccatcaaagttaaaaatcagaaagcacttgagctgggaggaaccacagatttcttctatatatcaaagtagaaatagactatgagactttattatcctatatggtctcccctcttctgagaaattttttctgctatgcattccaccctcccaaatggggcatcagtttcatttattcatacttcaatggtatcataatacttgatcgatccatttcccttcattattctttagttcctcaagatcaaagaatatttttgtttatctaaatcatgctttaggtaatcaatatttcctaattatctggacattgaggcagaatcaaggaaattctcacttactctgaaggctgtaatgcaccttctagaataatggccaccagggtgctaattggaatccagagaaacttggtcccccatagatagtatattttatatcaacctcggacaaaatctgactttccttcttatatatttccagtggaagcaagcagtctcttcaactgttcttggaaaagtgatcgttcaaccggatcagaattttgcaggattgatcattggtgcggtctcaatatcagtagtagttttgttattatccgggctcttcctgtggatgagaaagagaaagcataaaggtgcatattttgtttattgtctaagaagctaccatagtgatttagtgattacattcaacactgtcatggagatatatgggttgtctaataagcattcataaaaggctgtgagttctgggcactgggtcaaagtctcctgggacctgtgacagcaaagtctttaacaagctctctctttctctctgttttaagatctgggcagtgaattagttcgctatgacgcaagagtacacactcctcatttggataggcttgtaagtgcccgaagtgtaagtccaactacagagatggtttcaaatgagtctgtagactacagagctacttttccagaaggtataattcagtttactatcctgagaaatatctatacatagacctctgtgagctgtggcattgttcttgctttttgctttttgtcctgatatttttatacaagtaggaaaaaaaaaggtgttgacctctgctaaacttgatgcagaattgcatggccttcactttaaaatcaaactcatgcaggtatcatattggaattttagcatctgcaagctctctgctcacgtacagacaggttcactttagaattatttgagcaaggtaacttacctcagccattctaagacctgagatgttctccttaacccttcatttagacttataaagtatttttatttcaatgtaattttaaagtgctatcttttgggggaaacttttgaattatgccattagtcatctttaaaacattctcaatgagcatatcttttgcctagcaccatctacaacttgaatatattttgagatgcatccaagaaaaacctccagcactgctattcatcaacagcatctgctttgcaaaacaccagaccgacaaatggtcaggttggccagggcatttcacattgttttacttaaacatgtcttacacaaagcaaaatgtctgtattgtaccagggccattatctttagaagttacaggacatgagtcaagtacaagcacttccctgttgaaatatctaccattggataaataaagtgagtcacagacagtgtggatactgagaagttagaagctgctcatccaagccagtacaccagcagtgagacactgaacattccaagtttctcaccgcttgttgcctgcccttcctgagatttgggttagttctccagagattaccgaatgccccacaggactccattcactgttagaaggaaacccagtcctttaagaatgtggacgaaccaagctcaatgcatgcttttaaacttgaggtataagtagtagttcataaccatctttaatagctctaacctggaattattgaggtttgcaactaactgctctttaccaagctttcctgggcatgggagataattgtctataaaatgcttatagcccaagaaagaagatctgagtttgtgtcaccagaacgtacataaaagtcacatgtcctgggcatggagggcacacatcatcagagtctgttggcagagcagctccagattcagttggagaaataaagtggagaatgactgaggaagacgccaagcattgacctctggcataagcacaatataaacacatacaagcacacacaccataacactttcttgatctttaaagagtgtgtgtgtgtatgtgtgtgtgtgtgtgtgtgtgtgtgtgtgtgtgtgtgtgtggtgtacgagatgaaaggtggattagataagtggtccccagtggcaacaacagataatattgtttacttgcaatcaaacaagaaactcagtacttaagaaagctgatgacgtcatgactatttctaactccacttaagcatgtttagtattttccacagtagctcttttggttaataatacttactcagccagacaataaatctcaaaaatacctccaggaaagttttggaagggcctttatagtcataataatctgtagctcaaaacaaacgaatgcagcctcccaagaagattctagaattctgaagaggtcttcacaaatggtagatgggtaaaggaaaaaggaagacttgttctctggctggcccttccatagcaaggagtcaaatgagggttttctaaccttgctcctttaccctcaccttcctttgcatctggagttcagagctgtaggttcttgggggctgaggaaaatcttttgtaagatacaaaacaaaggtctcctgaaggaaactcctcctgagcctccaatacacaaagaagccagttcagatcattcgtatgtaatcctgctgaaatgtcatagagaattctgagtccccacgggggaaaattattctcacagctatagaaagagttctgcagttgctactggctaggtttgggatgtgcactctctcattcttctcttaggatggcctccctttgcctttcttactttccctgcctgcaaggagcaggtggaaagcaagccaggagggagacatggggtttcctagccatgatgatacatgttaggcaagtgaggaatgtaaagcactaagaagtcctcaacacacacacacacacacacacacatacacacacacacacacacaaactgccagccagttgctgtgattctaatgtccagtcattgttgtgggtggtgttccagtgggaaatgcaaagcacctagtggcttctttgtctcatttaggtttaaaagcactcagtgccacagctccttaacttggcatgaaactgccatctccctacaaaagaaaccttgcttaagggtcactttggttgtaaagatgggctagtgggaaactgagccctgcccaaacatcctcaactgaacagtggtagggcacactaacacagatccaactgcctgctctaagaagccgtaacactctgtgaccccaccataatgtgggagcacttaccactactgtgcaagactcccaagcctgagaatgtcgcattagtcacttctaacaatatataagtgcaggttgacaatcatagcccaaaattttgaagtaaaaaaatagttgaaagctctgtggtgtgcgttgtggtgtgtgtgtgtgtgtgtgtgtgtgtgtgtgtgtgtgtgtgcctgtatgtgcatgtccttgtacctacatgtagagcccagagcaagatgtcagtagcctttgctatcattcttggccttgataccttatgacaggctctgtcactgaacctgatgctcaccttttttttgctaggctcactagaaactcttgggatccacctgtcttgtctccacaatgctttttctgtttatatgacaactgggggtttgaactcaagtcctcacgcttgctaagctagtgctgctacccagagaaccatctccccagcccttaagaactaggatactttgaagtgtcacgctgaaaagtttttatattttcgattttaaatttcagattgtgtgatcagggatgaatgaccaaccattaaagtccatgtcactgtttcaaactctgagacaattcaaaatctcaacagtctctggtcccaagcatttttgaaagggatattcaacttgtattgattgtatgtatttttctgtacatattcccttgtccaggagttcccatgacacttatcgtttccgttagtaagtcgtcatctcaaacggcatctattttttattttttatatctaaactgtttatttgcaggcctgggcaactgcgtaaccactttcactgcttccgagcctctgactcttttcctttttagcataatgcttgtgttaaccctttgggactcttcatacaatgcatcttgatcgtttttagccttactcttcccgctgactccctgtcctccccaccccatctcatgtcctctttttgcattttaataacttacgtaggtcaatatgtgctacccacagattcctgggtgtggggccatgtagtcgaacatggtgctcacatgggtcctcacacttaagggaaagtaacccttacccctagaagccatcacctgtccatactgcttctgattcttagaggaagattatgtcttaaaaggaacttcaggcgttgctttttggtattaataaaaagagaaataaatacccaaggaaaccaatcagacaaacaagagtccattgttaacactgctcacttaaaatggttttttttctactttataaaatgtttctctgtccaaacatgtgtgtgtgtgtgtgtgtgtgtgtgtgtgtgtgtgtgtgtgccttttcccgattcactgccatctttctccaaccattcctttgcaaagagtgttcccagcctagcatttcgttactgttaaaatccactattaatcccctttaccacccctgaggcacaccccaatgagtgaggtttcatggctgtatctatttgctttatcttgcagaccagtttcccaactcctctcagaatggagcatgcagacaagtgcaataccctctgacagacctgtcccctatcctgacaagtggagactctgatatatccagcccattactacaaaatactgttcacattgacctcagtgctctaaatccagagctggtccaagcagttcagcacgtagtgattggacccagcagcctgattgtgcatttcaatgaagtcataggaagaggtaagtatttccatcagttctctgttaagtacagttttccagtaagccatttatctcctgttttgcagattaggaatttagacaatgctgagggctcctgacagagcctgataacgagttttgtcctgcagaaatacagacatgaaaagtcatagtcatggagactgccctgtgcgtggaatcatttggatattatcacaggagagaagaccccatttctccctcatatttctcacagtaactacagtgtcttgggggaaaatcatgccagttttttcactcctttatctcttcaatcttactttatcctgagagctgtaacaaaatctagtctatagcggcttgtacactgctggacagcatcaggatacggggaatttatagccctcccctaatctaaggcaacatatatcatctccacaatgcactccaatttcttcacacacaaaaaatgactatttgcaagaagctagccagagcatcgataacttcaaacattaacactattggaggaaatatttgtcaggaagagaaaccaaccagaagccatgagataaaatctactgtaaaatccttttaaacgtagtggcttcgggttgggctactcctattttaaatgctctaaagaggttgcataggcatttgccagggtggtgcaggagaaagtgacagggtggcggtacgtgaacactggtccttctgagcatccagagctgagtatctacgttgtttcttcctgaaaaggggcctctgtgcacgagtgtatgattgggttatattgctggcctgtaactccagtaagtggtccagtattggagatatagtctcactggttatattctcactgttgtattttataaaacagcagtgtaatggagagggagggagcatctcggtgggcctgtgcctagacgtcaccccgaacaaccacgccaagtgacagcaggcctcacataaaaggaagttttaatattgggcaaaagccttccaggaacagatggggacagagagagagagagagagagagagagagagacctggggtgtggggtgcgagcattcctcttatatatcagccttatacatggctataggtgatgatgtaagctgttgctagatcctacgtccctgggaggagcctagtggaattctctgtaagccaatactcactctacgtgttgtaaaatcaggacttttttttaatgaaaggtgataacatggtgataatttctcccaagtcacagtcattaagaaactatcagtattaactactgtttgtttatatgcccccccacacacacacacacatggaaaattgtgaccactcatgagcatggcttttattatattcatctttgtgtaagtcacagaggatagccccatacctcatatagtaagcactcaggacagcttgccgaagtccatgaattaattaaatgacttacacagccgtcagacacttggcacctctgggagaaattactgccgcctctgttgagaggctgctattggggaaatgagtggttaaagtcagagggaaatgtatgaagtgagtcactgggaatctgctccatttgggcaactgtcttttgatccctgccaaagtggcttacatattaaccagtgactaacaggggaaaccctaactctataatacattatttataatcagttactagactatagaggacatattttacacgtattcaagtggataaaattatttacatgttttctttaatattattttatccttaatataatatatttcctttcatgcagaagctattattgtgtccagtgataccccaatgacttgatactttggtatattaacgtttaaaagaagccatattactacaatttgcaccatatattaaataatcacattgcttatagcatggagagaagtgtaatgcatctatatttatatctcacacttgtaccacacagagtgatgttgttaatcaaagtgtcataagcaatgtaccattttttttgtcttacagaaaaaaaggcttaataaataattattgcataaagtcagtttaactctagcaagttctctttttcaatagggcattttggctgtgtctatcatgggactttgctggacaatgacggaaagaaaattcactgtgctgtgaaatccttaaatagtaagttgcatttactacggaagggaacatttgtggtttgcaaataatgaagtgttcatttgcactttcccttgtggaaaaaaggcatctgctactgaaattgtggaattaatcctgaaaatgtgtttagtctaaacacttattgagatagtccctctgaaattatcctacggagaactaataagtaaggcaggaggggcggtgagtctcttagatgaactgagtaccatttagccacgttcaacttataatatttgttttgcaaatgacatttatggaaactattgaaagcgttggcacataccatagtaatgactcattttgcccagagacactactacactacactttttaaccagcactccattttagaaaaaaacgataactgaagtaatacgagcaggagagaaatgtactggcagaggactgacaaatcattaaggatggtagccctcacttatccacggttaggcaatgaggtgtcccacagaaatacgtttcctaaggagatgcaacgtgtccccttttaatgcaatacttcttaaaaatttagccattacatagaaaactcttaagatcaaatgctcattctctttaaagtccaaagtatgcttatgaacataaacttagtctttactgatgcagaggcacaactgtgacattgtacaagccagtgtactttgcacgtgagaggatccccggctccgcctctattgacagagctcacatatttgctttgctactttgtaattttataccttagaatttgaagccacctggaaaatgttagcaaagtacattatagatttgtattagatctaataagcttcgaaagtgcaaacggtaggcttccctccaaggcactctgataccagaactacttcagctctttcaaacatccatcaattctccatgatgagcatcattctatacgcttaattttgttggatacctgactacaaaaataattaaagggacagtctacgtggagttcagcagcaatctgtggtagattaagtataccgatcaataaactgacctcaaaggaaagcagtgttgccatttatactcagaacagccctaatcccaagccatttttctgtccttgtcctgtggttactgttgtcagtccacgttgacctccatcatcatccaggccttagaacacatttggttctcgggaacatcaaagagataagtcatgacatttatgtgaatgctgttaactctttgtgggtgtgccatcatgcccttggtaggtcgttctagaagtaattaggatatactacactaaccactagctcttctgggctcagtgagtaacatcaataagcataaggacccctgcactcacaaaaaaggccagcatgcccacaagtgtttatagccccagaactatggggattggaaccaggataactggggcttgctgacatgcagccttgatccaaattcagtgagagaccctggctcaaaagaatagtacaaaaaggaaatggatgtcattctcggacctttgtgtacacacacacacacacacacacacacacacacacacgaatacactgcatgaactcaaacgcatgtaacccacttagttgcagaggatggaactcactggtggagcatttacatatacaaggctcagtttaatcctcaatacagaaaggagttggggagctacctacatatgccgcatggtgactggtccacaacttctcctagatcagtaatcactgaaccatagcctactggctattttcatgggtgacattgtttgggccccaggcatttactgtccacactctcatggttcagcagcagagttaagtatttgcaacagcaccacatggcccataaagccgaacactaaccaactacaacagaacttgacagcctagaccctggacgctgcccggatggaacagtgtgcttccttggtttgtatctgtataagacaacctaggcttctgcgtgagaccagttgtttcctgaactctgttttacaaatgatgttgtcagtgatgacttgttggcactgcacagggtgacaccattgaggctcgagaaaacaatatcctacactacatcggattggtttgctgagtcctttgaactaaaaggcctctgtcaggcctcttctgactatctcttgtctctctcaccccaggcctgctttattcctgaaagtagaagtaggcctcaaaaattagaacttctccccaccagggcaaatcataaaaactagaacccttgttcccaaaagccaggcatagtcccttgaaatattattctgagcatcctcttcttgtttttgagctgcatggccacaaaatgttccctgacttacattgtctgccagccactcatgagaccctcattatagaaagggtcctacttacaccctggaagaagggacgatgtcccagagagagggacaatggccaaacagatgagctttgctgggttccccttcagtagtttccattcattaggtcacaggctttttgatcgagtcatgtttttcacaactgtccatttttcctcaaatccaagcatgaaaggaatagttcccctgggtacttagatctccatttctgaaggcccccatgtcttataaagctcattttcaaaagatgttatgtgagcctagaatgatgctcagcagttaagagaacttcctactcttccagcggacttgggctttgttcccagcagccactgtgggtggttcaccatcatctgttcttctcccacccccacatatacatattaattgtaataataaataaaactgtttttaaagaagacctcatacttttctgttgttaatcagttcttagttgtaggattctcagatgttaccccaggataggtaaggaaagtggggaaaaaaaaaagacctttctgccccagacaccactcactcaggcacgttgtagaaagaacaccctgtggttgaagcaactggacaaggtgtcacctgctggttttggactttttttttctcttgctacctaaatttgaaaaagtattcattgtcctccaatgaggctaaagtctcaacactgaatttttcaggaatcacagatatagaagaggtctcccagtttctgactgagggaatcatcatgaaagacttcagccatcccaatgttctctcactcttgggaatctgcctgaggagtgaagggtctcctctggtggtcctgccctatatgaagcatggagatctgcgaaatttcattcgaaacgagactcatgtaagtactttactaagctcattgaccttcaacttaaccagatagttataagctatcatggatgtgcagaaaaacaaatccaggtcctctgcaagagtagcaaatgcccttaacaagggagccatctttccagccagttggtttgcttgccctcttgcttcttcgtttggtgtattgggatgcctgcttgtgcacctatcagagtacacgttcaagccaaaggctgacattgggtttcttcctcaattctttctctaccaaattcaattctttcgcaccaaaactggagttcgacattttgcctaaattagctagccagtgagaccctaagagctgcctgtctctggcccctgctctggtgctagaggtgtagcatagcgcctggcgtttacatggatggtaggggtctgaattcaggttctcatgcttacagagcaagcgtttacccactgacccatctttccagctccaacacaaacgtgcggctctcataaaaagctacttgccaatcctgcctgatgatgccgtctctgtaacatccataggcagatgctgtctgagaaaaagagaaatagatctttaataattctgtatattgatcatgtgttgaaataatactttagaaaatatgggttaaaatatgttgtgatgtttcatctacctccgttttaaagtatatgtgtatcttactctatttgataccaaatagtgctatactaggcagataccatatatatgtacattcacatacacaccagcttatagcgtagggactttgcatatcttgtttgcgcctgtgggtccagtgctcagcacataggctcttaataaatgttagtccaatagatgagctcacggttacaaaagaggcccacacctcttgtgggtgtgaggtttttatgacccttataacaagacataacagtcaagtgaactttggccaggcaagggctgaggagaatggaatggggagctcccaaaactaagctgattggatggcctccggcttggctactgctgtgcaggtccccaggggagtcaaccaagtagctttgctcttcatcaaaaatgactgtgtaaacatgagctaagtaagctctaggacattgaggaaatagtttacattcagccaaaagaataaaacaccctcaggatatgaaaatgtttgcagataattcaaattggcattgcaaaaaggccttactttaactcttgtcgtctctctgacgagtcagtcagcttagacaccttctctctagcactattctcccaggattaaagcagggagagatgtcctactgtccattacagaatagaagctggcctctgaaaacctagagagtggttactggtcctaacacatatgtcctaatgggatgtctaagcttcaagatgtggcctgttcacatgctctgtgggctttgtgtactagcagggtctgcagcccttctgtctgggttctccctggaatattgtcatcagaagctccaaggtagctgctgaaggagagacagcccattctggatagtaatgtctgtctcagagctgtcagccacagtgacatctataacttcagattccagtcttacttgtagagaacagtatacaccattctctgtgttggtccaggactgctggatgacgagtgagctggtgcattagttctgatgagcttccagcagacttcatcagaggataccctgatgcaccactagtccttgggaatggtttggcttgtttctctgagcctcctacattcaccaagtgcctgatgctttgacatctagatccttgttggtttggataggaatgctccttctttcagggctaattctttttttttaattggatattttctttatttacatttcaagtgttaccccctttcctggtttcctctccgaaaatgccttccccctggcattcccttacactgggacatagagccttcgcaggaccaagggtctctcctcccattgatgtctgattaggccatcctctgctacatatgcagctggactcatgagtcccaacatgtgtattctttggttgaggtttggttcctgggagctctgggagtactggttggttcatattgttcttcctcctatggggctgcaaaccccttcaactccttgggtcctttctctatctccttctttgtggaccctgtgttcaatgaatggcacaggattcattcattggatccacagtacggatggcagtgagcatccacttctgtatttgtcaggcactagcagagcctcttaagagacagcatccacaatagtgtctggatttggtgattgtatatgggatgggtcctcaggtagggcaggctctggatggtcattccttcagtctctgctccatactttgtctccgtaactccttccatgcgtgttttgttcccccttctaagaagaatcaaaatatccacactttggtcttccttcttcttgagtttcatgtggtttgtgagttgtaccttaggtattctgaacttctgggctaatatccacttatcagtgagtgcatatcatgtgtgttctttttcttaaagtagtctacaccctgcctttagagtgtgcctttcatgtgcaaaccaaccggtgcctcagctacctctacatcaggctctcagactctgagctagtgtctacttatcttaatcaccctaggaccaggcaagtggccctgctgaaactattgaaaagagccaaggctggctttgtcctgcaccttcgcaaggaaactgcaataaagcatcttgctcatgctttcccctcctgcctcctgactgtctctgatgctttccaatacagctctgcatgtgtgctgtgtcataatagggttttttgttttttgtttttgaaactgtaagaagcaaactgtcttttcaacaggaactatctcctgatcaattctgtctcatcatgcacattaaattataaaacctgcatttcaaaacatctgcatttccctatctggaaaacagagcctgtaacacttcccaagcagaagtgtgtacgaaataactaaatttatagaaaacatctagcccggtactttgtatacagtactacttaacaaatagctgtggctctccacagggcatgagttattatttgagactagataagtcatataaacattgcagtgttctgagctcactgttagaacatcgagtgtttatgcttttccaaccctctttgattgcagaatccaactgtgaaagatcttataggatttggccttcaagtagccaaaggcatgaaatatcttgccagcaaaaagtttgtccacagagacttagctgcaagaaactgcatgtaagtatgaaaatatctctatttgcaaagtacaaatgaagtgttttctcactactatgccagtaaggacattttctctcttctcttcgaagaaaaaaaaaaaaaaaaagaaagaaagaaagaaagaaagaaagaaagaaagaaagaaagaaagaaagaaagaaagaaagaaagaaaggaaggaaaggaaaggaaaaagaagaaaatgtatttccctgattattttgagtgaatctgtaagcccctgggatgtaggtggggcttttagttttatcaaacaaagcatttaaaaggttgctccacaggggacctcaaacagctgctctactccagctttcctggtccttcccaccagcagtctccagtgttgtggtttcacaccgaattagtgattgggagagagaatttgatctccagcatttgacagtgaaaggggcgagctggtaacaggaataccaatgcagtgtaactcccaacagcagctctgaaaccagcctgcagaagcgctaccaaaaatggtctttgggaatgaatatacaaagaacttttatttgtgtctggctgcccggctgtgtaacgacaacagtcaacagtttataattgagagtctcggctttcccttgcagagcacactgatccatggctcatggtatgtgtgaatgaaagagctctgctattaatgttctacctaggttttgctcagggtagcgtcataaaagtacattaaacaatggatacgtggtcttagcagaaagtgtttgtctcactgatgttgtgtcggtttggtttggttttttttagcatgacagtgttttgctttctatctccctgcctcactgatggcacatatgagttttatttgctggctggcctattttagagcaaaaaatggtaaaatagcacccgtagcctcttcatcccatgaaatatattgtaagataacaagggaagatgtaggtgatgtaggtggtgcagtgtgtaggcctggcgccctatttgttttgccaccaaggagagccagggggaatccagctttaccttttctgcaaacctacaccataccaaatgccatgtcattcacaatgtctctcttcagccagtggaatttgtaatgtaaatgtcaggcatttttattcaggaattccactgtaatttagcattagtcaataggccagaggaaattatggatcactaataccaaagccacttttgaaaatctatagacattcagtgctgttgtaaattattctactccagtcagtaataatttttctcctgtaggttggatgaaaaattcactgtcaaggttgctgatttcggtcttgccagagacatgtacgataaagagtactatagtgtccacaacaagacgggtgccaagctaccagtaaagtggatggctttagagagtctgcaaacgcagaagttcaccaccaagtcagatgtggtaatgtacccatccttcctaaatttctctttctatcctttctctccgtagttgtatggtaacatttttttatgaagttcaaaaccaccaattgaaggagtaaaactggagttagctgtccagtaggtatcaaactatattcagaatttctcttgtttattcaaaaatatttgtagaccgaagcaccacactgagctatacggtcagatttcaataatctcctagagatcccccatcttccaacaccggcacacacagaaatctagactagtgatatttttctgagagtccaaaagaaatgatttcaaagaatctacacagtaaagtgagaagggaggcagagaggctgaagatccagacggagagactgccagggcagccagcgagagagaaacatgtaacaaacattgtgggtgaagagaagcaagtctactggttctcactggtccagaagccttggccttggcctcttaggacttccagagcatgctcagagcatgagtgctgtgtgaaaccccgaggaggatgttttactcacatgccaagagtcaggagaagtttgatgtttaggtagaaaaacatgtgatgttttccccttaaggatacaaccacaaatctgtgctgttcatacacaagccatcctggaaatgttcctggaggctgtgagcttcaaaagggaaagtcgacagctgcagagagatgacaagggatagggaccgagggtggtggaaagaagtcatctcactcctctgtcagccagagaggggtagactttgtggaataagccaaagaaggagtgttcatccagtttctgatcctgtgaggaagaggaggcactgacatttattcgaggtgactaaccgtttgttttcacaagccacggcaaatgtaaagagatttctggggtcatgagatccagaaagaaagaaagaaagaaagaaagaaagaaagaaagaaagaaagaaagggagagggagggagggagggagggagggaggagagaaaagaaagtgacagcacaaagtggagccaagtgcctgagatttttgacagtgaaagtttgtataggtgaagaagtatgagaaaatgagtgttagagagggacactaaccaaggtggcaggtcagtgcctaagatgagagcttacttatcctcacactcagacttgaccgcctttgtgcttactggaggggataacagctcaacagcagaagtagacaaaagatctgaatgggcatcacaccaaacacatgtgcaactcattagctaataatgaaggaaaagaacatgcccacacaaagatttacatgtaaaccattgaggtcctaataatcatcagcttgagaatggataagtgaaatatgatgcacctcgtgctgtggagatgcctcggtcagtaatgtacttgctgtgcaggcctaagacctgagtgtgtccccagctcccatgtaaaagctgagccaggcatctgtggtcccagccctggggtggcctagacagggaacagacctggggcttgatgcccatctcatccattcaaattggtgtgctccaggcccagtgaaagtccctgtcaccaaaaaactaaaggtaatggggcttagagagatggctcagccaggtaagtgcatttactgccctgccagcattttgtagcagctaataaccttctataaatccagttccaggggatccaacacattcttctggcatctgtgggcaccaagcccatgatacacatgtgtgtaggcaaaatactcatacatacaaaataaaaataaggtggatagatacccaaagtagaccttgatccctagccttcacacacacacacacacacacacatacatacatacatacatacatacatacatacatatatatatatatatatatatatagagagagagagagagagagagagagagagagagagagagacctatggtgtaaaaccatttggcagtatacaagaatgactgatatatgctgcagtgctgttaaaacccccaaaactatgtcaagtgaaagagagctgacccaaaagatgaaatgttcaatgatcccatttgtgagaaatttctagaaagtggtagaactatgaccagaacagatcagtggttgcctgttgctaagaataggaatggggactgattacaaataggcatgaggaaacttcccagggtgttgcaagtaagctaagactgggatgcaatggtgcctataacctagctgaactttttagcatttgattatatactgataaactggtaattctataacctgtaaagtagacatcagcaagaaaaggcccatcccaagagccacaaaaacgaaaaccaatgcttaaaggaaattgctgatatcagtgcggttcctctctccctctcactgaaagacacaacactgtgaactgtaagccacacacacacaatgctgcattgaccaacagctgctgattgcacggaataatttgtataaagttttgtttcaaaggcagcgtagtctttttaaatgttgacgtggagtgtttccaaaagcatgtggtaaactgaaagtatctcggatcctaccagcaaaaacttgcctgtgtttgtataggttctcttttcagccaatgcctaggtgcaatctggccacaccaaatactcacggggcattcaaagcagataggaatcactttccatgaagttactcatggccagacagccccattccgtggctctcacttagcacgagctcttctctgaagtttgtgttcttgcctgttcagtccggctggcttctctctgtccccattctgcctcatttccctggataatccaccatccacaggcacccagcccttcctgaaatacccctttcttttggcttctagactctgagccacctggcttttcttcctacatcttaaccaagaagtttttcttttttttctttttttttattggatattttctttatttacatttctaatgttatcccttttcctggtttcccctccgaaaatcccctccccctatcccctcctccctgcccctgctcaacaacccacccactcccacttcctggcgctggcattcccgtacactgaggcatatagagccttctcagggccaagggcctctcctcccattgatgaccgcctaggccatcctctgctacatgtgcagctggacccatgggtcccaccatgtgtaccaagaagttttcttttttcttcacagcctatcttcctcttgtctcctcctataccagctgaagtcttctattggtaggcagttacctacacataattataattgccaaggcacctgcttaataaaagtgtttgtgtggatatgtttttgtttcattttacatagttaggagtaacacccctgtgtgttcaaatgtttaagaaagtgccaaatgttttacagaatggctgtagtgttttctctttccaccagtgacccctttgagttcagaccattcaacatcctcgcctacagctgacattgtcagatttggggagttcaggccaatctaataaagctgtactttctttttaatctatatttcatctatattgctctaatgactactaattttgaacatgtcatgtgctcagtgtcacccttgtatcatttttgatgagacgtctaatcataccttaccctcattttggcttgagttgtttgcgtcagttgtgtattctgcatatgggtgggccatcgggcaagtgtttcgttatagcctaggacaatgctttcgggaagctgtatctgtctaacttttgtcccaggagacctccaactcccttctgatgtcattgtttgaggtatatggtattcgagagtctttttttcctctattctaccccctctccatcgcagaccctggagctcatcagcctctcacaactctggcttccttgtccctacaacacgtacaaagttatttatacttcaaggctatggtcgttgtcaaaccattcataatagccattatgaaataaataattggggtaggaagtgatgcctacacatgctgcactgtatggcagacactcttctggcttcggacttggaggaaagatccacaggctctcgtgtttcttgtacactgaagttcccttccctgttcatattccgaatcctccgtttgaggatctgtcaaccaacgtctccattttttttttaattttagacagagtcttactcttgtagcccaagatggtcagagtcttactcttgtagcccaggctggacagagtcttactcttgtagcccaggatggtcccaaacttacaatgcagctgaggaagttcttgaccttctgacactcttgcttctgcctcctgggagctagaatgatgggcgtgttctaccattcctgatgttatatgtactgggaaaggaacccagggctttgtgcatgctaggaaaactctccaccaactcagccgtgtctcctgctagagtctccttttgccttacgtacctttgaggtcacagtccccaggcacatggcagccatggctcatcagcttcagcctagcccattttcaacatttgaaaacctcccctcacagttttgctgaaaccatatctcctcatgacctactccaccggtgagaagtgtgacttctccagtattggaaattcaacaggaagaaatacctgtgcgttttggagggagataagagtttgagacagggtctctagcacttctgtctggcctcagattcattagtcttctgcctcagcttcccaagtctaggattagagatgcgtgccagcatacctagcttcatggccatactctggctactacacggctccatcctgatgtctgacgccatgaactcttgggtcagtttgtgcctcttcccggagatccattttcccctccgtcctcccataatctttctggtgctctctgatttttcacagcagctgtcctgtttctctatcatcagtctctattacagttacagacttattgcacaacactgttaacacagttcaatcagccctgggacctacctatctggacaataactgacttggacagggtcaaagatcagtcggcacttgttcaatggacttaaattttaactgaagttctagagcttaagtgtttaccccgtaagtttccagaataagagtttacatgcatgaaaactttgatgagaggctgagttgagagtgaaattatctagctcgctcctgggagaggatttgtgttccctacttcgatgatcttaatggctcttgaaacagacgagagtggctcgttatttataacaccgctctcaggaggcagaggtgggaaggttgctgccagctcaaggccaaagtagactacagggtgagacagtacccccaatcctaagaaaaagggcaggagagctcttgagggccggcacagttgtttggtgggtagaggtgcttgcacacaggccagaggacctgtctgctccccattgtgaccccacaaggtggtcggagagaactgaatcctgggagttattctctgacctccatgtattcgccatagcatgtgtgcacatgcacacacacacacacaatagatagatagatagatagatagatagatagatagatagatagatagatagatagatagatagaatagaaaaagggaggggtggctcttatatttgaacaaaggaaagagccattaatgtgatggctttggcagctctaacaactagagagctgaccctggagctccagagtttccttctgtctcaggattccaagacatatattgctcttttcgctaaatattctgagctatatttggttctaacttcctttttggtatagattctctttcttacacacacagacacacacgcgtgcgcctcatccccttcccataggctcttttgtatggaaatgacctggaaatgtcacctagcaaaaactattgtcctgtgtcctctgcacagggtgacttgcctatgctgacttacctccctgtcaaggttgtctcatgtccggtgggggtggggtaggaagaatgatatgactgacctgtgctattttgagtagggagctttaaatcaagaaaatgcctatctgtgaagttcaatagacactgccagacctgagggtcaggaactccttaaatgtgtttgccagtgtgaattcagatacataaggggattttagcaactcccttagcccctccatgtctctctggtcttccaggaaaatactgatacagctgtttcgcattaaccaggcactttagcatgttcagatttattgaaattagttttcaatagaaaactgttgcctagcaattggattagttatgcatttaatacagattttttttttacttacactgatttagagcttccctttaacattaacatttagatatgttcacatttctccctttttgcatgttcatatttgtttgatgtgtgtgtctctgtgtgtgtgtgtgtgtgtgtgtgtgtgtgtctgtgtgtgtgtgtgtgtctgtgtgtgtgtgtgtgtgtatgtgtgtgtgtgtgtgtgtgtgtgtatttaaactcgggtgcaccagcaagtgcttgtggaggtcagaagttgatacttggtgttttcctcagtctctctccactgtatttactgaagcaaggtctcttgagcctggagctctctgttcagctagtctaactagctagtttgcccttgttagttagggattccctgtatccacctatcaaagtctgggattacagacagactgctatgcctgcccctctttttgtggcactagtaataagaactctagtctttacgacttcatagcaaacactgtgtccttagataagtttccagttcctgtctctttaaatgtatatattttgatgttttgcatgtatacctgttgcctacagagtcagaagaggacttggatccataagactggagatggctcagcagcctaagagcactgactgctcttgcagaggatctatgctctcttcctaacacctgaatcaggcatctcacaatgatcttcgtcagtcccaggagatctgatgtcctctggcctccatgggcatctttatccatgtggtgcaaatatactcacaccaacccacaagcatatatcattagaattttttaatccatcttttttaattctgggaagtcactcttatctataaaaatataaagttgtggcaaaactattgaagggaaagataggaacatgttggtaccttgaccctgcaagaaccaactcagaaaatgtagtccactaaccaccaactaaatcctaaacatcctgcagacttcacatattctttttgaatctataactataattcttgtaatctgaaccttatctcgttctggtttaaacaggccatgaaatgttctagttctctgtagagaaaatttccccctcaacagaaatggtgtgaagtgtgtcaagcaaggatgaattacggagagctaccgatttccccttcataggagtgtggttaacacttttctcaactggcttctctgtcttgttttattagtggtcctttggtgtgctcctctgggagctcatgacgagaggagcccctccttatcccgacgtgaacacatttgatatcactatctacctgttgcaaggcagaagactcttgcaaccagaatactgtccagacgccttgtaagtaagagtttgctggggtctttgtgtatgtctccagttcgtgacttgtgcagaagtgcttgttgccattatgcctctcacagcatttctttctgaaacaggtacgaagtgatgctaaaatgctggcaccccaaagcggaaatgcgcccgtccttttccgaactggtctccaggatatcctcaatcttctccacgttcattggggaacactacgtccacgtgaacgctacttatgtgaatgtaaaatgtgttgctccatatccttctctgttgccatcccaagacaacattgatggcgaggggaacacatgatgaatgagaggtccaccagcccacttccaagaaacagttctggcccaaaccagactatcccttccccaacagttctcactgcctggcctttggaaggtcacttaacatttgttgttgttttgttttgttttttgttttgcttttgcggtaactgcaccactatgaaacattgacttgctatttcaaattcctggattctaaggaatttctcatctgacaatggaacagaaatagaagcatggcccccacaggctggggaccagtggcaacctgcagctacaacactcctatctcagcggaattctaaatctcagttctggcttaaaagttttaaaaataagatatatatacatatatatatccaatacaatgaactttgaagatttctcagaaaactcagaagaaacgccctctttcaggataaatgtggtgttcctagcaggctgcttgttgaaattccagtgttttaaaaatatttttgttgtgttgcagtcgtgaacattttccatttctgatgttgtctgcccatcaggcaaacattcccttttaaatgcttatatacacattccttaggttggaagaatatccacggacaatgcacttatttttaaacgagcatgacatgaggtgtgtttataaattatcagggattttatgtattgtacatagatgacaataggaaattgtttatttcaagaaatagctttgttacagtaaaatatttgtcatttaaaacccagctgtttagcaaggagtgttggctcacacctacaatcccagcatttgggaagctgaggcaagcagattaccacaagtttgaaaccaaccttggctgcatacagatgatgtatatataggccagcatgggttacactgtctgtcttagcaaacaaaatttcaactgtttgagaaagattttgttctgatctaatgaatgtggacatttaaattttttatctgttttttaatggcaactttggaaataagtaacttgcggtgataaatctttttaaaggcaactcagtattttttaaaggacaaaataaactgactgaagggttcgctacttccagtcacaacctgtgtatagaagaaagaaagggtcagtgatcgagaatcagacactctcgttcaggaggaggcttctcgcctgaaacaattgcacccaacacttttggggaagtctcatttttgcattaggacatattttaggttaaacaaaagcatattttagaaacagacaaaagccaactgaaaatcgtggatgaatagttactctggacaggacttttgacatgtcttgctctgtggaattttgtgcttactactgtatagtgcatgtggcttaggttaccctagctggttttgtccgtgtaaacattgaaagtattatatttttatagaaatgtttatttttaatgatgtaagaaaaattttccttaggccgcagaaatcctgcactgtgagcatttcagaagaggtatgtgagacccagttcaacgacagcatgattttttaaatggctgtaagttatgataaggaaatgtactgattgccagtgcactccaccctcattacgtcaccaggacttgaagccaagggttaagagggcaagctatgacatgggtgtgtggtctgctgaaacccaatcgttgaacttggctgttgttacaggaaaatgatggcatcaacaggtctttgatggtggtggagcatatcagaacacataaggaactgtagcccagatttatttcaattcaaatattactgcttcgtaattatgaagagtagtgcaaatttacagagcactgtcaaagactgacagaaaaaaaaaagatctgctctgtagaaagaattgtctgccattacagggtcaagaaaatgaatgcgccaataacagtaagagctgtggaagacacccatacctgtatatacatgctcgagaaagctgtaatgtgaaaatcatgttctctatttatgactcttcctagggcaatgtgtctggacagattgtaagagtaagtcattttcctaaagaattagatatttgtcactgcctatacctgcagttgagctgaatggtactccatgtgttaataattgttctgatgaatcatacagttgaaataaagtgacgtaacatcttgtatactgtgagttggctgtagctagtcctgcttgattacctacctcatttacataatgacagaggaagcctaagattgaattcccctggctccatggcccagatactgattcttaatgtatgggcagtagctatatagatttgcatgcctgactctctggaagtccctgtgttgctccgggtggtttttcctgagttttcaattccctgcatttttctgacagcctttcccctgctggagtccttggttctggtttaacttggagctatatctctagcaagagagcatccatgggccagaagctgggacaaaggaacttcaatgcatcgttcacagaaagctggattctgcaagtggcagtagggaagagatgtctttttgccccatcaaaatcctccttttgatatatacatgtatccatcctttggggcctttagatattagagaaactatagtcatcttaactgtatattctcaaaatggaacgggaactcaaagatgataagtcagccatctaagaatggtgtagcactttggggatatctgattcttcaaaaatccaagtttatactgatgtttataaatacagtgggggctaattctttatttcctgtacacggccaggcttccagcaggagatgctgtcttatacaaagttcactcttctgtcttttgaagagaaaatcttgtcatctttatacccctagtatttggacccttacaattactggactgagccagcagattcgattcctaacagccactttaaaccagcaggaaaagttcttagctatgtatctcctgtgacatttggtgaacaccaacacagggcatattcataggagccttctgaggaaagagattgtcttagttagagcttcttttgctatgataaagcatcatgaccaaaagcaacttgtggaggaaagagttgattttagcttattgttagacattatcgtccatcatcacaggaagtcaggacaggaacttaaacaggacaggaacctaaaggcaggagcagaagcagaggccatgaggagggcgccttactggcctgctctacatagctgactgaatttgctttcatatagctcccagatcaccaaaccagaagtggcactgcccaccgtgaactgggttctcccatatcaatcatcaatcaagaaaatgcgcctccgtctcaggcttgcccacaggcaagtctagtgggaacattttctcaactgaggttcctccttctaaatggagtctagcttgggccaagttgacataaaaacttgataacatagaaaataatatgggctggaagatggcttagtggttgaaatgcttgtcacacaagcatgaagactggagttcagattctgagaacccacagaaatgtcaggtaatcatggcaaccagctctgattccagcttctaaagacagagataagggattccagaacaagccttttgagcaaggtctgaataatggaaatactgcttcaaagagtgatataggaagtatgctggctagttttatgtcaacttaagacaagctagattcatctgggaagaggaaatgtcaactgagaagttgcccctatcagagtggcctggggacaagcctgtggtatgtttttctaattagtgatttatgtgggtggtccaaaaatatggaaatagtgccccccaagccctgtgtggtataagaaaacaaactgacagaggcccagccagaggcctgcccgtgcatgccacggtgagggtggaggagccagtgccatgagcaagaatgtcatggaaagaaagaagcagagcagtttgtgcactttgaagaaagagagagaactggagatgaactggtgaggaacagcctgaagtgagtagcctgcacctgagcccatggtgacgtctggacccatgaagttgccgagggctatgtctgtattcctggcctgagtacagcagggatctgtgctcatgaccctggcccatgttaccaccaaaagccctgcggacagctatggtctgggctgcctgccacctggggcaaggttgatgtctgagagctgctctgagatgcccccactcctcgccagatgtggcacttgggtgagctgttcctgttcggcacctgggcagtgaagtcttagtggcttgaacacaggagaactggcaggctgaccaacccaactatcacccaggcccatatccagggctttaagttgtcccattccaacgtctactgcatctatgagcttctggagcacatgaaagaggctgtcatgcaggaccacagcttcgggatctctacaacacatggcaacagcaggatatgcaagaggagtccgatgaggatgcagtattgatagtgtagcagaagccagaggcctcgaaccagactcactgcaatgagcatttgcaagtcaagctgtttgggcaacaggatttactgtgtgacacaacatgaaacgctacagcttccccagtgagattttttttttcctttgagggagaaggttgcaagggtgaagggtgaacatgcaagaactgggagatgagtgtgattgcagcacatactgtgaaattcacaaagaatcaattaaaagttgaagaagagaaagaacaagaagagaagaaaaaagaaggagcaaaaggagaaggagaggaaaaaggggggaagactaagaaggagaggagggagaagggcgagaagaagaggaagaacccaaactgattaaaccatgagcaagccagtcagcaacactcccccatggcttctccttctgcctccaggttcctaccctgcgtgagatcctgccctaatcctttgatgatgggctataacttggaactataagttcatccccaagctacccctggaaatgatgctttatcacaggaatagaaaacctgaactaagacagtgattaaaggaaggaaaggaagatgctcaacgtcaaccacacgcctccacatacacatgtgccatactaacgtatgcacacatgcgaaacatgcacagactcacaccacacacatgcgcacacacacacacacacacacacacacacacacacacacacacacggaaatagaaaaaagaaaacaagacattttgcatacctttgtttgatgtcctgaatatttaattatggaaatgtattttcagctcatgatccaaacatcaattatatatttactctttgacctttaggaaagatcctattcttctctaaaggaaaatttttttaaaaaatgaagagatatataacctgtaaagatataccaaatgttcagatgatgatatctttccaatttatttcaaaaaataagaatagtatgataacaaagaaattgcctgtcacttaggtcaggcagcttctgtgtcaggtactgttaggtaagaggttgtaaaacaatccttcttacttcaaagaattcaatggataagacagacagcaagtacttaattggggaatattataccatggcttttcttagatccataaaatgtcttgaagaagcatcacagttacaacaaaaatggtaggctcttggacgataggaccaagctctgacttagccatctattgaacttcttccctacacccagttcctcagctgtcaaatagactgatccttcttaactcacaagattgttacaggactcaaaatgagtgtgcaaaacagctgatttccactgctgccgagtaactgggatattatcaagtcttggacaatagaagcccacatcagggtagcctgcggttgatctgaaaggaccttacagatgttcaactgcaaaccttcatctcacactgtgattccatctcattcatgagcacagagatgagaaagtaaatgtgcaaacgggaagcatgacaaaatagtgtccaggtggtggcacttctgtccagtggaggaccctgaaggacatcaacacgccatgtttctctgaagctctcgctatggtctatcactctctctgacagtggctggtttcctttttctcttgtttgatcttcagacctggaatccacaaaagacatggaaaatggcaattcatataaaattccaggactgttgcttgaggtgcagtgatagggtcacggcccccacagcctaaagattattaatgttttcattttgctcaagtgggttgttactgactgttcaggttcaggaagagtagcttgtgtccggggttgttttagtgcataccatgtgttgagaagctaaggaatacttcatggacactcttccatccagatgactacactcagggagctccacagacacgactcagtctggcacttcagataagctgtgacacagaaaggcatgaggacattgtacctcagaggaaacaacacccactgctggtttccctcgtcaaacctgaccttcttcttcaggactatcttaattccctatctatcacaaaaatggaaaaaaaaaaaaaaaaacttcagtcatagccagtgaaatatttcagctggtgaattgaaggtaataaaacagaggctgcccaaactgtcctttgttgtaaatcacagcaaaggtctagattacatcagccagagggtattgatcacaatgctgagaggtttataactgctattgacttgccatgtgaccctggagcagaaatctaggaaaactgcaaaagcatacctatggtaatgaaaagtccatcattaacagggctttctgtcctgtcatccagctagagctgtgttggcttcaaggcaaatactgaacaaacacttgaaatggaaggaatttctgccctctctctttcctttgctggatgctcttaaaattatcctgctacatatgtttttcttattattaaaaaatgtggattcaaaagtctcgtatgaattacctttctcattttacttatttataataacatattttaccttttgactaccgtacaaagtaacaggtttctttataacattttcctacatagcttaggttgaattctccctttctccctctcctctcccccttctccctgtcctactcctcacttgtactctgaaaggaccccagcattccccttcccacttcctcacataatttacttattagtaggtatagtagatatctaaataactctaaatcctgcattattgctgtttttttaaaggaattaggggtctaaagagagatcagtggataaagtgctaagtgcataagcctaaggacctgagttcaaatctctaccacccatgtttctttttttaaaaaaaagctctgccttccctaagagtttatctaattccaaatggccagtcctaaacacttgtacatataagcaactgtaaatggacttggtagtttgtatgtttgtgtgtgtgtgtgtgtatgtaggacaatagttgtagaagagtttataaacttaaaagggagtgaggggagtgagtggtttaattgtgtaaatacagtattcgtgtatgaaattctcaaaaaaaatgtaaaggctaggcttaacaatgcacatttgtaatcccagctttgggaagtggagacgaaggatcctggggctttatggtcaaacagtctagttgataggtgagctctggggagctcagtaatagaccgtctcaaaaaaaaaacaaggcagagattggtttaaaaaaaaaaaaaagagagagagagagagagagacctgttgccaacctctggcctccaactaaacatatgtgtgctcacagagacatgtaccactctgtgtgtgtgtgtgtgtgtgtgtgtgtgtgtgtgtgtttctgtgtgtgtttctgtgtgtgtgtctgtatgtggttgtgtctgtgggggtgtatgtgtgtttgtgtgtatgtgtgtatgtgggtgtgtctgtggggggtgtctctgtgtgtctgtgtgtgtctgtgtgtttctgtgtgtgtgcgtttgtatgtggttgtgtctgtctgtgtatatgggtgtgctctgtggggggtgtatgtgtgtttgtgtgtatgtgggtgtnnnnnnnnnnnnnnnnnnnnnnnnnnnnnnnnnnnnnnnnnnnnnnnnnnnnnnnnnnnnnnnnnnnnnnnnnnnnnnnnnnnnnnnnnnnnnnnnnnnnnnnnnnnnnnnnnnnnnnnnnnnnnnnnnnnnnnnnnnnnnnnnnnnnnnnnnnnnnnnnnnnnnnnnnnnnnnnnnnnnnnnnnnnnnnnnnnnnnnnnnnnnnnnnnnnnnnnnnnnnnnnnnnnnnnnnnnnnnnnnnnnnnnnnnnnnnnnnnnnnnnnnnnnnnnnnnnnnnnnnnnnnnnnnnnnnnnnnnnnnnnnnnnnnnnnnnnnnnnnnnnnnnnnnnnnnnnnnnnnnnnnnnnnnnnnnnnnnnnnnnnnnnnnnnnnnnnnnnnnnnnnnnnnnnnnnnnnnnnnnnnnnnnnnnnnnnnnnnnnnnnnnnnnnnnnnnnnnnnnnnnnnnnnnnnnnnnnnnnnnnnnnnnnnnnnnnnnnnnnnnnnnnnnnnnnnnnnnnnnnnnnnnnnnnnnnnnnnnnnnnnnnnnnnnnnnnnnnnnnnnnnnnnnnnnnnnnnnnnnnnnnnnatctctagttctgtctctgaggctgagtgccgggaattagctatgtgccctccgccagcccaagtccttaccttgacatctgcttcttccattagagtcgagcctttccatcctcatgaccgtgactaaacaaccaccttattcctcagtggtaaagaagaaatgccccacgacgggcctttgtgaaggccgcctgtcccccgcccccaagaaacccaacttcagtcacatgatcctcagagataatttcagaagtcccaataaagaaaaactacccagatatcatagtgccagccttcagcagaactgtttctaatttgttatgctgtaaaaatgagatggtctgtggtagtcaccagggggcttgggggtgaggggacaggaaccctctgggaacacctgggtaaagaagcatcaagtctcgccgcagacggttcagaaagaaaatatacactgttagaactagctacacacatattgcctataagatgaacttaatataaaaataacaaaataaatagtaataacagtaatgatcccatcccgggaaatgtcatgggattgatgactgtctggaagctaatgggctaaggtaatgctctcagggattagtctcacttaatgagatgctgttagtttagtaaatgaatgcttaaaatgatggaaagtaaaacatcagggctggctgattcactggggggggggggtggtagataagtcaaagcagcctgtgtcacacactgtgcatgttgtggtttttttaaattattattattaatctgtgattcagaaagcacatatgctttacaagttgctatcttttatacatctgtcccataattttactctggggatatgtgtatttatggaatatttaaattaaactgttgattaaaaaaataataaaactccctctagcacaagcatactgaaattctacaattgggtggggtttgtcctaaacccttccacctgaaggcaatgtggatactcatatgagctttacaatattgtctcctggctgtacttggctcagtagtccaccattattctagcagttggcctctccattctccccactgtgtattgcctgtccctccttttaactaaaaacatggctgtcaaatcatacatgtgattacatcaccggcctattcaaaacctaatcctagattttctgcccccagtcctttgtgctgttgtgtttgcttatttttattataaagtagatcatcatggtaaaataaaataaaataactgggccaaatgctattaagtggacagaaaatgtcct

SEQ ID NO: 411 - DNA, 4140 bp, Mus musculus
atgaaggctcccaccgtgctggcacctggcattctggtgctgctgttgtccttggtgcagaggagccatggggagtgcaaggaggccctagtgaagtctgagatgaacgtgaacatgaagtatcagctccccaacttcacggcagaaacccccatccagaatgtcgtcctacacggccatcatatttatctcggagccacaaactacatttatgttttaaatgacaaagaccttcagaaggtatccgaattcaagaccgggcccgtgttggaacacccagattgtttaccttgtcgggactgcagcagcaaagccaattcatcaggaggggtttggaaagacaacatcaacatggctctgcttgttgacacatactatgatgatcaactcattagctgtggcagtgtcaacagagggacttgccagcggcatgtccttcctcctgacaattctgctgacatccagtctgaggtccactgcatgttctccccagaagaggagtcagggcagtgtcctgactgtgtagtgagtgccctcggagccaaagtcctcctgtcggaaaaggaccggttcatcaatttctttgtggggaatacgatcaattcctcctatcctcctggttattcactgcattcgatatcggtgagacggctgaaggaaacccaagatggttttaagtttttgacagaccagtcctatattgatgtcttaccagaattccaagattcctaccccataaagtacatacatgccttcgaaagcaaccattttatttactttctgactgtccaaaaggaaactctagatgctcagacttttcatacaagaataatcaggttctgttccgtagactctgggttgcactcctacatggaaatgcccctggaatgcatcctgacagaaaaaagaaggaagagatccacaagggaagaagtgtttaatatcctccaagccgcgtatgtcagtaaaccaggggccaatcttgctaagcaaataggagctagcccttctgatgacattctcttcggggtgtttgcacaaagcaagccagattctgctgaacctgtgaatcgatcagcagtctgtgcattccccatcaaatatgtcaatgacttcttcaacaagattgtcaacaaaaacaacgtgagatgtctccagcatttttacggacccaaccatgagcactgtttcaataggaccctgctgagaaactcttccggctgtgaagcgcgcagtgacgagtatcggacagagtttaccacggctttgcagcgcgtcgacttattcatgggccggcttaaccaagtgctcctgacatccatctccaccttcatcaaaggtgacctcaccattgctaatctagggacgtcagaaggtcgcttcatgcaggtggtgctctctcgaacagcacacctcactcctcatgtgaacttcctcctggactcccatcctgtatctccagaagttattgttgagcatccatcaaatcaaaatggctatacattggttgtcacaggaaagaagatcaccaagattccattgaatggcctgggctgtggacatttccaatcctgcagtcagtgcctctctgccccttactttatacagtgtggctggtgccacaatcaatgtgtgcgttttgatgaatgccccagcggtacatggactcaagagatctgtctgccggcggtttataaggtgttccccaccagcgcgccccttgaaggaggaacagtgttgaccatatgtggctgggactttggattcaggaagaataataaatttgatttaaggaaaaccaaagttctgcttggcaacgagagctgtaccttgaccttaagcgagagcacgacaaatacgttgaaatgcacagttggtcccgcgatgagtgagcacttcaatgtgtctgtaattatctcaaacagtcgagagacgacgcaatacagtgcattctcctatgtagatcctgtaataacaagcatttctccgaggtacggccctcaggctggaggcaccttactcactcttactgggaaatacctcaacagtggcaattctagacacatttcaattggagggaaaacatgtactttaaaaagtgtatcagatagtattcttgaatgctacaccccagcccaaactacctctgatgagtttcctgtgaaattgaagattgacttggctaaccgagagaccagcagcttcagttaccgggaagaccccgttgtctatgaaatccacccgaccaaatcttttattagtggtggaagcacaataacgggtattgggaagaccctgaactcggttagcctcccaaagctggtaatagatgtgcatgaagtgggtgtgaactacacagtggcatgtcagcatcgctcaaattcagagatcatctgctgcactactccttcactgaaacagctgggcctgcaactccccctgaagaccaaagccttcttcctgttagacgggattctttccaaacactttgatctcacttatgtgcataatcctgtgtttgagccttttgaaaagccagtaatgatctcaatgggcaatgaaaatgtagtggaaattaagggaaacaatattgaccctgaagcagttaaaggtgaagtgttaaaagttggaaatcagagctgcgagagtctccactggcactctggagctgtgttgtgtacagtccccagtgacctgctcaaactgaacagcgagctaaatatagagtggaagcaagcagtctcttcaactgttcttggaaaagtgatcgttcaaccggatcagaattttgcaggattgatcattggtgcggtctcaatatcagtagtagttttgttattatccgggctcttcctgtggatgagaaagagaaagcataaagatctgggcagtgaattagttcgctatgacgcaagagtacacactcctcatttggataggcttgtaagtgcccgaagtgtaagtccaactacagagatggtttcaaatgagtctgtagactacagagctacttttccagaagaccagtttcccaactcctctcagaatggagcatgcagacaagtgcaataccctctgacagacctgtcccctatcctgacaagtggagactctgatatatccagcccattactacaaaatactgttcacattgacctcagtgctctaaatccagagctggtccaagcagttcagcacgtagtgattggacccagcagcctgattgtgcatttcaatgaagtcataggaagagggcattttggctgtgtctatcatgggactttgctggacaatgacggaaagaaaattcactgtgctgtgaaatccttaaatagaatcacagatatagaagaggtctcccagtttctgactgagggaatcatcatgaaagacttcagccatcccaatgttctctcactcttgggaatctgcctgaggagtgaagggtctcctctggtggtcctgccctatatgaagcatggagatctgcgaaatttcattcgaaacgagactcataatccaactgtgaaagatcttataggatttggccttcaagtagccaaaggcatgaaatatcttgccagcaaaaagtttgtccacagagacttagctgcaagaaactgcatgttggatgaaaaattcactgtcaaggttgctgatttcggtcttgccagagacatgtacgataaagagtactatagtgtccacaacaagacgggtgccaagctaccagtaaagtggatggctttagagagtctgcaaacgcagaagttcaccaccaagtcagatgtgtggtcctttggtgtgctcctctgggagctcatgacgagaggagcccctccttatcccgacgtgaacacatttgatatcactatctacctgttgcaaggcagaagactcttgcaaccagaatactgtccagacgccttgtacgaagtgatgctaaaatgctggcaccccaaagcggaaatgcgcccgtccttttccgaactggtctccaggatatcctcaatcttctccacgttcattggggaacactacgtccacgtgaacgctacttatgtgaatgtaaaatgtgttgctccatatccttctctgttgccatcccaagacaacattgatggcgaggggaacacatga

SEQ ID NO: 412 - protein, 1373 aa, Mus musculus
MKAPTVLAPGILVLLLSLVQRSHGECKEALVKSEMNVNMKYQLPNFTAETPIQNVVLHGHHIYLGATNYIYVLNDKDLQKVSEFKTGPVLEHPDCLPCRDCSSKANSSGGVWKDNINMALLVDTYYDDQLISCGSVNRGTCQRHVLPPDNSADIQSEVHCMFSPEEESGQCPDCVVSALGAKVLLSEKDRFINFFVGNTINSSYPPGYSLHSISVRRLKETQDGFKFLTDQSYIDVLPEFQDSYPIKYIHAFESNHFIYFLTVQKETLDAQTFHTRIIRFCSVDSGLHSYMEMPLECILTEKRRKRSTREEVFNILQAAYVSKPGANLAKQIGDSDDILFGVFAQSKPDSAEPVNRSAVCAFPIKYVNDFFNKIVNKNNVRCLQHFYGPNHEHCFNRTLLRNSSGCEARSDEYRTEFTTALQRVDLFMGRLNQVLLTSISTFIKGDLTIANLGTSEGRFMQVVLSRTAHLTPHVNFLLDSHPVSPEVIVEHPSNQNGYTLVVTGKKITKIPLNGLGCGHFQSCSQCLSAPYFIQCGWCHNQCVRFDECPSGTWTQEICLPAVYKVFPTSAPLEGGTVLTICGWDFGFRKNNKFDLRKTKVLLGNESCTLTLSESTTNTLKCTVGPAMSEHFNVSVIISNSRETTQYSAFSYVDPVITSISPRYGPQAGGTLLTLTGKYLNSGNSRHIGGKTCTLKSVSDSICYTPAQTTSDEFPVKLKIDLANRETSSFSYREDPVVYEIHPTKSFISGGSTITGIGKTLNSVSLPKLVIDVHEVGVNYTVACQHRSNSEIICCTTPSLKQLGLQLPLKTKAFFLLDGILSKHFDLTYVHNPVFEPFEKPVMISMGNENVVEIKGNNIDPEAVKGEVLKVGNQSCESLHWHSGAVLCTVPSDLLKLNSELNIEWKQAVSSTVLGKVIVQPDQNFAGLIIGAVSISVVVLLLSGLFLWMRKRKHKDLGSELVRYDARVHTPHLDRLVSARSVSPTTEMVSNESVDYRATFPEDQFPNSSQNGACRQVQYPLTDLSPILTSGDSDISSPLLQNTVHIDLSALNPELVQAVQHVVIGPSSLIVHFNEVIGRGHFGCVYHGTLLDNDGKKIHCAVKSLNRITDIEEVSQFLTEGIIMKDFSHPNVLSLLGICLRSEGSPLVVLPYMKHGDLRNFIRNETHNPTVKDLIGFGLQVAKGMKYLASKKFVHRDLAARNCMLDEKFTVKVADFGLARDMYDKEYYSVHNKTGAKLPVKWMALESLQTQKFTTKSDVWSFGVLLWELMTRGAPPYPDVNTFDITIYLLQGRRLLQPEYCPDALYEVMLKCWHPKAEMRPSFSELVSRISSIFSTFIGEHYVHVNATYVNVKCVAPYPSLLPSQDNIDGEGNT

SEQ ID NO: 413 - DNA, 145988 bp, Homo sapiens
ccaaaggagatgggagacctcctacttcaccctgccttcagtgacagcgcttctcattttctttgccttctgctttctgatccacgaagtagaagtgagaaaaaaaaaacttcacaaattaatatactattggattatgctgccacttaaatggctaattgtaatacactgtgagataggctaaattaggaatatgaagtgccagtgggaaaacagatgaggcaacctgtcagcctccccagggagaggaccagtggtggaagctttccagggttaggcttggaccctgaaggaggaatcagggtgtgccatgcaaatatttaagaaggaaggccatctccacggaagagactgacaaggccgatgcctttgcctttgcctgcaaagctgcaacactgcctctcttcttgggctaggaaacacccagcttctccttcactggttttggaaggcaggcaaaaagcaaaacaaaaacaagaaagaaccaccagagcacacacctttctaggtcaaatctcatttcctaataccaacaacaagtttgacaccttttcattaccagccttggacttaaactccaccctctctccagagtgggagtggacccagatgagcaacccaatcgcttattctagggtctgggcagtatcccctactcagttccatgtttgatttggttacggagggatcgtcattgagccagtagcatcaggacctctgttccacagccgctctttctacaagagtctatgcactcctcccctagaaggacaccatctgccagcaggaggaaacctcttttcctgccactgtctgccctggtcctccttccctatctctgaggcatctgcaatctttcatgcctggctctctagcctagatagttctagaacactggaatatattaaaacattcatacacacacacaacttctttcaacagcataagaacctaatgttgaattttcttgaggtttttttttttttttagctctcctgataattgctcatgtgtggacatattaagatcatcattctgcactagtgatcactatccgaaagtcagggaaaaaatcagactgtcaaaatcaaaacagtttcaagtaatgaaggttttgggtataaaatatgtgtttaagggattttgtttaaaaatacactttggctgtcactttaaaaagattcgaccagggaagaaaaaccactatgcatgatatggaagtagaaatttattataggaattggaacttgcacaattgtgggaagagcagggaaggtaaaattctgaaaagtggagttaaaacggtagagaaaagccacagacgactcagaacttacagtgattcctgggagccagcacgtcctgctgccggagtgggacctcaaagcctatggaaggttgttggttcttcaggtctacggcctctgtgaattctcagcaaggcatctggtagaaggcctggtagaagacctgggacaaggtcaccatcaggagggaggggggtgcgaggacaaacaggaacctgctaacacctctgtgtctgtttctatcaccaacaggtgctgataaccttcagaacatggcagctgctttccttctgcctcccagaactcacaacttccctttggaccaactccaatctgaaattatgtagaaagggagagtctgaaaaacatagtcccaaacataaccaagtagacaatagaacaatctggcacattgattggtattttgacttaaccgccagatcaccagcagctcattgtaggcaggcgcaagtaaatatctcacctcaaatgcaacaagtacaaaatgaatgcatcatagtgtcccaggcttccattaaacaaaaacaaataaataaaacaaacaaaaagcaatcttttatccctcagctttattaatgcataactaacaaataaaaatggtatatatatttatggtgtacatcatgacatttctttccgtgtatacaaaaagcaatctttctgagtactgctcagttaccactacctctaagtgatcctgtgtattccacaccctaagtgtccatctgaccttcctcactgtcctgtgtcccagaagtctctgccttctatcaagctttcctctttgctttcccgcattaatgaagtgctcctctctcttgccaccctgcctccaatctcgccctgctccaaaccttccattaaaccacatgaatctttctaaaatgtaaaattctgcttattttacttaaattattttagtgactccgtatcacctatcatatacatctttcttggtgtgatatgaaagacccctcatatatattctgacccccacctacatttttagcccctctcctgtcctaatcccaaatgcactgtgccccaactattttaaactatttgtaaaaccctgattataggattatgtcaacacaggagtctgtgtgccttcctccccttgcaaatacagttgcctgacaaactccttctcatcccataggatttgactcaaacatgaccttctttgtggtgtcctccttgtctcctcaccttctcccaatccccaaagtcagtccataacattctcctaacagtggatagcatgtgccatgctgtaccaggtctgctgatttacatgtctgtcttctgtgctagttgtgagctcctcaatgttaaggaccacatctcattcatctttgtagtcccagacactaacacttcccaggtgcatggtaggggctcaataaacatttggttaagaaattaattgatgaatcacaagatctgacatgtttaaatattttattccatatttatagctgcttccatacaaattatgattcccataaaacataggtttacatttaccaaaaaaaaaaattaatttgggggtaatccaatacatgtacatggccaaataatgaaattcagtttaaatcttgaaatggccctaaatcatatgacctcattgatcagattaataagattatttctaaatctcaatttcaccagtgatgtttaaacatatttttgacctgccattggaatacagaacaacaaaggaaacatctggttgttcttaactttggggagacaaatccatttgttaacagtagcaataggagagctgacagaacctgataacagctccaacacagggagctcagcccacaacagatggaccagacacttcagggaaagctttaaaaagatgtcttttctaattcaggttatacactccttgaaagttccttcaacataagcatgaaagtttgcagatgattttatcaggtctgacagcttttttctagaggttagtttgcaattggctctcgggaatagtttggttgaatttcactggattttgtaagtaaaggcaggaatgtttctaataagtcaacaaactgaaagtcctaagcagtttgcatcactgccaactttctgagtgcgacccttggctggtcagagtttgtctgtgttctttttttttttttttaataactcttcatcagctaaccaaggttaacccagagttattgctatttcttctacatgttttggacatagtttaatagtaattatgtttaggctctaatgatgtaaaaaaaaaaaaaaaaagaaagaaagaaagctcaaaccctggccagtgcaaaattattggaaagcattttaatacaactatcttaatcatatttctaaatatgttagtcatgtataatagttacattgattctaatcaaactctccaaacattctatcccttttcaatgccataagacctatatattccctcttaaactgttaaattttgtagccatttttaaatggtctaatttacttttggactcaccaaataaaagatgcctaagttgattattaaatcattcctattggaatagaataaagtacttaatcatatttggacaaggcagtagttaataagaaccacacactgaagtactttctaatataatgtccccttacatacactacaattagtaaattgtttggtatattggctttaaatggactggcttcagtaaaattttggttgatacttaatattttttaattattttcaccagactttggaactgttttcatagctggagaaactgatccacaggggttaaataccaaagcacacatcaagttagccataaaacctagaattgcagtaattacacaaactcacacactcacagacacatttttaaactccatccttaatgaaatgctgatcgatgaaaaaaaatcactttatttttcttggcacattattttccaagataggttattttagtgtcaaagtttaaattaacagatggactggataagttcatttggaaatgatgctatagtatgctgcataaaaatgaaaattttctttcccaaaatttaccagaaggtaaaagacagagaaagaaaagaaaaataaatgaacatgactttggagatagaggcatcgataggtcaaagagttatggaagcagccttccaggactttttggaagtcttggccttaatttctcatcttccaagaggacagagattctccaaaatatcctctcttaggacttctcactgcctgtcatctggtttttcctttatttctcacattccctaggttcccaaaggagagatcagaaattgagaaaacagaggcactagagaaggaacattccagtccctcttcacatcccacaggtctgagtcctaggcacctacagcccaccacttaggccagcttgactgcctaggaccttggctccgacctgtgcagtgttctacagatggacagcatagcacctttggcctgcactgcaacatcagtccccaatgatcaagccagcagagaagtggccatgccttaggttgtggctgactttgcagacagagaaggaaaatgaaagagtgccttaagttctacttctcaaaaaaaaaaaaaacttttgggtactaggcttaatagctgggtgatggaataatctgtacaacaaacccccatgacacgagtttacctgtataacaaacctgcacatgtaaccctaagcctaaaataaaagcttaaaaaaaataggtctactgctcccagttaaacgactgcatcattcactacagaaccggagacaatttaaaataattataacagaggccgggcacagtggctcacacctgtaatcccagcactttgggaggttgaggtgggtggatcacttcagatcaggagttcaagaccaccctggccaacatggtgaaaccccgtctctaataaaaatacaaaaactagcatggtggcgggagcccgtaatcctagctactcaggaggctgaggcaggagaatcacctgaacctgggaggcagaggttgcagtgagctgagatcacaccttcgcactccagtctgggccacaaagcaagactccatctcaattaaaataaataaataaataattataatggaagtgcagtcattctggaaagacacagacttaagacagctgtgtgactttggataggttacatgatctctctgagcctcatttccctcaatgtaaaccgagaagggtgatacctattctggagttcttttaatgaggatgtaagcagagctccagactcatgatgaatacatggtacacatttaataagtgacagctaaatacattatacctttgcctgattttaggagagaggtcataagctggatgtgaaaatgaaccaaatcactaacaaaattgcagcaccctgttggagacggtaattttttcttaatttttctgcctacaatttcctaggtcttctaattaacattgtgatactttagcttgtagcctagcagtcttgttcttgtcctcaatattaagtatgctcagtcatatttttagataacttaacattgcatatttatttttagacagcccagccacacataaatgaccaatacaaatcaacataaaagcagttcatatccaaagtgcccagttttaaccctctgtagctggcagttccatttttaacgcgaagtttcctaaaatgtataatctataaaactaattttatagaaaattgacactgaagatattaagaaaaatcaaagcattttgtggtcaattaaattggggagatggtagggtaagcaaagttaagaagggtttttttggtttttggttcggttttgctgttttgttttatcacatgaattttcaaaaccttcaacattcgaacatacatgacatagctctaaaaaggtaataggagtcctacatttccaaattttatctgtgctcagaaatgacattaggtgacattacctgaattcttctattgtctttttgtagagacatttgccataggcacaataataggggtgatggggcaggaggaagggaaaaacagagtgaaagaaggagttccagagtaactactctttaaggcagggatcacagatcctaatgcctacaggagaaagtgaaatcaagatcagaggtgggccagacacaacccaagagaagatggtaggtcaatggcaaacagcagatcatatggtctttctacctcaattcacacttttaaaaacattctgtgcacctgtatatgtctgtgggccctattcaccatacattgcaagcatgaagcccctattcttaggagactgctttcatttttatttcaaaaacagcaccaacttcaagagtgccttcaaagacccaaattttaatgtgttaaagggagggaaaaaaagatagagcatattagagcaggaggtggctgttcctctgtctctttgtcacagctatcactagacccatctcaaagttaagagatgggatcctgtttgtagttcaacattatgttatccacaggtggatggataagacctgcttatgcctttggatcatttatattttaccagacactgttccatgtgctctacttgtagctcctcattttatcctcacaataaccctatcatgatccccatttcacagatgagacacgagagagtttaatccactggcctgtagctacacagctagcaagagacatagctgggattgaaatccaggttgtttggttctaaaactcttaactattatgctcaactcagtcttggagatgttgttcccaatttgaggggtctatcagttttaattgctttcagctgcaggtgacagaagtcccagctaccagtgtctagaacaagttttgtttttgttttttttccacaaaacaagaaatctggaagcaggtgtctactggcagtagggctgtacctcagcaatgtcagcaccaacttctgcatgctggtcacaagatggttagttcttcactgggcatcatatatgaaatcaagaagcaagaaaggaaaaggggtggcaccagccttaaaccctttcccacaaggccccatcagacttcaacttatacctcattaccagaatgacatcacatggccatgtctagctgcaaaggagtctgggaaagcaaatatttctcttttcaagccccaagagtggaggcaggaacaggaaaatctcgttgggaacagatgctggcttagccagccaacagtgtggaccacaagagatttggtttggttaagaaaataccaacagaacttcatcatacagtgtatcacccatgacatgaacccaaggaaagttaaatagcaacaattaaaagtttgctgcaaaaccaaaattgaattatagaactcctattaccttttaaaatatctgtttccattcatttccaaaaatctgaaattatctgtaaacattttcccaatcaaatctgtctaggtagtgtgtaaaaattacttgaccttcacacacccagatacttttagttatgctattgttagttatgttatttcataaaatgttatctccttatttacagttgataaatgaaatgatgattttcaatacagtttcaaaactggattgaaattttgttagttattagaaactagaaagtttcagtgctgaaaatacacaacgggttgtttgtatttatcatctattttattttccagtttgcattggcttttctgggtctttctacaactttaattgtaaattttttcttttatatttttatcatggcactcaaactcagaaaacctgttaaggcaactacataatgtgatctaaaaatccagttaacatattgctatggaaaccaggaaatagaaacagcactctaatcattcctttagacaactatggctctgtgtgtgtgtgtgtgtgtgtgtgtgtgtgtgtaaaactttttaaattcattaatttattcatcttttattgaaagctgttactgaacccaaaatctgtaattgatctgtccataaataggcccagtgccttattaccagtaaattagtgttttttaatgagctatagtcattgataaattatgccatgccgtatcaggaaatctccagtcaggccgcgttgtttatttagcctgctgaggcctcttggtatggtgtgaaggacacctgactgggctgaaagctaagttctaactttgcccctcttactaaccagctatgtgactctcctgggaacttttagggactcagtttctttacctgcaaaatggttcaatgcaagactttagtaacgtaatgggaactttccttttccataaaactggggaatcaagaggtaatctcttttgaggactgaaatcactcttatgtaacctctggttacattatcatttccaagtgcctggcacttgggaaatgataactattcttactacatttttctatgtttcattctgtagtaaataagaactgaacctgcatagtaactgttattttaacccatgactttcaataacgaagatatctatgtctcattatctattgccatgattgaacaagttggtatgagagccggaacgaactcaagttctaaccggcaatgcccgttccttagatcctattacctttgagtgttcatttactcttgtaggtgccaatttttatagcgaaatacaaagttatcccaacacaattactcctaatagagttcaccgaggccccaaaagctcttttttaaaaatcatcataagatttcaacattcaagaattaaacttttgttctgttgtgcttattcatcgctatttgcccagttatttaatcagcctgcttccggctatggaaaaaaaaaaaaagaaaaaaagaaatggaagtctcctcagggttaaactcctctgttgttcttccttgcagaaatttgagttattatagtagaggataatcgttgcataatgaaatcattgggacaattcgtccatccacttctacctccgcctctaacaatgaactccttgtttctgcggtgcccaaatctctctaaacccgggtgggcgcggggcggttagcggagacgtgggagaggccgagagcaaagctcgcgcccttcccggggtcagcgagcggggtgccaggagggtgcgcgccctgcctctgagcccggggtgacactcgcctcccaagcgccaggagggggagactcggtcccgcttatctccggctgtgctaacttcagactgcctgagctgggggaggagagcgcgcagccagggcgagaaaacttctccacctagaaagtttcaccttgtcgtgggcggggcagaggcgggaggaaacgcgacccccgcggggccaggcgcggcgcggacggcaggaagggcgggggccgatttccctctgggtggtgccagtccccacctcagcggtcctcggaacccgcggactaggggacggacagcacgcgaggcagacagacacgtgctggggcgggcaggcgagcgcctcagtctggtcgcctggcggtgcctccggccccaacgcgcccgggccgccgcgggccgcgcgcgccgatgcccggctgagtcactggcagggcagcgcgcgtgtgggaaggggcggagggagtgcggccggcgggcgggcggggcgctgggctcagcccggccgcaggtgacccggaggccctcgccgcccgcggcgccccgagcgctttgtgagcagatgcggagccgagtggagggcgcgagccagatgcggggcgacagctgacttgctgagaggaggcggggaggcgcggagcgcgcgtgtggtccttgcgccgctgacttctccactggttcctgggcaccgaaaggtaaaattgcagcccctttcagatccagtacccaatccctcgcctcaggggttctgctttctttgttcccctaagagacctgactgctgttccagggggcaaaaccacgtaggtgggctagagtttaggggcttcggaaactgaagagacgtggccacggcgaggacgaaactagaatggggcttgtctttttagggggttgcttctgatggccacctgtatgacttaggagggagaggggcgctgggacagtgggtgatgtgtgactgttacggcccagcaagttttaaagctgggatctgactcagcccttacaaaagggatccggtcatcctcgtcccaccgtgatgcagctggcaaggtttgagccgagctgtttccttgttcccagccttgctttatctgtgttatgttggggtccttccaaggggcaggtgtttctgtgaaagtctgaattcatttctggcaatcacgcggggcttgtgatccatcaattttccatcgtaccttatctctttctggggcttgtggtggacatctatcttattaggtgaaatagattataaccagaggctgagcgatgtggccagtcgtagtgctgacccgataattaaagcaccagtgaaagtactttccctgactattgtcaatgcagaatttactccgaagtacggtttcccattcatatctttcatgttttaaaagagccatttgctaatttggcagttggagagggctccaatggctcacgcatgaatagttgcccagtgtattttaccttatcacagttttatgttcaaaggagccctcgggcagaatgaaatattgtcaactctcttaggcaaaataatcaagatactttaattgctatgttaagatggtccatgaatgtgagaggattgtaagaactgacgttggaggcaatatagactatctggaccctctcttgaattttaagaagactgttcacattctgtagctttgggtgggggtttattctgtcgctttcatcagccagacacatgcacattgccatgcaaatggattcagaaaaacattatattcccttacagctaaactattatagctgactaatgaattttttctgcatgaagatgatctgaaaatgatgtacatcatgtttctctgtgctacagggacataaattgcatttttatgtaaacagtgtaagtggtgcttggattatttacaggtacatagctttccttccttgatctaagctaattgagctttgttttgaacgtgtaaacttccataatggaacataagtgaggtactttggttcctatcatttgcaagtctgtggtgtattcaatgttcattctttttgaactgctgaataacagagggaaaatttacatcattcataagaaattttggtagtacaaaaatgtgtctgatagcctataaaatgtactgctgttttaaaaattctattccgttttcaaacttaatggtgtataagctatagttattaacttaaatatattttgcttttaacatgatggaatttgtggcatatagaagacagtctgccgactactgctttttcaaaattgctttgttcttgatacatggcagtaggggtttacattagatgtatactacatgctttcaaaattagttgatggagtttatcttcatgataaaaaatgtaccagattaatcatagccagtcaatacgaaagctcataactaatattttcactacttttaaacctataatagagaaaaatgaccctttgctaagcaggagaaatacccatattttataaattccttttaagactatgtaagtatatgccttgcattaatcttgaaatctttaaaaaaaaattgtcttaatgagggctagactaagaaatacatttcaaaaatcaatttccttagctgtttttaaaatagtgtttgaagtagcattagtcatattatccttctgcagatctacataatagtctcaaattaactttttctcaaatgtggtcatctcaaaacaacgtgaataactcagaggagctaacatcctctaactggcttattttctccaagtggctgcaccaaagacatggcaacacccccatggtgagcacagttcctcacacattcagattacctcccatttctctgtcctcttcctcctcaaccctttcccttggtttggtcagagctgctttcaaggccttccgtgcccccatttctccagcccagtttgctcgtttcttctttaggcattaggcttagtgattctcgccagagccatctacgctttcttttccgtggtctaaatccctaagatttccttggtctgctgtgtttattcataggatactcaatttcctcattgtgccctcttaaggggagaaaatgtatgtagaaactcaagtgtccggaagtgagccttcttttcctggctggtgtatgctgaaactagtgtttttgacaccaagcccttagggcagagtttcttcatgggttttgctcagtgcaaaataaatagtcacttctcagtaataaatgatagatacactgactaatgttagttcagaatcactttgatgatgtgttctcaactgacactgagttgctgctagatccacatttgcctgaccaaaaatagctaggacctataggtagagtatcatatgtgctaggtactacagcattttctttaaaagaaagaaatggaatctgcccttgagaagtttatgatctagatacacagacaaatatcacatattaaatgaacacaaattcataattattaagaggacatcacatgagaaacgctttcaaaatcatcctatttgctatgaaataatagaatttttttttaaaaatcaaagtttggaacttaaaaaccttaacattttcaagctgtttctgcatacatcacctttctgataccaaaacgaccttacaagataggcaagtctgataacatcttaacattcttatgttatagacaaggaaactgagcttgagactagctccatgctatttcaatagcaccataccacctttcctcagccatcaactattggaaacattttccatggaggcatcattagggatgcttaagatagtggtaaatgatgaatataacatatctagtccctggagtttttgtcaccttctctttctccagttctctctctcttttttttttttaatttcttttcttttctttttttcttttctttgtagtgagacataccgagaaaaggtttcattcatatgtgtggggcattctgctcctgttatcagattaagagccgtgaataattttgtaatctatccttctatcagaaagcccattctcagatatcttttcagctgtgttaaacaggttagtatattccgcttgggatttgtttcaataaaaacatccagtaaaatctgactactttgcttttcatgggacaaaatgaaaaaagtgcttttataagctgtaaaacttaattgagagaaaaaatcacgtgtggcatttgtagcaggaggtatgagctcagtgaaataaaaaagttaactttgtaatcacatacccaggtacacatatttctctctgtgattgcataaatgtgtgcaagtatgtttatgtaggttactcccattgattttaatttctataataaattatgtagctatagggcccacaggcgattatataatgggcaatagaatttgaaaatgtatctctcctaatataattaaggatagcaattatgaaatgtgcttagagaatcacaagttatcgtgaaagccaggttcctgtactccaagaatgtgaatgaggatttagtcattcattcaggacaattttttgacaacctacgaggcatagttctaaaatctggcatttccacagagtataaaacagatgaaaacctctaacctcatgacactctgttctattgagttggcaaacaataaagaaatacataactgaaatgtgttgtatgtcaggtgatgataatagcttcaaggtagaataaaatggaaaagagaatagtgactgtcaaggataagagagagtgggatggtgattgaaaaactcaatagtgaggtcagggaaggcttgtcttcaaaggtgggctttgggctagaatctgaaggagataaggaagtgagccaggcgcatatgaggagcacttctcaggagtgctattctcatcttgtttttcctgaaattgtgcagttcacagcttgcacaactgtccatagactccctgattttggagggagatacctgaatagtgcccctgtttttgtagggaaatacctggacagtgcctgccatcattagctaccatgttaaagatgaagatacaggagtggcccacatctcttggtttatgagacatggaagaagaagacccagagtgttgttttgtttttttttttgtttttttgttttgttttgttttgttttgttttgcatccgcctggtcccatcccatactccatcctctatcagagatattgctccattcagacaattttccttcttattttccacactgtgagcctgtcacagtgggatttgttgagaaggatacccatggcttttttcactgatcccttccatagtataaatctaaagacagcaagaggcagttgctgatggtgtgcagcttctgtctgctatgcacttctttctttccccctcgctctccttccttttcctttccagtattaagtcactgcattggattttcttcctcttttcttccttttcccttattcccctatttatatcctgtatcaagatttgcaaacaggtaacttaaatgaggaaaactaaccatttcactagggattgacaaactgcttaggaaaagcagaggggcagtcactgcttggcgtgattagagctgttgtgaggctcagtgtatggcatgggcccatgtggtagtatctttcagattttcaagagaagctaggactctcccaattttaaaatgttgactcagtgtctttaaaacaccatacagcttacagtggcagaaagtctgcaagccagattgggctcctgatggtcccaattgcagcagcatgcatggcccgagagccccaggactgcttctacaaaatattttattttctaaaattctcagaaaattaactaaacaaattttttaaaaccaatattttatgtcagttcctattggcacgtggttatttttctaaactcatcagcccacatactttacatcaaactatgtacatttctaaactaaagggtaatctagttatttcattcttaaactgaagtagtagttttctgaaacctgaatccatcatggctttatgcatcaatttcatttccaagttctctgattcaggataaactccccctttggaatattgtctttctctctctctctctctctgtctctgtctctggaaatgactgaacttcacccgttgttattaccctgccattgaaattcaaaacatgcactgccctcctggtttccagtgccctttaaaagcaatcagatcagtgttaaaatctatttttccaaaggaataaaagctcacaggttgtgcactaatttgtttcctttaatcctaaaatctcagtgaaatgcccaagctagcagccctccagaaggccactgtgttagaaagggagattatgtactgtatttcttcctactattttaaatgcaaatataataatatatcatgaaacagtgcacatacagtatacatattaagatcagtggtctattcctgttttgaaatggtctcctactccttaatagttggaattctgaggcagcacctagactctcaggtccaatttgaaaatgtatgtttttttttaaaaaagaatgacttggggaataactgtttgataagaccgtggaagatttctaatttttaatattttattaaaaatgtaaagaaagacattcaaagctgagacctttgaaataatatggtctttgcaagtcagagaaaaagagaagtggtaaatttattagagataggttgcctcctttgaggcctaatcatgtgggaaaggaaaacccagccaaggtttgggtccataagacaattcaacctagctttaaaaataggttttggctttgcttgggaccagcattgggaccagagtgtatctagaccagcattttagctattaaattttaaacctaggggtcttttaagggaaatttaatccatgtgtctttgattcactaaatcttaaatcattactcacaaactgtatgtccctctaagctctttgatgtccaagagatctctaaaattgtgtaaggcctttttgttccagaaaaaaataggaagttggtttttgctaagcgtcaataaacagcatcctcaaaaatctgattaggtctaaaatcttgcaaccatgacagtatggatgtttgaatgatgcaatgtgaaaattttaagcactttttaaagtccttgtttaccagtaatactcagttgtaatccttactaaccccaaggaaattattttgacacatttcctctctgttttgtaatataaatacaaagcccaaatattcatcattttattctggcacatagtaggtactcagtaagtattttgtagagtgttgaatgactctttcttctgcccagaaacttctagctaatgtcagttcttctattcaatattgatatccatctgtcataccttggaataagatctattctaagtcagtgaccttgttcgacaaatttttaaaataagccatctaactaaatatatgacatttattgaaattcattttgcaccatgaagcaactgccttgcaaagagtgctgaaaataggaaggaatttctagactaatttgattaaatattcagttgttgccatatgctttctgaaaattgattttcccccttttactattcctgtcatccttcctcccaccttgacatgcttactgattgaaagctatgcacagaaaaagggcaggtcgcttgtatgtataagcaagagcagcaagtccaaacaggcttagaaaacgtaatgctataatcacgagttgtcataatataggagaggggagagaggaatactcagcaataagagtggtgttgggtattgctccaaattacatggatgacacatctttgaactctattgtgtcgggggaaaacaccttcttgctgtagttagatttcctgtttgtgaatgtgtattttctggtaaccagacttcctatatgaatttgacatagctttaagtgcatttcaaatgacatgattaaaggatggctgctttggagacagcagctccttctctcttaaagaaataaactatcatgctaaaatataggcattgagatctttcttgataccatattgtgaatttctaatggctcatcacatttttatcctcagaaaacctttcctggtgaaaagcatgctgttttagtatcacatttggggtgatggaattggcaatttcttatatcttgagggggcgggggggtaaaaggaaaattgtgttaatagggtcttaaaatagagattctcttaggttaacctgaagatttactaaatacattatcattacagcttgttttgacatttaattgtagatggcactgtatcagcactgacttatttatacagctttgtttagacatgcctaatttttatttcattggtggaaccaaaccatcagtaataaatcatatatcagtgtttttgtacacattcgtatttacatgacttttaaaattccaaagtaaaggtctcacaacttgaaaaatgaatgaatgcctgagtatttgaacagttgggaaaatgtagttcaatttaagaaagattttttatgacaattcttatgccatatatagaaaatagataataaaggagaaggcctggaggtttagatgggatattggatcaatgagcaaaggaaggggaaaggtgggcgggatatgctgaagggtcatgggcttgagtgcaccctaagtcataaagagggtgtcccattaagaatcaggctgcctgaattctaagtaggaaagaggcaggtcaaaatggtgtataggccaggcacagtggctcacgcttgtaatcccagcactttaggaggccaaggtgggtggatggcttgagctcaggagtttgagaccagcctgggcaacatagcaaaacccccctcttaaaaaaattacaaaaagtagctggacatggtggcgcacacttgcagtcccagctactcaggaggctgaggtgggaggatcacctgagcctgggaggccaaggctgtagtgagccgagatcataccactgcactccagcatgggtgacaaagagagaccctgtctcagaaaaagtgggggagggagggtatggaataaagtaaagctcatgggaaaatggtacctttaccattttcccaccttgggaaatggtgggaaaatttagacattgctttacaaagtctaaatttctgccaacttgtgttacatgtggtttgattctggagaaagatagactatcatctatccagtcctaaattgggcctcttagtctgtcctcccctcagttaccaggaagaatagcaggaatatgtcacagaagcagagaaagcttttattctgagtgtcagaggcatgttctaagcactctgttatctactcccaggcactctaaatgaaattccattttctctgaggaaatcaaaatataaaaagaaaactcaggcaaatttataaaggttttacaccattttcatgactgaaatattctagcatatctagctcattataatctataaattcctgttgggaccaaaagttatggccctaaaacctgttatctgtaatccttttccactgggatattgtctctggggatatatattagctttccttgaggatactaccttgaaaccatttctttggtccttgactatacaaagttcatactagcatggatgtaggaattgtatttttctattctaaatacgaatttagacagtgatataaagattcaaggaaagcttctatcaaggcctgccttcactacttgtcttttggctcctctgagggtcttaggtgagccactttcatctgattctgccctcacttcaggcagaattcatatggctccagccaatggctacactgtccaaagtgagactgtggtctcacaaccatctggttaatacaaagacagcaagccaatatgatcacttaggacctaggcaaacctttgggcttaaaatattaccttagctattgttgtttttaatgagtatcaaatagtatgatatttgtaatttgtattatgtaaagaagtaaccaaagcagagattgttgacaaaaaaaaaaacttcctcctaacataaatgaatatgcattttggacttttcaaaaattccctttctgtcttgtcaaaattaagatatttctaaattttatttcggtctcactaacacatacttggattattgttcattgaaatctgtacgtcaaggcccagtgattttaaacattcttttggtcttcaaagaacttaccaaaaaaaaattgttctttaaatcaccagaaaagtgcagataaaatcccagacagtttcattaatgacaatgaaaggtgacagcccttgaatctatgtcataagttgattaattactttccaaacattattaaagatattagacgaataacttagactggtatccaggatcaaggttccttcataatccctaaatgggttttaattttcagagttagatgatcattatatgtgatttatttctttaacatctttagactgttggctttattgaaaagagaggagagtatctgtttcaatgtgttttcttttccctgaagttattccttgcagaattcaataaaaccggttttgaaataaaaataattaaatgctggcattttctgttaataagggcccatagacctgatgaattatataaacattacaaggaatttaccactgagttcataattatgtaaccatttaatgcccaaacctgcctactgacagtgaagacgttcaatgagaatggacattgtgcattaggataaggatgacctggagtgaactttcattcttgttttggttctttcccattttgcccaattcatagcacctgattctcttaaccagcaagtctgtttgcatgtctccagtccaatttttcgccatgcccactgcagtgattccaaactctcaccatttcttaagctcttgcatcttttgggctctccttattctcagtataagatctttccttatagtttagagagtaaacacaagcccagttgtttccatgtcacccattattacctctttctgtctcaaaggatgaaacagtcttttctacctaagtcttgaccctgttgttccccacacctgtgagcacctcctccctctatcctacccaccttacaactcttcccgtgtttaaaatctccctcaccatttttcttttttaaaaaaattatattttaggctcagtggtacatgcgcagatttgttacataggtaaactcgtgccacagggtttatttcatcacccaggtattaagcctagtacccaatagttatcttttctgctcctctccctcctctgccccctcaagtagaccccaatgtctgttgttcctttctttgtgttcataggttctcatcgtttagctcccacttataagtgagaacatgcagtatttggttttctgttcctttgttagtttgctaaggataacagcctccaattccatccatgtttctgcaaaagacagaatctcattcttttttatgtctgcatagtattccatggcttctctatttttcattcacctcttactcaacttactgattcttctagaaagaaataaaacacacacatcaggcatcctgataggatcttgaatacacaatttccttaagtagtcactcctgttttcattttagcctttaaataatgaattcttgaaaataaatgtctaactcagtttctctactttcttcattcccattcattcttaagtcattcaactcaagcagtctgtaccacatgcccaagaaagtgtcctcattctaatcaccagtgccctcctcatggccagatctgatggacactggtttttatcccttttgacccgtctgtagaatttgacaccatacattttatttctcccttctcgaaagttctccttagcttatctctccacattttctttgcctacaattgttctttttaccctttaaaacataaaggttagattctagtcttctgtaaggctccatctgaattcctcctttctacttacaaaacacattcacaagtgatctcacttcagtgacttccaatacaccgatggacgagtggttcacaaaccgctctctctcacttcctcttttctctagaccaccactttcatgttgtcagctaccttacagactccaccacttagatgaccagaagctacatcagggttattaactcaactaattacttttaccctcaaagtctcctctccctattttccttaccttggtttatgatacccagatagacaattttttagccattcttggcttttcagtctcctctacaatcaaaatccatattgaataattcccacataatttttctcactttaatatgtgtataatctagtccttcctttctttccataatgctagaaactttgttcaggaacattcttttgtatattgattgattctgttgtccattcattcaataaatgcttactaagtgccatgtaatgacactatgctaagggctaaaagtggagcttacactctgatgggagacacagataaataagttactatatagtgtggtaaaggctagataaggggaagacaggtttgatgtttgagcacataggagagttcctaattccttactagaaggtaagagatgcatcagagaaggcttcccagaactgttccctaagatgaggcttgaagagagaggacaacttatccatgtgaagttgagggcaagaatatccataaagagggatccacatgtgctgaaacccagagtggctgagcacatggcttgcttcaagaactggaagagggcagagtggccagagcctagatttctaatggtgtgatggcaagaggcaagactggagagtggggcagaaaaaaatggtatgtggtttgtaagctctgccaaggggttgacattttttttcagcaaagaagtgacatagtcaaattgtcagtttagaaagatatctctggtatgctagggggcagatgatcagggtgagaatggagagggaagaccagcgaggaagctgttgtagtaatccaggtatgaagtgacactgccctgaccatgggcatggaagccaataaggagatggacatgtttaaaatatttgtaggtgggtgtcaaagatgatgtcctagaaatatgggacatgttcagcactgaggtaggatacagagagggagaccaggttttgtgggagtagatggagataacagaaggatatccaactgctccttcttggtctcttgtcccatctgtctttgtctcctgacctattagctttggtggcgccatcactcagtcctcctctcttcattctctacagtccctctcctcggagatcccatccactctcatggcttttcatgacgtctacatgctgacaacttcttaatttaaatctctagcccagacctttctccttaaccccgggactcaaacatccaactgcatgcccggcatctccacttagatgcctaaaaaatgtatgtcaggctgagtgcagtggctcatgcctgtaatcccagcactttgggaggctgaggcgggtggatagtgaggcgggtggtggtcaggagttcaagaccagcctggccaacatggtgaaaccccgtctctactaaaaatacaaaatttagccaggtgtggtgatgtgtgcctgtaatcccaactactcaggaggctgaggcaggagaatcgcttgaacttgggaggcggaggttgcagttagccaacaccacatcactgcactccagcctgggcaacagagcaagactccatgtcaaaaaaataaaaataaaaaaacctccattgtgggcaaaactacattcctggtctcctcatatcctacaaacatgcttcaccaaccagagtctgcatgtcggtaactggcaaagccattctctctgttaaaaaagtcaaaatccttggcatattctcctttttttctcacatgcctcagatctgactccatcagtaaatccggatggagttcgatctgaggcatgtgacaaaatagctctgtcttcaaaatagaaccagaattcggccacatctccccactctccccttccttcctggcccaggccaccagggtccccctcctggaacaccactggagcctcccagctggcctcaccactccacctttgccctgaactgccccccagccactagcagtcttctctcccatatgatcgaggtgaatacattccaacataatccccccttgttcaacaccctgcaatgactccccatttcactccaataaaaacctgaatctcccaggggcctacaaggccttacatgctctgcttctttgtccttttgatctcagctcccggtcaacaaagtccaggcttactggcccccttgctgtgcttcagacacaccaggcacatttagttcttccttcttgcctctgcccagaaatctcttttcccatctcagacatctgggtccacaaaagccaccttcccaatttccgagctacaaacctatccccatacctctcctccaggcagttctgatgccccagccctactttttgtttttccctgtaacacacatcaacttctgaaacactacatcatcagcttgttatgggtattaattgttgtccccagctaaaaagtaagttccacaagagcaggggtgttgggttttgtttactgatgtatcccaagcatctgatgcatagtaggaccccagtaaatacttgtcaaatttggtcttaaatagctgttgcatagacaaaagtgatattggagagatggatttcgggattctctggagatccttcaacaaaacatatcagactttctttaatgtggccacagcctaatcttatacctttttccactgtcaacccagcccacctggcctctatgccaattgcagcttcctggacaaccctgcatcttctccccaggtgcccgtgtgtgagtccactccacccaaagtgtctgtcccctacctcagctgcacctgagcagctccaacttatcctgcaagacacagctcaagtagtatcccctctgaaatactccttggccccgctttctgtctgcatagttagctcttctcccccgtgctgctccactgacatgcgcacacctttacagcacagcctgggcgtgttgcaggtggaaggtggagattcccagtcaaggggcaacacctgtatggttggaaaagttgtttgttttaatttcttgccctctcttctctcttctatttctttcctctcccataaatacacataccgcctatatacacacaacctgccctgaattgttttccttgaattgatgagttacgtaaatgcaatcctaagcacagttgttttcaggttgtcctaaccttttgctttattgatttttcaaggatccagagtgtttactgagtttcagaaattggattctgtacttatttttctgtactatcctagttttatgagaatctatttgctcagcattctctattcttttaaaagtgtttaagatttttgtaaacagttttgtttggttctttattttctggtgacatattgatctcaacataatgctattcatatacttttaattcttcttccaacactgttaggattgcattatgttcacccaaggaatccacatctgtacaaaatgtggccaggtttggctattccttcacattcacagtattctcatgatttctaacaattcttgtctactttgcctaaataagaaaatgtcatatactgacaattttgatcgtgaaaaagagaccttagttcataccagtgtcagagtctacttgcaaacattgatttccaagaaaatttctcaggtgtgagcaaataagcaaaataaattcagacctaagagaaaatagcactacaaggaacgcccagctcattcaaacgctctgcattttgagactagagggggcttggcctttggcaccctcacacctctcccctttgtctctctgtccctgggtgctgatttctctttctttgtgtgacagccactgtgaaaagaatggggttcactcaccacctgcattcctccacagccatttgatatctgctttcgataacagcagaggaaactgatcagtcatataaatccaatcctgagcatagttcctcgtttggaattgtaccatgctttatgccgaggacattttcaaacacggagggaggggatgtctgattcattcgtgagtaatgtaccagcttcctctccaacttgtctcccttcagtggttcacattctgactattcagtcggtttatcctttccaaacccagtatttgaatgcaactggcaaaggttgattgcctctttttttttttaatatatagacttggaaagatgtttctcaaatgtgatttgcggatttatgttattcagtcttcctggattaattgaacaaaaactggtaacactgctacacagtctgaatcacaaaattatgtccatccatttggctgaaaaatacgaaaacaaatacttgtataagttttcatgcattttagcactttctttacattggggaagttcaaccttcacactttcaagggcaatgaaacatttttgtctgacctacaatttattaatgggacaaaagcccatctgtcaatcagggctctgagagttcaatgtattttctgaacaatattttttacattatgtacaatggtaaaaacaaatgtccatttattcttctttccaagaagttgagtactttcaaccattcttaaaaggacaaagatgtttgctgacagaatatgaatttataaaggataatcttgaggatataatggcattctattctttttatctttactcttgccatatcagagttggataatagtctcaatcatatgttacaactagaaaatgcacaattggctttttcttatgctaacaggcagccattttcaactttttaaatgattataggactaagaggggatgcaaaaacagataagaatctgaataaaagcactatctgtcaaagaaacaacatttgtgtaataatcaagaaaccgtttagagcaccccctggaaacattaattataacacatgcaaatcattcctgtacaaagcttaacttgtttatctcctatagccacctgtatttgaattttttaataagctcatttattataaataaagcatgtaaatcaatctgggaataccttttctgtttcagaaatttcatgtaaatgacaggctgccacatacagtacaactatagaggggaaaaagtttctttactccctttcatatagttataccttcatatgacacttaaaaccacctgccaggaacttttaaaacatgttttagatgcacagaagcaaacccaaatgaaaaaatgctatgcagttttgcaatacatatataccacagaaagctttaaaaacattctaccccaacagataaatagatttggcccaaatctttttaatgtgagttttgtgggtaaaaaagattattgttcccttatttttccccatttgctgacgactaggattgtcatataaaatacattcctgggacatgcttatactaaacaaattatccactgtttatctgaaattcaaatttaactcagcatcctatatctttacttgctaaatctcagttgggatatgggcttactcttttttttttttttttttttttttttgagacagagtctggctctgtcatccaggctggagtgcaatggtgtgatcacggttcactgcagcctcaacctccctagctcaagtgattctcccacctcagcttccacagtagctgggactataggcacatgccaccatgcctggctaatttttttattttttgtagagatggggtttgcccaggctggtctcaaactcctgaactcaagcaatcgtctggcctcagcctcctgaagtgctgggattgctggcgtgagtcacagtgcctggcctgagctaactcttttttaaagagttaaaatactggttcctatttgtttttacttctctagtatgggaggctgttactgtggcttctgtcttggggggcaattttcgaagggcttcaagaacttgaaccgaggttagaggaaaaccacaagatggctaaagggtgggaaaagaagaaataacactatttaaactttagatgagaggactaaagtgatgaaacagtcaccaggtatttggagtggtctcacccaagggactgtgccaacttcctcattttttatgagggcaggcaaaaactggccaaaacacaagttaggataataagcatagtagctattattaaatgctagggtgtgctgcataactgaaggacagtgtttctcacagtttatctccaactctcatggccaacccatgagatgtatatcattatccccacgttttgaatataagaaactgacactcaaatcagaaggcatgtcagtgaaaaaggccatattcacatcccatctaagtctgtctgacactaaagcccacactctctccactacactccaccttgtctccagaatgttttgggctgtttaaatgtgattataccaaagagcagttgaatgcactgaaaaattctgaagattcctcctgtcccttcgattcactgttggaaaccattgtcaaggtagtgtctggctacgatagaagggatttttgacatggcctattgttttatctttttaaagtaaatgtaggtgcttttgatgatcataacactaactgttaagtctttaggcataagaatcaagcattcaactaagcatgtttacaaatttgctttcagcccagtggatctatccacttttccatttaggttgcacatttagatttcggagtttatcctgttatcttcaaatccacggactgtacactctttgagggaagaaactcttagtatctagtcaagtacgtggcatgcaatgggtgctcccaaatacttgattaatatcatatgatataatgtaatatgattcttcataaacagtgagtgtttataaatacagtattttaaatgtcattaggaatcttctattggaatcttaactttattttaatagacctacttttaaagttaataaacataatataaatgtggacagggctaagatttttccctaagatttcactctggcaagtcttcctggagatttagccatggctatttttatgactgtaatttccttaatatggggcctcagccatattccatcatcataaatccctttcttgcacttaaaagcaatgttgaaatattttccagtttctatatcttaactctttacttagatccattatttccattttgagattatcttatgtaaatattgtagaagattttagaattatataataagaaaatactagtataccacctcagaaatcttaactaatagatatgttttcaaatgcaaagtgaaatatttaaagtaattattcaagtaaataaagagaccatctttgtcccaattacttgaatattttacgtaaagttggttttatgcacttgactttgtgtttaaactcaagtttgtagtattgtctactggacattgttagctcaggaccttttcaggagcaaggaatgaaagaatcatttttaaacttatttaaaaaaagaaataaggaagaaaagaagaaattttactggctcgccttagcttaagacatggctggatacagatgctcagacaatcacatcaggagcctgcctccctccgtgtctgggctctctggcctcttgggtcagtttcatgctcaggctggctttctccacatagtggcaaagatgggcatcagacatcccaagttaacatcatctttagtgctcatgctgtcagaatgaaagaggccctctcccagcatccatattaaatctccaaagagattctgtttggccttgctttggccacatactcaaccctgaccaagctccgtgtcaagagaacagagttcgttgaaaggccagcctggtttgcacactcattctgtgttgaaagatgtagaccatgtgattgacagtcccaggagataggagagggagaattttcaaaagagttgccggtataagagacagtggattctgggaaggtaaaaagaggtatttattaaaatactgtgcctttggaataaaaatcttttccaggaaatgcaaataatttaaaacaattcaaataaggatcatacattttaaaacaattagaaatacactcagaagaactgaattgctcatttagtagatttcagataatattttctcctctttgaacctcagttttgtcatctggaaacacaggataatgcttaccttataaggtaatcatgattagaagagatgatggagctgaccatatctatttactataaagtgctatctacatagttataaattatgacagctaagaaaattaatccctaaagaaagcaaaattacctatgtcacggtttagaaagtctctctcttaagaagaaacttattctattgcctctgttgggttttttcctgaggaatcggtgtttgaatgcaatatacatttttgtaggctctgcaatgtttttatgatgaggacagtcatagtgttgacaattactcaatgaatacttagagatttgaatgtatcgctagatttctgggaaatgaaaagaccaatgtaagctagttgaatgagaaaaccagaggtgggcagatggtggacagattaagtcgctggttttaaaggtaggctgaactggtatttgtaactattaataacagccatcttctttaaaggaagtactcctaaatatcaatagtttagtggccaaggtgccattgagatgatcactcccaggaaatgttttgccagtgatattaccttaactttcatctgaaaagaaataaagaaatgttttatggatgattcactttcacctgatatgtgcacaacattttaagagaatgaattagtcagtctgtttgaatcatctttacgtgttccttttagcagggaactcaaagttggttaaatggctagctctatttcagaaagcaaaaataacagaaacagtgaaaagacagtctatattgaaagcctgatccagacacatcatgggggaataaatatatcaggacaaaaatatatgaaaagtgaaagtatttctggagtatttcactaccaatataaatattaaaatgctcacacagccagatctggcaagttacatagatgaggaagtgaaagcaataatatgccaagtcaatggcattggtgtaaaatgtaatcatagaggaacaatctcagagttgaaaattattagaattggaaaacactttgaagttctttagttccacccaggagtatgccattaaatatttaataaccatccctctgcgggctttaataacaagccctgatttgtagtgtttgccaatttctatggtgtcaatacagccaccatggctgattttaggctaccaagatgaggtcactgaaacacaagttgggaagagatgcacatagtaggctgtcatgagccagcacacagctggttcagcattataattttcaaataagaaagcagttgacctcagaggagttgggtgacttgcctgggtcatacaaataattagctgcactgccacaactaaacctaggccctctccagtgtttgacctcagaattgtgaatgcattatgaggaaagcaccatgattgattgattggtaagcccacgtgactttctgtcctagttaagttcccctttaagggcctccatagacatttctacattgagtttaaactatagtctgcctatctccactactggcctgagatctcactgacatttggaaagcgttttatttatctttgtatcttcagcactctgtacagtatctgacacttagatgcttataagtgtttgttgggggccatgtacgaacaatagagaacatgcattgacctgctatgtgccaggcagtgttcttagtgatttacatgcattaacttattgaatccttagaataactctcacaagtgaggtaggtactataatcctgcccatattttagatgagaaaatacaggcttagacttacttgcctaaggtaacatggacagtgattggatttaaaccctaaaatctggccagtgcctgtgcacttggcctctcagttgtcactcatttaactagcagttatcatcatagtgcccagctcagcgccaaatacttctaaaaggtctccctcctttccttaggaaggacacaaaacgtttcccagaaaagatctgatctgaccaacacacacctttgttaatggggaagggcctttattaatgggaatgatcaaggaaatggggcgtttttggtgattacattttctcattatctgaggtttaaacagaaacctctagtttaattaaaatttctgttgctgacaataggccctagtcccatttttttctttaattaaaaaagttaacctttttttgatgtattcacttgaaaaatggcatcaccatatggtaacagataatgtaaagaaggtgtaggagattaaggtactaactccaactgtgttctgtgagggtttttctttaaatagaaaatatattcttcttccccactgattttccatttcatcaaatgaagtaacaaaaagcctatttctacatgtgtacattttcttggattcttgtccactgagatttagtacagtgtgtgacttatgtgcgaaccttaagatatgaatcttattttaaaaacataatttaatataatatctctaatttttttgtttttgtttttattttttttagatggagtctcgctctgtcatcaggctggagtgcagtggcgcaatctcaactcactgcaacctccaattccctggttcaagagattctcctgcctcagcctcccaagtagctgggattacaggcatgcgccaccacacccagctaatttttgtacttttagtagagacggggtttcaccatattggccaggatggttgtgatctcctgaccacgtgatccacccacctctgcctcccaaagtgctaggattacagattattttgaaggctccttcaaaaagcctagaagaaaaaatgtcattcacacttcacactgcattaatggacatcaactaacatgcaaattggttacaatatttttctcccttttggcaataataattcgtttcctttctttcattataatttctacagaaaatacagcaataaattatatattaagctcaattttgttagatacactgataccatattgataagtgcagttaacttttcacataatatttatttttcccattgtgctctagatggtttagatacatatttgcagtttggtttacagtttgtatttgccctctagtacaacaaattgtccctaatccttttcttctatcccttgttattccctctaccagcaccaaaaatttgctagtacattgcaaaacaatgagaattacagataaaatagcaagcatttatatatactctatattgatcaaagtgctttcagagatgagatctctttttgatccttaaaatggtcacgtgagaatatctgaccctgggactcagaggtgggtgattgcctggagtcacacagctagagagggaaagggctagaatcagagggctgattgtctgacttctgttctagtgcatgctcccacctcgctttggaagctgcttcggcatagtgaagcacttaagagcatggatgggttcttgttagccagacgtggaattgaatcttggttctaactgtgtgattttagcaagtttgcttatctagaagagaaggataataatacttccttcttcacagggtggtgatgaagagtaaatcaaagagtttagcagaatgcttcccatatggtaagcactcaatacatgttcttgttatttttattattacatggctttgccttactgaggcttcatcttgtcctctggtccaactacagttctctagcttggcttatcccttcataacctgtacccccagtggcacgatcttggctcactacaacctccgcttcccaagttcaagcaattctcctgcctcagcctcccaagtagctaggattacaggcacctgtcaccacacccagctaatttttttgtagtagagatgggggttcacagtgttggtcagcctgggttcaaactcctgacctcaagtgatctgcccacctcagcctcccaaagtgctaggattacaggcatgaaccaccgcgctcagccaggaattttcattctttatcctcctttgagactcggctctagcatcatttccagtcgagttggtctcccttcctctgcattctgataactgttaaccatcaagtgacttgagcttcccagggaagggcatcatgtctttgtagacatccaataaatgttagtagaagaaaggggggtcctgccaataatcatatgtctttcccacaatttaaactccttttcaccctgttactactttttgcttgtcttccctttgataaacattctacttcttcatcacccattccctcaatttaacatctgatactactatagaaactactgccttgaagatcaacaaacgggttccatgtggaccaacgtcctccttgagaccctcacttggcttttgtgacacagtgcaatatttgctctcttgatgcctcactgaccttaaccttccttgactcctgcatagatttctcaactgtgggtatcccctaagatttaggccatttgccttctcttctttcatctagtccattcatgaacacacccattcctggttttaaccatcacctctgtgcagataatgtgcaaagtttatttctagtcggagtggagtctctgttactctgccaatcaagttctaaatttttattccttctagtgcagcagtggcaaatacctgacactcatgtgtctcactcaagacagatactgtttcacccaagactgatcatgccgctttcccagtcaaggcaggcttctcagaatccttctcatttccgcctctgttctttggcactaatgctctgtctgcccagagttttcattcttcacttgttccaggcacctgcttcctggtgaataatgtaaaacctgctagtcatccttataggagaatatgcactcatttcccagcagcacacccgactcaacgtggttaaaaccaatctaccattcccatatattcagcctaacttcccagtgcagtctaccctagttttataacttgttctactttttccagataactgctaatcatctttgtttgtctttgctttcttttttgcactgtgtttgatatattagggtatcaaatcctacttattcaaatatgtcccttattcattccttctatccttggtgctaccatatttgttctggctcttgttacctcattatgggatataaaaatagcctgtcaactggtctttccattgccaggatctctctgttctaagccaccctgcctccagatcaatcttcctagagtaaaaccttcattgtatgacggtctagctcaaaattccttaatgattattaatcacctcttaaagtccccaattcttagactattagtagggtaaaattatttttgatttggagtcaaaaaattttggacgcaaattttggctactacacttaaccattatgtaacttcgaatttcggcttaatttttattcatcatttattcagtatctatttgtttaacaccttctgcatctcaggctctgtactaggtacttgggatacaatgatgagccaagcagaccttgtccttgctctcctggacctcacaacatggtgaacttgtctctattgctcatgatcataataatcctaagtacaggctgtgcttttttcccttgatacttgtagcttttggtttgtgctatgcagggtattgtaataccatttgcagtgccacaataatcagcatatatgtgttatcactcagccacattgcagcttcactgaagggcaggggctatgtcccatttctcatagcgcaagcacagtgccctgcacataccagctgctcagtgatttctgatgtggtttttgtagatccagggttagtctttggcagtcatgatgcctagtatgtttttagaggctccctttgtcctatcagaattatgctatttaaaaaaaagtcatacctatttagtttatattcattctaaggcctctcctttccaacctactaccctgcctataactattataaggagaactcacaatgtttataacttgtgcaccttaagttttaaatactgaataacaggcccattcatgtttcctcatagaaatactgtctatatgcatacaatgaaatgttaaaataatgttctttttactaaatagctttttgacttggtaatgaacaatatgttgtttttccctgagaagtagttctaggactttagttctgaagattatgttgtattttatacattttcagcctcctgtttttcagttcccagtgatcttacattaaacatttgtctgtctaaaacaataggttaactatagccaaattataaccataccattcctctccacacaaaatcctataaacagcatgtgatcatattgcttctagaatttatgattgttttcttccaaaaggaagctaaatttagcctagtaattctacatgcgctcaagaaaacaatgcctgctgtgatttctagaataaatgaatgtgaaccacagttcctttacttgactaacagagaaagtttaaatatcaacctagtcattaaccacagttattaaaccacgttaaacaaccagcaaggggttaagaaagaaagttgctatgttttttctttcattgctgaatgagtctaacttagttactgtatcaaccttaatacagaacattgtttgcatctcaatggttctctaaaattattcgttcatggcttgagttctaaaattaaactatgtggagtcatgtccaaccgcacaatgcatctttatgtgaaacttgctagagtttttgttttccttctatgtaaaagtccagttgggaagctttatttctgatagattaaatggtataggtctttcagttttctcttcatttctgacaactgaactgctctcgccttgaacctgttttggcagataaacctctcataatgaaggcccccgctgtgcttgcacctggcatcctcgtgctcctgtttaccttggtgcagaggagcaatggggagtgtaaagaggcactagcaaagtccgagatgaatgtgaatatgaagtatcagcttcccaacttcaccgcggaaacacccatccagaatgtcattctacatgagcatcacattttccttggtgccactaactacatttatgttttaaatgaggaagaccttcagaaggttgctgagtacaagactgggcctgtgctggaacacccagattgtttcccatgtcaggactgcagcagcaaagccaatttatcaggaggtgtttggaaagataacatcaacatggctctagttgtcgacacctactatgatgatcaactcattagctgtggcagcgtcaacagagggacctgccagcgacatgtctttccccacaatcatactgctgacatacagtcggaggttcactgcatattctccccacagatagaagagcccagccagtgtcctgactgtgtggtgagcgccctgggagccaaagtcctttcatctgtaaaggaccggttcatcaacttctttgtaggcaataccataaattcttcttatttcccagatcatccattgcattcgatatcagtgagaaggctaaaggaaacgaaagatggttttatgtttttgacggaccagtcctacattgatgttttacctgagttcagagattcttaccccattaagtatgtccatgcctttgaaagcaacaattttatttacttcttgacggtccaaagggaaactctagatgctcagacttttcacacaagaataatcaggttctgttccataaactctggattgcattcctacatggaaatgcctctggagtgtattctcacagaaaagagaaaaaagagatccacaaagaaggaagtgtttaatatacttcaggctgcgtatgtcagcaagcctggggcccagcttgctagacaaataggagccagcctgaatgatgacattcttttcggggtgttcgcacaaagcaagccagattctgccgaaccaatggatcgatctgccatgtgtgcattccctatcaaatatgtcaacgacttcttcaacaagatcgtcaacaaaaacaatgtgagatgtctccagcatttttacggacccaatcatgagcactgctttaatagggtaagtcacatcagttccccacttataaactgtgaggtataaattagaaataagtatcagtctcaaaaagaatatccagggcttcttttgtgctttgtaaatggtgtttatccaaaatagttgcagattttttccaagaaaattgaggaattgaatcttcatttacacctaaaattatatctttaaaatgtaaatggtaactaaaagaaaaatgtttttacaattcagatttgcatgttcgtgacatttcagattatattaaagttatttcccatataagcttttttatatttacacagattttatcagatttacacagattttatcagatttacacagatttttatcacagcagcaattcccataaaacataattattgacatttctatataatctctgcaacatttacaagatgttcaagctaatttgtatgccttaaagaattgttccttatgagattatattctctcactgatacacaactgattaatctatattcttgacattacttaaaggaacttaactttaaaaaacctcttctgaaatgctggtaaataaaacatttttaaatgagctcgtatacttctctaaataacctgtaagagtagagaggaaatgtttgttcccaagtccttcctttagagcttgactttaatcatggacttccttctggaaaagacttgtgtctaccaagttctagcttggcactttacctggttggtatttgttatttataagcataaatattttggttgatgattatttatacttatatgaaatggtattttcttaggagctgttagagatattcttggtgctgtgatttaaatatagtaacagctaccagctatacctggagatttatcctgctagtcagttgatcacctggtctgagtgtttattgtggctttgagtttcttgatctgggccagatttggaatacggacctgactatgaccatcattgaatgaacaaatagtatagcttttctaaagacagtttgactttggcatggtatgtttcacttactttaacaggtttcagtctaagatataaaggttataattgcaatcaggtagaacattaaacatgtcctcagtagcataaagtatataatttgctgaggggtaaaggcatatgaattcagaaacatttggttgacttttgctgaaatgtctgggacacttctctagatggaaactatagttaactttttatgatgctaggaaaatacttccaagaaagtcagttcatcttttggtgaactaaaaacaaaacttccttcctctctcttccaaagtctatgaatatacataacataaatgcacatacattccaactaagacttatttccccctacatacatttaatatatgttgcaaagaagcaatagaattccttatgaagctcccccttttctttactagaaactacaaaagaatgaaaggaaacaaaatgattttcagaaacctgggattaggaaataaaaatataatattaatagcattacagagaagatatttttctgcatccagtaagttgattctgagacacaagttttaaaagagtctattaggaattcctccagggctcctagagcacatggatttgctatttaaatctttctttgttaaaaattaaaaagaagggtagggcaagaaaaaaattaaaaagagaattcataaaggtatattgatatctcattttttaaattttgtacatttcaatccttagatgtaaaaatacttatcaattctagaaattctcaaaacacatctgaattttatcctacccttttgacttttttagtgttccaagggagacaaacagacaggattagccaatgaaattcaggtcagttttatcgcccaggaaaaattcccaaaatgcactagccacacctgaaaccattatcactcccatcacaaaaattcttgcgggaaacaagatggaacttgccaacatagtcttcttacaaaggaagccaacttttacactggccaaattccatagacaaataccttcaaacctcctctatttatttgcctgtttatcttctctggttacaaagatcaaaattcttctgagactgagactacacatattctctctctccatataccccatccagacctcagattgttccaataatgagcatataatcatttcctagcttaatgccaaaatgaaggcacctagagccattcatcacacacaaaaaaaacaaaatgattacaagatcaaagctgtttagcaggactctcaagcaataagatgactccattttgtcttggcagatttacttggccagaaatcaagtgacccttttaataatttcttggaactgagtttttactttggcatcaagtttggtgaaaagacacacatattgtagttttgttattaacatctctaatacatttataaagggactcttgtggacaaggttaagaaagctgagctgcagcagtaactttctacttatgcttctgcccagtcctcagtgttgacacattgctgaaagagggatttcctggcactccaagagctctccaccatgtgcaaaaagtgtttctatcacaagatcagataatgggagtgccagggacgggccttttacattttaggggtccagcaggtgtaccaggcctgacttgcttgtttaggatcacatattttgttgcttttcccagtctcacatttcatgaaatatgtctatgcaaactcttcacatgcatcttctcatattgatgacatcacaaaagccctcttttgagtcatttgataattcccagtactcgtcatcttcacccataagctatttgtgcttcagaactctttgtctccacatatgatgctgtttctggaaacttatcccaagccacaaatgcccacttatagaataccagtgttgttgactatgtcagttgttctataagaatatattcttgatcctcacaatgtgtccattttttatgttgcttttgaaagtgattctaaagaatttgtttacagtgacttccaatattgagtactatgagattatacacccacaaataattactaaatctgtttaatatctttacctcctcctttacccattcatcaatcaacctctataagcatcctaaattagtattgattgaagttgttttaggctaatgcatattctctaaatagcatattattattcaaaataaaataattgagaaaattgtcccataatatggatggaacctttgtaaaggcccatatgtagggagaaaaaaccctcatctctatttgaggataagcagtagcaaaaatttcattaacttgtttaaaattaagtggaatttaattttaagactgtggaatctctaacagtcttttacatataagggattgattaatgtgacaatttcaggaaaaaaaggagaatcagtacacattggcccaatctcctacaaatgagaatcaatacagaataagagaattttttaaatccccaaatcagcaaagatcctgttccctaagttatagaatatttattaaaacaagtgaaatcgtacattttagaaaaaattttaatcaaagttgaaattagaaaagcattcttgaaatagctctcgcctctcagaaaatacaattagcacacaacactgtttttcttgaagttctattatcaaagttttgctctatagataagcatttgaaagacctgtagcaagtattttcgccaacatcttgatgaccttaatgaccaaagttggatcaagtgaaggggaaaagcatttggtgccagacacacctgggtggaagtcctggtttactgcataccaaccatgtgacttctgccacattacctgacttcttggaggctgagtctcattggtatcatgcagataacaatacctacttcacaggtttttgtgaaaatttgggataatatatatgaggtacctggcacaagatgactataaatttagcccgttgggagacagcatggactaatggaaagagactaaaatcagagatgttggttcaaatctgaaccccaccgtcttctacctggatggccatgaaagcattatttaaactctgaacccatcgtcctgcgtgcaggactatagtgtggacaagtatattaataacatctgtaaaaggtcccaacttggtccttggcacaaaataaatagcagctattattgtaaggaatacttgcgtaaagaaagacaaattcaaatgattggattattctctggaagaggcacattctggttctattgtttacaagtctttcacttccctctctaactgttatgagtgacctacctccataatggttaatttgtgttatgttgttcttaagattataatagttccaaaaaagagatggggtgaggagtggtggtagtttgagggggcagaggatggggagaaagacaattgaatcaaaactgtactatagtcaagttagaaggtataaattgttctccttcctctcactttcaatcctaactatccatgacctaagatattactcttatgtactttgtcatatcttgcattcaagaatttgcagataatgcagttttagaaaaagtcaacctcataggttgtttgtattgggcttccttgtttttaaatatcatttatactcaaattcaaagagtagccaactgcttcccaaaataaaggaaacttaaggtagtaattttccatctccgtttcacagaatgccaaagttaaagagtcactactcagagccatcaaaggaagaaagcaaagtgattagaacaattttaaaggaggacaaaaatcaaaacaagatgcaaacaaggaataataggaataggcagaaaaataaacatacagtgatgtttctttattatgattataaagatgatagatgagtaaaatcgagttacatttaagttgtaatggaagaaaataattgcagccttccatcaggaaaccacaaggaccgttattgatctgtcatcctcagggcatgtctcgtaatatttaataaaataaacaaagatttataacttttataggccatatatctataatctcccacaccacttgaactgtgaatgtggagtcaatgttacaaataacatccatgtgattatactggtttggcatgccttattccaacaatctagcactctcaagagaatgtattttgtattagggatgaaaaatgtgaagccagattatagagttttttacttattgtgctcaaaaatgagaaaatgttatccaatatgaaaaatgttgttaaggattcttcattcttaatattagacagcctttcaaacctaaatattaaatatcttggccatatgccaaatgtaatagctaccaaagcaaaatcttgcaagaaagaaaatccttgaggtataaagattcaatgtactttttaaaaaatgtaagtaaaaggttattaattttacatttcatttctttttctttcctagacactacttcatcctctcataggctcagggagtcactgcttcctaacttctttattttaattatccatgctactcattccacgaaaagtggcatattgcattattttattaaaagaaatttaaaattagtttctttccagaattttgtaacgccccctgagatcactgggcacacccttggggtgttagaaaacatgttacaaaatgaacctttaattccttttgctttttcccttcctcttgctgactgctctttaaaccattacatggctcattcacaagtctctctaccccaggaaagatgaaaaagcaaaggcatgatgtttttataacctaatagcaagagaacacagtgctgaagctgtcaccaaaactgtgggtaggttttacccgtgggttatattaattcatgatatgattgataatatctctcacttgtgtggggaatgaagcgttaactatgccgcatgcattttaaattaatttgacattattcttaatgtcctttcaagcaggtggcattataacctgtgtcttatttaggtagttgatttctacacggagattcatctgataaaactgatatcgcaaacgggaaggagtttgtacaaaatgaaataaatcttaaagttgatttttgtaaagcccaaatgttaattaaaatctttgaatccacaactctgatacatgatattttcattgacataaacatgattagcgatttctggaagcatgtgggatgctgcattgataaggatatgaacctccttgagtaataatgtatatttttactccgaatactgtttcacattttgggtgttacatccttacttcagacttctgccttatcagtggccatcccaccctatgttcttatctcctcagtctaaaaagaaaaatggggacccatcagaatttggatagaagaccctccaggaatttctgccactgcttattcatgggttggcacagacactgattcagtgggcacacagagttcagaatgattcagagcccagatatgtgccctaagtcacatctccagcgtccagggaggactgtaaagtgctcgttatcaggaaaatgaaaccaagggctcagctactcctgaagtcattaaaactccttcccttgatttttttttttttttttttaaatagtatatgtggtaaccgaatctaggatcctggatacattccagtctgctaattacatatttttttctaactaaaatgttccaggcaggttcatttgcatgtgaattacttgctgagccatgttgacttcctattctaaaagcctcactctgccttgggaagcagtttactgcacttcaccctagacctagtctaatgttggagcagacaaagtgtagctacccatatatacttcaaaaatattttccagtctccccacaagaggaaagaaaaatgtctagcaattgcatgctaatttagaccaaagctttgttttaaccattcttggtgatcacaaatggggaaaaatgatttatgaacagtataactataaaacaaacaaaaaaaaaccattgtgaattcagagtgaagtctgacttcatttgtcttatttgggtaaatcagcaaaatgttcatcagtcagaggacattaaaatggtagatgatacttcaaatcgtgccctagataaaaggagagaattaaggttagttttgatttgtaaaccattctcttcgaaggctgattttataaaaattaagtttgctgagtcatcatctcaaaatatatagttattcatgattagttaaaatttgtgtctgtgtatcaaagaagtaaatttgtatgatattaaattttctaacaatgttttaaattttaaaatgtccgattaacacttgcatctagcaaccagtctactaactaaactataggtgaagtcatgctcaggaaatggggaaaatgcacagattaaattggtctgttagctctgagtgaatcaatagtatttagtgctaatgcactaaggagattacaagcactaatgcagtagcagtcaatagcgaaaactaatatctctaaaaaatatcttgacaataaaatgtgcaatattttccatttatcttaagctaattacattacctgcttgttctttcatcttattagtttaagccaagtgctagaagcctaaccattttatttagtgcataaaagggccaaaaccttgtaatcattgttttcagcaggagacagaggaaaggattaattcatgtaaccaagattcaaccagaaattcaacagatatttatttagtctctaaacctgatagtattacaatggagaatgagctagactgtacctgtcttcaacaagcagatagactagtgaagatgacagtaaacattcagtcacaccagtgaacaaatacatcatgataatttatgaaatgtgctgtgagggaaataaacatctgtgaatgcaaatgagagggaatatctaaatttggtagttgagtcacaaaaggctgtcctgaggaggtgaaagctaacctttatataaagcttaaaactttaaaaaagcaatacgtctttagtacacaggcaaatatataaactaaatatataaactaatagtcattacttatttcacaagctttacatcttaactacaagctgctacattaaatcagctttcttaagtggtttgtggtcattagtgcatactatcttacacttagaaaaacattgcaagaagtagtacaatgctggagaatttaactttttaaaacatttcctgccttaaaataaacagcagtaaatgtgtttaaacattcttttgatttctaaatgaattaagttactttttattatgtggttcttcttcatatgaagaaaataatatgtagattactagaagctaagaacatactttagatcctgctcacactcactgcctttcctggcctgtcaccttaatcagcttctttgaaaatcactgtttcttacataggccaggttgtttcttccttgtttccctcttcttccttctatggccaacccttgggaccccgtttgtcagaagaacatgttcctctttggggaggaggggattgtccttttaccaataagttttatgaccaagagaaacataagaatctgagaacacacaaaataagctcttttgaaactatcaaaattataaacattaatagaattcaagggaatgtgatgctgaagtgatcccaagtcacattgtctttctgcctctgtgcactgtactctgcacaattgcatccatttttagaccatttccttctcatgagaatcatgtgcatggagggccaaaggagagacaagtgctcacaaggatatcatgagcacttatgaatgtacaaatgagtgctctccagtcagtgccatctttatattgttccggtttataggcaatgccttcatctttacctacagacacatgttgcctttctgtttcattttaatcctgttcatctatacatatttaatcacacaaatatctaaataagtttatgtcttgtagggaaggcactttgtcatgcttctttgtacctaagcatatgctttgcaaatcataaacaatagtgttgattttatttgatataaaaacttggattctcaaaagaaatctatgtgttcacacgataaacagagaccatctgaattgccaaagtatgactgaatcataagcagtattgttttagtcatctttacagaccaggaagatttgaaatacaggtgtaaaaagatgtgtgaggcatcaaaagaaatattcacctttctttgtgttcattttttttatttttgcttggccgagaaagaaggggtgttttccaagggaataggaggcttcagggcttattcctgtgcctacaagtcagagaggtcactggcttgccccttcctgaaggctgtaattacaggcagaggactatttattttcccgtaaggcgaccagaatcttgagtgtaaaaaactgtttacaagagtacactgtgtataggggttacacacaacctcaggaaaaataataggaaagtgagactatttttcttcatgtattcaataatatgagaaggtccaagactctggaaatgttctaaagtacaataatagagatgaatatgaggtcaaattaggtgatcctggggcttaaggaactgaattaaatgaataaagaagaggaatttctaatagggcataatctaactgataatttgttaaatgtaaacttatttgtggctccaacatcatggtaaacaagaatgaataaatgtattagtaagagtaattgagaagtatttctaatgtgaaaaacaccaattacattgggtttatctggcgccaatgtggaaataaatgagcaatatttcttactctcaactaaacttactctcactttcagaactgttataggaaaggtattgattcaagtagagttgggcatgcaaagcacaagatcaattctgttactggcctgatattaaggatattagtcagtgtttgaaaaaatgatttgtaatatataagtagtagtttaacaaagtaggtaaaacttgtaattaatttcaaaaggtcaaagcagagattattgacatgtacaaagaggacccgctttatatgtgcctgctttgaaaagtaataccgtagtatggtaaattgtgactaattctgagattttctgtctagattctttttaaaaccaaatgcttaagaaaaaaacatgagacatgagtagcaattacattttttaggctgagtaggtagcataattgcctcatgcctgcctcctgtctccatttgtttttagtagattttgcacagaaaaacatgttgacctcggtactgaaattttggagttcactatttgcggcacagttacagatcacagaaaaaaatgtacaacaggacttcaccacacctaacaaaagaaagttttcttattaaaaaaaaaaccctccaaattattgtgagatctagggtaaccatggtgttaactatatgctatttgatatcttataaccctggtgataagataacaatccaattgaatgcagatgaactcatgaaaaaagaaggattatgaaatatttggaaagtaaacacctaaattttcataagtaaatattaattatttgtgtgatctttagatatgaaagcttcccctgcatgcacttggctcttggaaccagctgttaaaactcccagcaccttagttaataccctgtatgctggtggttcaagaactagttaagaaacagtcacattttctattttcactgccaatgtataataaaatctctgttccagtgaatggctggccaattattttaataacgatgttggcatggcttcattttacctttcttgctattagcaaagctttccttttgtactctgaagtacgggtaaatcacaaattaaactgagctgttgtttgtttaatgctgtgtttcctgctaaccttattcttgtctatcaacctgaacgtagttccccagtggctcagaaaaccctcaattgggattaagtaatagtttacacaaccttgctcagtcattaacctgtgttgactttctcattcttgtgttccagcctcatttaagagtttcttaagcactctatccagttgctggtttggtgacaactaacaatacctatttaatcaagaaatttaatatttccaaggaatcatttatcgtatctcagacttcttcattaacataatctaattcagtcttgtattccttcttcaaaataaagcctggtttcattcatagtaaatatgaagcttaaaaatttttacttcttttcttctctatacacacaaagcagaaagagaaaattgtatattatcattccagacaggtttttttttttgtttagtgtattgacattgatgccaataagataaaactagacctcagtggctcctcctcaactccacccaatctatttgtctccaaagtgctgttggagtaagtaatctttgttaagagcaaacctatttgtatatctgatgataatctgagggataataatatgatatttaaggagtttctgtccttggccctgactatttcctggtcctccttcacgcccagtgatgtgctggtaaatgttaaactctggggggaggggcagcagaagcccctaatttgtagcatttgccaatttctatggtgtaaatatcccactgagccagtttcaaggtaccactgaaacagcgttagtcactgaacaacaatgaggaagagatgtacacacttggctctgtgaactgttatgagatggttcaagcacagcactgccaccctgtcctacacgcaacctgtcattcttgtagttcccagaatccatcagcctccctcacaaccctgccttaacacgtgtagcttggtccacttcagattccctttaacactcattttgtcaagtgaacactttttccctattctttaaaacttccatgctggcattttccttccccaggacatttttccctagccttcaactcatcccctgccccccatattctggatttgttgcgtttcctgagcacaccagtagcactctgcttatttctaccatgtctcttatcacactccgtggtaatgtgtccaacagttccatcgttagccccctgaggggatgaactatgccatttatctccacagtcccagcacctaatacaatagcttgaacaatatatacatttatcggatgagcaaagaagtatgacagagccctgtatgtaaaatatattactataaatagaatgctgattcataaaaataattatttagataaaacagtttttccgtctctcccctaaatccctaaaaactaatttatagaattggggagttttcaagagctaaattagcactggagaaaaactggggagttttactcactattacctatgcccctcccgtcccccccacacacaccctccttcattcaccagtctgcaatgaagattgatcaaagaacaaagaagaagaaaaatgaaagaaaaaggaaagattaagatagggagggtgaatagataggaattccagagttttgtaatcgaaatttggaactcagaattaaagtcattaaaaggagaaagagggaatactttctctgctcccgtaaggttttctcaagcctttcaacagcactcaccctttgagcgggtgataccatctgtaagagggactttacgcaatgctttagtgggcgtggcttgagcagtgacaccagtagagatacccccttgaaactttcatttgaagtccacagattttcactattggtcaccaatccatgatttcaagttgaaaatgatatatgggttaaggaaaagaggccgggcgcggtggctcacgcctgtaatcccagcactttgggaggccgaggtgggcggatcacgaggtcaggagatcgagaccatcccggctaaaacggtgaaaccccgtctctactaaaaatacaaaaaattagccgggggtaatggcgggcgcctgtagtcccagctacttgggaggctgaggcaggagaatggcgtgaacccgggaggcggagcttgcagtgagccgagatcccgccactgcactccagcctgggcgacagagcgagactccgtctcaaaaaaaaaaaaaaaaggaaaagaagttaagggcaaaggtctttatcaacaccatccttcctgtggccacaggatcgtaatcccagtggcaacattcaaaggcaccaagtacgtgcttggtacagagagaagctttcctgagcttggccttggtgtagatgcagtgagaactgagtaagggcctctggcagggaccttggctgctgagaaggggagcccacagatggaggtttctgatcaacaggtcctatcagaaacaaggggagcagataagtaaagagtctcactccacggtggcaagatggaaaggagggataagaggtcatgacagttggattaatggcaggctagaatatagtcatgggcttgaacgatatattgggacacaattgaaggactcttgtttcatccatcgttcatctctcctggccctctgtgaagacatttatcacctgtttctattgaatgtgacactgttaggcacataaacagaccatggctcttaccacctccaagaagaactacttctgttttatttgttagtgcagggtaattggtgttgtgtcttctgaaaatctcttatacttctatgagtaagtgcattgaaattgtttctgttaactaagtagaggaaagcagaaaacctctttgcactaagcattaaaaccttcctaacttggaacaattttctttatgaatcactctgtcactcctggctatgattgaagtgcagtatgaaggctgctaaccaaaaacacatggacacagtctgtttcagatctgattcaccttaggaaatgatgataaagaagcaaaagttttaacacttagaattccaaggtccatatcattgtagaattgattcttttgaattgtggtggtacctcaagagaaaggatttatttatttcatttatatttaaatgcgtttgtatacatatgtatataaacccatatacacatatacataaaatatattctgctccaagtatttatctctcttttctctttactaatccagcttccattaagaactggctcaacttcgacctctgccatgagccttctccagctgtttaagcccacacagatcttatttttttcctagtcttagaggatttactgccagtacagtgttttcagaatgtaactatcaactgagttcttatactttgcatcagttagctattgtacgtgtcaatcttttgtctccctatgtagaggctagacccaaggtagaagcatttgccaggattgacaaacgatagcctgtttttatattctcaacaagtgaaaacttattttgtttatatttttttccctttttatacagttaaacactcacatgcacgcacacacacacacacacacacacacacacacacaggccacagggaccctatggccctcaaagactagcatatattctatctagccctttcccaaaaaacatgtgccaacccctgcattagagaatagtgtaaaataatagtggacagataacaggtccacaaattttggagagccatggatgaccttacttatgaacttaagtaattctcttcaataggtgtgagtgtttccattttacagatgatgaaattgaggctcattgatctaaacaattggattttgtcttcataggcattatgagggcttactagaccaacaatagtgataataataactgtttagttgcacaaggcagggatttatgtcttttttatttgctgccatatccttcagcacctagaacagtctgtcacatggtatggtattatattcattttccagagctcccataacaaattaccacaaactgggtggctgaaaacaacagaaatttatcctcacatggttctggaggccagatgtctgaaatcaaggcatcagccagggccatgctccctctggaggctctagggaggactccttccttgcctcttgcaattctggtgtcccaggcatcttaggttgtggcagctttactcccctctctgcctccatctttatgtggcagtccaccatgtctctctgtgtcccctcttcttataaggacaacagtcattgaattcagggcactcactaaatccaggatgatttcatctcaagatccttaactaatcacatatcaaagagcctatttccaaataaggtcacgatctgactttccaggtggacatgaattttgggaagacattattcggcctactgtaggtcttctaaatgaagtgaccatttaatatgtttctggcactggattcatttcatttaagcctcaaaacaaatctgttatgtagatatgtgttttcccactttacaagtgaagaactgaggtttagagatctaggaatcctaaagctgcacagccaggaagggcagggccacccctgacccaagttctctgctaggttagcatggttgtcacaggacaagctgagaaggtatttagggagcattacactaaaaagttgtagaagtcggcttaaggaagaagattctaaaatcaaaggaatcagattgtaggaggccatgtaggcaatttcctttaattcaatagaagagagtataagaatcagccaggcatggtggctcatgcctgtaatcctaacactttgggaggtcgaggtcgaaggattgctagagcctgtgaattcaagaccagcctgggcaacatggcaaaatcccatctctacaaagaaatacaaaaattagccaggtattgtggcacatgcctgtagtcccagctactctggatgctgaggagggaggatctcttgagcccagaagggaagaggttgcagtgagccaagattgtgccactgcactgccgcctgggtgacagagccagagcctttcaagcaagcaagcaagagggaaggagggagagagggagagagagagagagagagagagagagagagagagagagagagagagagagagagagaaaagaaacggagagagagggagggagggaaggaaggagggaaaaagagagaaagaaagagaaatatgaaagaaagaaagagtaaggaaggaaagaaagaaggaaagaaagaaaaagaaaagaaagaaagagaaagaaagaaagaaagaaagaaagaaagaaagaaagaaagaaagaaagaaagaaagaaagaaagaaagaagatatgaacaataaaggaaagactcaaagatggttcagatctcaaacttacggagagggtagctattgatgcattgagaaataggaagctggaagaggaaatcagtttggagagaaaagtgatggctttgaacatcatcaatggcgtattcaaacatagcttgaaggcatttgcagagacagggctggtcctcggaagagatggcaacggggtgtgtagagttaggtcatcaccacgaggctgtgagggcagagccacagtagcttccatcaccttgtgaatcaccagtgctcagcccgtggctggctggccggatgcctgcttatgctgtgctcccggctgtctggctgcacacacaaccgcagagcatgccctctctggctagggcagaaagaaattgaagcctcttaaattttgccccccccagctttgctcccttgctaggacttccaggccatgactattgaagccatagggcaggattacttcctcaagaggcgttagtggaaacagatgtgttgaggaagcctctttcttttcaactgtgccctgagcacatcagatggagtcctcttcatagcacaaaacaacttggtcagattcttagggtttgaccacagcaccctaacagcctggccgtgcattaaggaccccaaagagaaggatctgctttgccagagagctgactcttctgtattttacagacaattctgaattcaatgtcaacatcttagacatctcagtacagacagtaaagagttaaaatatgtctataagaaacagcgccagaccctgaaattgaaagctctgtgcctccctgcgtgcagtcagttccacactgtcctctctcccagttctatttaataaaaaaaacacatgagtgaaatttagggaaataagaattcctgaaattaaagcaattaagttttcagtcaactgtatgaaaagctctagacaaagaggtactttctatttcaaaatatgtatttcccagaaaaccattaccatatctagctagaatttctacaaagaatgattatgaataaagtatatattcaaatgcttctggtaatttagtcatggtcaaagaggagagaaaggtgatacaagtgaactggcaaagattttacaagatagtacatttttaaaaattttatttgcaagactgatttaaattatctatagatgagctaaatctgtcctatagatcaattaaatgaatcactattttaaatatatcacattcttaattacactgaattaaatataattacatattcactgcatacatcataatgttaattaggggaaacattttgaatcaaatatattgagatatatagcacttcaattttctttttataaaaaaagctatatgactaagtcaggtaaaaagaatctggcaagtactcatagaaagctaaaggaagactagattaattgatgtatcacatcaaggcttacaaattgtagaggaattcctattctttaactctatgacagtatataagactttgggctaaggaagcaagtttgcaacaagtttttaaaaaataataaaacaggaggcagggcacggtggctcacacctgtaatcccagcactttgggaagccgagacaggtggatcacaaggtcaggggttcaagaccaacctggccaaaatggtgaaacccagtctctaataaaaatacaaaaaagttagccagatatggtggcgggcacctgtagtctcagctattcaggaggctgaagcagggaattgcttgaacccaggaggcggaggttgtagtgagccgagatcacgccactgcactccagcctcggcgacagagctagactccatctcaaaataaataaataaataaaaattttaaaaaataaataaaataaaaaataaaacacattgtttaccattgtttctcagagacatacgattattttagaagtggataagccttttttttttatactttaagttttaggatacatgtgcacattgtgcaggttagttacatatgtatacatgtgccatgctggtgtgctgcacccactaactcatcatctagcattaggtatatctcccaatgctatccctcccccctccccccaccccaccacagtccccagagtgtgatattccccttcctgtgttcatgtgatctcattgttcaattcccacctatgagtgagaatatgcggtgtttggttttttgttcttgcaatagtttactgagaatgatgatttccaatttcatccatgtccctacaaaggacgtgaactcatcattttttatggctgcatagtattccatggtgtatatgtgccacattttcttaatccagtctatcattgttggacatttgggttggttccaagtctttgctattgtgaataatgtcgcaataaacatacgtgtgcatgtgtctttatagcagcatgatttatagtcctttgggtatatacccagtaatgggatggctgggtcaaatggtatttctagttctagatccctgaggaatcgccacactgacttccacaatggttgaactagtttacagtcccaccaacagtgtaaaagtgttcctatttctccacatcctctccagcacctgttgtttcctgactttttaatgattgccattctaactggtgtgagatggtatctcattgtggttttgatttgcatttctctgatggccagtgatgatgagcattttttcatgtgttttttggctgcataaatgtcttcttttgagaagtgtctgttcatatccttcgcccactttttgatggggttgtttttttcttgtaaatttgtttgagttcattgtagattctggatattagccctttgtcagatgagtaggttgcaaaaattttctcccattttgtaggttgcctattcactctgatgatagtttcttttgctgtgcagaagctctttagtttaattagatcccatttgtcaattttggcttttgttgccattgcttttggtgttttggacatgaagtccttgcccatgcctatgtcctgaatggtaatacctaggttttcttctagggtttttatggttttaggtctaacgtttaagtctttaatccatcttgaataaatttttgtataaggtgtaaggaagggatccagtttcagctttctccatatggctagccagttttcccagcaccatttattaaatagggaatcctttccccattgcttgtttttctcaggtttgtcaaagatcagatagttgtagatatgcagcgttatttctgagggctctgttctgttccattgatctatatctctgttttggtaccagtaccatgctgttttggttactgtagccttgtagtatagtttgaagtcaggtagcgtgatgcctccagctttgttcttttggctcaggattgacttggcgatgcgggctcttttttggttccatatgaactttaaagtagttttttccaattctgtgaagaaagtcattggtagctttatggggatggcattgaatctataaattaccttgggcagtatggccattttcacgatatggattcttcctacccatgagcatgttcttccatttgtttgtatcctcttttatttccttgagcagtggtttgtagttctccttgaagaggtccttcacatcccttgtaagttggattcctaggtattttattctctttgaagcaattgtgaatgggagttcactcatgatttggctctctgtttgtctgttattggtgtataagaatgcttgtgatttttgtacattgattttgtatcctgagactttgctgaagttgcttatcagcttaaggagatttgggctgagacaatggggttttctagatatacaatcatgtcgtctgcaaacagggacaatttgacttccacttttcctaattgaataccctttatttccttctcctgcctgattgccctggccagaacttccaacactatgttgaataggagtggtgagagagggcatccctgtcttgtgccagttttcaaagggaatgcttccagtttttgcccattcagtatgatattggctgtgggtttgtcatagatagctcttattattttgaaatacgtcccatcaatacctaatttattgagagtttttaacatgaagggttgttgaattttgtcaaaggctttttctgcatctattgagataatcatgtggtttttgtctttggctctgtttatatgctggattacatttattgatttgcgtatattgaaccagccttgcatcccagggatgaagcccacttgatcatggtggataagctttttgatgtgctgctggattcgttttgccagtattttattgaggatttttgcatcaatgttcatcaaggatattggtctaaaattctcttttttggttgtgtctctgcccagctttggtatcagaatgatgctggcctcataaaatgagttagggaggattctctctttttctattgattggaatagtttcagaaggaatggtaccagttcctccttgcacctctgatagaattcggctgtgaatccatctggtcctggactctttttggttggtaaactattgattattgccacaatttcagctcctgttattggtctattcacagattctacttcttcctggtttagtcttgggagagtgtatgtgtcgaggaatttatccatttcttctagattttctagtttatttgcgtagaagtgtttgtagtattctctgatggtagtttgtatttctgtgggattggtggtgatatcccctttatcattttttattgtgtctatttgattcttctctcttttcttctttattagtcttgctagcggtctatcaattttgttgatcctttcaaaaaaccagctcctggattcattaattttttgaagggttttttgtgtctctatttcctcagttctgctctgatttagttatttcttgccttctgctagcttttgaatgtgtttgctcttgcttttctagttcttttaattgtgatgttagggtgtcaattttggaactttcctgctttctcttgtgggcatttagtgctataaatttccctctccacactgctttgaatgcgtcccagagattctggtatgttgtgtctttgttctcgttggtttcaaagaacatctttatttctgccttcatttcgttatgtatccagtagtcattcaggagcaggttgttcagtttccatgtagttgagtggttttgagtgagattcttaatcctgagttctagtttgattgtgctgtggtctgagagatagtttgttataatctctgttctcttacatttgctgaggagagctttacttccaagtatgtggtcaattttggaataggtgtggtgtggtgctgaaaaaaatgtatattctgttgatttggggtggagagttctgtagatgtctattaggtcctcttggtgcagagctgagttcaattcctgggtatccttgttgactttctgtctcgttgatctgtctaatgttgacagtggggtgttaaagtctcccattattaatgtgtgggagtctaagtctctttgtaggtcactcaggacttgctttatgaatctgggtactcctgtattgggtgcatatatatttaggatagttagctcttcttgttgaattgatccctttaccattatgtaatggccttgtctcttttgatctttgttggtttaaagtctgttttatcagagactaggattgcaacccctgcctttttttgttttccatttgcttggtagctcttcctccatccttttattttgagcctatgtgtgtctctgcacgtgagatgggtttcctgaatacagcacactgatgggtcttgactctttatccaatttgccagtctgtgtgttttaattggagcatttagtccatttacatttaaagttaatattgttatgtgtgaatttgatcctgtcattatgatgttagctggttattttgctcgttagttgatgcagtttcttcctagtctcaatggtctttacattttggcatgattttgcagcggctggtaccggttgttcctttccatgtttagcgcttccttcaggagctcttttagggcaggcctggtggtgacaaaatctctcagcatttgcttgtctgtaaagtattttatttctccttcacttatgaagcttagtttggctggatatgaaattctgggttgaaaattcttttctttaagaatatggaatattggcccccactctcttctggcttgtagggtttctgccaagagatccgctgttagtctgatgggcttccctttgagggtaacccgacctttctctctggctgcccttaacattttttccttcatttcaactttggtgaatctgacaattatgtgtcttggagttgctcttctcaaggagtatctttgtggtgttctctgtatttcctgaatctgaacgttggcctgccttgctagattggggaagttctcctggataatatcctgcagagtgttttccaacttggttccattctccccatcactttcaggtacaccaatcagacgtagatttggtcttttcacatagtcccatatttcttggaggctttgctcatttctttttattcttttttctctaaacttcccttctctcttcatttcattcatttcatcttccattgctgataccctttcttccagttgatcgcatcggctcctgaggcttctgcattcttcacgtagttctcgagccttggttttcagctccatcagctcctttaagcacttctctgtattggttattctagttatacattcttctaaatttttttcaaagttttcaacttcttttcctttggtttgaatgtcctcccgtagctcagagtaatttgatcatctgaagccttcttctctcagctcgccaaagtcattctccatccagctttgttccgttgctggtgaggaactgcgttcctttggaggaggagaggcgctctgcgttttagagtttccagtttttctgttctgtttttttccccatctttgtggttttatctacttttggtctttgatgatggtgatgtacagatgggtttttggtgtggatgtcctttctgtttgttagttttccttctaacagacaggaccctcagctgcaagtctgttggagtaccctgccgtgtgaggtgtcagtgtgcccctgctggggggtgcctcccagttaggctgctcgggggtcaggggtcagggacccacttgaggaggcagtctgcccattctcagatctccagctgcatgctgggagaaccactgctctcttcaaagctgtcagacagggacatttaagtctgcagaggttactgctgtctttttgtttgtctgtgccctgccccgagaggtggagcctacagaggcaggcaggcctccttgagctctggtgggctccacccagttctagcttccaggctgctttgtttacctaagcaagcctgggcaatggcgggtgcccctcccccagcctcgctgccgccttgcggtttgatctcagactgctgtgctagcaatcagcgggactccgtgggcgtaggaccctccgagccaggtgagggatataatctcgtggtgcgccgttttttaagccggtccgaaaagcgcaatattcgggtgggagtgacccgattttccaggtgcgtctgtcacccctttctttgatccctgaccccttgtgcttcccaagtgaggcaatgcctcgccctgcttcggctcgcgcacggtgcacgcacccactgacctgcgcccactgtctggcactccctagtgagatgaacccagtacctcagatggaaatgcagaaatcacccgtcttctgcgtcgctcacgctgggagctgtagaccggagctgttcctattcggccatcttggctccgtggataagccttaaaaggctcaatactttttaaaaatttcctataaaatccagaatctatctagatttttgagcagcctgtagtggttggaggaccatgattgtttactcatttggtcacctaaacatcccaagcaatgatttgttctgacagcagactgataacagttttttttactccttggaatcggaaaaaaaatcagcaagggaagcttttggaagccacccggtagagctggaagagaatttcgaaatcaattcgctcaacctctccctttacaggcagaaaatgtgctagattggaggtgaagaccctggagccagagagcctaggcttagtcctagccctgcactgaaggtaatgtgaacactcagtgcctcagtttccttctaggcttcttgttctgagattccatgaattaatatttgtaaaatgcttagaactgtgtctaacacattgtaaacactaggaacaaatgctaaggtcatgcaactcatcaatgcctccctggggtagaaccagccttggcccatgggcatgctcattcttcttttagacaaggctcttaggcatccctagagtgtgggttggccttcctatgcctgtacgtaagaagtatgatgtaatgtaaggaatataggattcaaaatcaacaattaggattcaaatgctaatatttattgactcaactctctgaatcttagtttcttcatctgtaaaattataatgatcataacaaacccaagtcacagacttgttcagaggagcaaatgagataatgtactttgaaaaccataatctactctgcaaatgttatgtaacattataattgtgagttcagcaaagccatgagaatgtttcaaaactgcttaggacatcaagaagttggggtggggaaaattcttaataggttttctccatatcctcattttccatttattcattgttttaaaatttatttttcttatgatatacatatatatatatatatatatatacacacacacaaaagaattatgtacggtcctgcattgcttgcattctgagaaatgcatgaataggcaattttgtcattgtacaaacatcatagagtgtacttatactaacctaggtgatatagcctactacacacctaggctgtatggtatgaccttttgctcctaggcaacaaacctgtacagcatgttactctgctgaatactgtaggcaattgtaacacaatggtaagtatttgtgtatctaaatatatctaaagatataaatatgtctttataagtatacaaatatatctttaaatatactagtatatatttatagatacaaatgtataaatatatctatagatgtactagtatatatatttatagactagaaaaggcacagtacaaatatgatattattagcggggtgtggtaattcatgcctgtaatcccagcactttgggaggctaaggtgggagaattgcttgagccctggagtttgaggttacagtgagctacgaacacatcactgcactccagcatgggtgacagggggataccctgtctctcaaaaaagaaactaaaacaataagatagaatcttatgggaccaccataatatattcagtctatcactgattgaaatgtcattatgcagcacatgactatatatatgtatatatatatatatatatatatatatacacacactatatatacacacacacatgcatatacatatgtgttgtgtgtgtgtgttgtgtgtgtgtatatatatatatatatatatatatatatatatatatatatatatgggatataaaacaaatactcatatctctaccaccaggctcaaaaagggaatattacctttgaagtcccctgaatatcccatcctagcaatattcctccccctcctggaaaagtgggtaaacaacaattgtaagtcatgtgtttgtctttcctttgcctgtagttgcgctacacaggtgtgtgcccagaaaatattctttattggatgcatggggtttccttcttgactcagagatctcaagctatacggtatcttcctgcagccttatagtgtccaccttattctttgtcactatttccctttcccagccaataaagcacattacctctgtcattcaaatgaactcgtaaagagagattttagaaaagagctggttcacctcaggttcacctgagcaaggaatgggtgtcagtgactgtggaaagtggagcacagctgccagagcagtgcaaggacccaagaaatgggagggtcttgactcgggataaccactctgagattcattggatgtcctagattgtcaccttgccttacaccttaagggagaaaaggataaaaagataaggcagatgtgaaagctatactaaggagcttagacttttcctgcaggcctttgggaagcaactgaagctttgaagaagggaatgacagcttgagactgcttcaaggcagaagagataggagaccagaaggccagtgaggaagcacttaggctgggccaggggtacaggtgtggctggaagggctgcccagaagcaccactgtggaccaggctgagcaggactgagtgactggttagatataggaaatgccagagaaagagaaggtggtgatgactgaaatttcagagttacctaaatgcaagcatggtatgttcataaccaaaataggtagcaaggagagctaggtttgagagccaagctgattagtacagaatgcgagtggttatctctgctgtttccagaaaataaagattaatttcagccttaaagtcagggacttaaatgagatgatctcgaaagccctttccatttttgtaattgtgcaatcctcagaacgttgcccagaatagtaagcagaagcaaaagaaattcaggagtttgaacataagagagagctgttctctgatgcctgctccaatgggaactgggcactgtgactgagccctcggctcactgagtctcctcctgaggagtgtgataaaacctcacagggctgctgtgggtcttattatacatgaaaatacccacctcagtgcctggcacattctgggtgcaggaaaaagtttgatttcctccctcccttccttccttccttcctttttcctccctttgttaccataggagagagtcaggctggttccctgcgggtgctggtgtgaaacctgctctttagactcttctgcagttccccaaagcagctactgtcccagagaactgctttctgccagcaatgctcagttttaccctaagacacgataactcctggctttgagggaagcacaggtagcaaggggacccctgacagcaaatgtgtagttgttcttccagctaggccccagccccaccttaaatgccacatccaggcactgtgtctacagtgctgagataaagcaaccccgtcttttccacacaaatgagcagcaaacatatttgctgattatctttgagggacataatgaatcagactgagatttagtcatatttgcacaatgctttacatctgagatactgaaagcttaatccaaggtttccctgttagttgaagtcctactgttagggctcaaagacagggtgcagctctgtaagccagtccctgatgccttgatcccaatcattgagtttatcaggattctccataggaagacacaaggagcacctctgctgcagcaaatgctggagtgttagtttttcctagaggctagtgcctcaacacctcttctgcagatctcagctatggagaaaatgaaaaagaaaaaggttagagtctcctggcttatgaaatttgaatgccacttgaacctgacatatttattttttagctctaaatcacacaagatcaagaagttctgcagatcctattccaacattgtgcaatgtctctatatttacaaattttatttgatggggggggcaatagagacataatttaatcctattagttcttgaggagatactatttagagatctcactaattcctgtcctgaaggagaagacttgaagtgtgcaatataaatattgcattaactctaatacagagttctacatttacgccttacatgtgtgcaaacaggtgcacagaggctaaagttctggttgtattgctctccctccatttacaaaagatcagtgagttcctgcttgcagattctctgaggagacccttagtttcatctcctcttcattcttctgctggcctgattcagcaagaccaaccacaaagcaaactgagtaggcaaatgggctttatctctggtgactttgcagatgcactaatttttcagcaggctgtcattaaatgcctactgggtgctaggcataatacagggtcctggggataaaagatgataagacaattcctgtcctcttgttgatagaaggcaggtagtttgtggtcaaagactctcattcacacccaccagattgtttttatatcccagtgaatccattatgtctctggcagcaccacacaccaggtcaagtttgaggctttaaagttcccaggatgtcacctagacttagagatgaagaaacactaacaaaagaagaaacaagacaaccacaaaaacctgagcctgaagagctgccacctctataatggaatatttcaaatggccttagatttaaaattggtctttgctcctttaagcagattcccttagctctggctatctctgcaaaatggatgattgatcaccaatagaaacttaattatcaattaatcggttgctatcgaattgctggtacatctcagttatctgctactcctcagagtaatccatagtactttagtgaagaaatacttctaattaaacagggaaatagcacttgctaatatatcaaagtaaatgactagacctaaaacattagtattaattacaagagtcagtgggtttagcatctctaagtttctatttgctaatttattgccactgaaaatgaagaaatcgttgttgatatataaaatagagcattttaggtggtttttaatcataaaagtcagtagatgtaaaaactctggattgcatgtggcagacatttgaccttaaggaataaggtcgctatacagaaggataactaaacttttatttgtttgttcttaaacaataaaatgatttgaaatatactttgatcattttgtgattattatcatatgggatgataatagagaatttcttacttcctaatcattttcctacacttatagttacatacaaagatgtaatgaaatttgctctccttttcttccaaggtatacatcattttccttaatactttctcccgtccccatcgtctaccccagatttaccaattcccagctatctccttaggacagtcaagaaccaaatactcccatttgtcccttataaactcttttaacttccccaatttctggaaaaacaaaaagctttaataatatagttttatatctccatactcatcccccatctacttataattgattcacttgttcattcattcaattaatatttactaaacatctactatgcatgatagttaatcaactactggcaataccatggtgaacgagtagggtccctgatcgcagcgagctgcttgggagaagtttcacattatcttataaatcacgcaagcaaatgttatgttgcagcttgtaactatgttacagctatgctatgggtacacaggtaaatgatattatgagaatctacactagaagcatttgacttagatagtggggtcagggcaggcctcctgaagaaatggtgataagctaagatctgaaggagatgtaggagttaacaaggtgaatgaaggtggaaggagcatttcaagccgggaaatagcatctgcagaggcccttaatgggagaacacgtgacatatttggagcgctgaaagaaggcctgctcgctggagcactaagaacacagatctggagaagttgggcaggggccggatgatgggaagggagccatacagtccatgttaaaaaaatgttgttctttatcctaacagcaatggggaagcattgagtgttttaaatagagagggatatggtcagatttgtgtttgaaaaagaaaatcctgctgcagtgtgaagaacagatcacctggcaagggtaacagtggatgtggtgggtctagttaagaagccgccgcagtagtccaggaaggaatgaggtggctaggatgaaaattgggaggaagggcatgaaggagaagactggatgggtctaggaggcatttagaaatgaaattgttgggaattggtgatggactgtatatgggggcggagggagagggaggaattggagatgacacttagatttctgacttgtgcacctggaggaatggtagagccattcactgaggtgtgtagtgtcctaaggtcaggcaggaggaagattgtggtttctaggatgggcatgttgttgaatctgaggtctctgagacatgtgaatggagatacttgagtgatgttatctacaagtgctgggctctttgtttgtttgttttgtttttattgcgtgggaggtcttccagaaaacctgctagacaaattctaaaagaaatataacactcatgctgggttctattgtgagagatttatataaactagcttgtttaatagttacacaagctctataaggtaagtactatttttttagttctctctactttacagattagggggaataaaacacagaaattacatgattttctgaatacagaaagattattacataaagcaagtaagcattaggggccaggatttgatgccagcacttgggtcagtgctctgtggcctcccagtgagttatccgttaaccaccactccctaccatctctctgcacaagaatgcacaaaggcacacatttaaaaatataatgtcagaacatgcctctaacatttattattattccagttgaaattcatctcatcagacttgcctgctagaagcattacctttgtgtcaagggctgagacatttaaaagttttgtttttcttataatagcagcagctaagttccatttttaggcgtgcacatattgaaccatggtgtgaattgcgatagtaaggttttagagtctataaataatgcctagtgaaattggagccattcagtccctagaaatatttatgcctatctgtggctatttgtctatttgcatgattatccttgccattatcctccaggctctgaaaatacacactgaaaggtttcttaccagcttgttcatgtctggattcacattaactctatgaccatattttattccagacacttctgagaaattcatcaggctgtgaagcgcgccgtgatgaatatcgaacagagtttaccacagctttgcagcgcgttgacttattcatgggtcaattcagcgaagtcctcttaacatctatatccaccttcattaaaggagacctcaccatagctaatcttgggacatcagagggtcgcttcatgcaggtaagtgctttctgagagtagctgtgtctgttctatctggtattgtgcaattaatttgttttcgtttttgcagtaaggtatttgcaaatactgtaaagtccaaatcatagtagaaactggaacacagactgaaagccaaacaatgaagcctggtctactttctgttaaatgtgtggtctctttttattaagttcttgaagctttcagtttgaatctgtttgctttaattttctcgtccagaatggtgtggcattttttttccatttataatttctgtcacgtgattggaaaataaaatgaaacaaagcacttctaggcaatttttttttatttcaagggaagctacagatcaaaggagagctattgtgtgaaccatgcatcttcatgagaagaaacattcacatcattgagaaatattggcaggagttaggaagggacaacattatcatcaaaatcccattgtaactcaagctctcctgattctgtaaaatggtagggttggatgcaaataagttcagatacaaaaaaaatccagattttattaagaaatggttttaatggatagcaacagtatttctgtacaacaaaagtttccatttcaacttactgtgtttcctagatacaagaaccatagcactttgcagaaattaaaagactctcttgttgggttggtttttgctgttttgtagttattggtgcctttaacatgagttgttagtagattcttgatgaggaaagaatgacaatagcatctatggaaatcttgaacttctgtgaatactagaaatttcttttaaagggagatttcgtaattgtctgatgtagttagtaccctcatcagacaataacctctagtaaaccaactgagaatgataagcttttcctataacttgcctgtctatacatcctatatgtgtattcttctacaaaacatttttttaattaccactctctttatagcagcctggatattgatcattgccatattttaaaacctgtaagttatgtttttcttgtactaaagggcatggtggaattttttcaaggtcaaaaaccatgtaaataaaaccttcctagctcaaaactaatcatacaggtcctgttatctaattattcccctagtaatctcccttctattgcttcacattgaactacgccttttctccccctttcctctgtccattccactgtgcttgtttatccaactcatccatcttgaccatttaattctatccttaacttctcaaacctgaaggagggaagccccgcccctcccacagagacatgcactctaatggatttgaaatatgctcatatctattatgtgtaaaatgtgtagtattgttctgtgtttatacatgtttttaatttacatcaatggcattctatacaattgcaaaaatacaaagaaggactagaaaagctggcatctattgatttcctaatgtgttcattatgttgatttgcccccttttatctttatttctgcttttttttttttcaaaatcgtccattacctcaccaatccagttttgtatgaataagctttttatgattactttagctccgactttttttaacatcaaaagttccctggcctatttccacattctaaagttgtaatacaattccttatttaaatatgttgctttattaactgagtaaattctgctgtgtgacagagtcaatcgcctgagggatatgtcacgcatcagtctcattatagaaacgctgtagcaaatgttttattcttgtctcctagcctttgtgtaaaagaaactatattttgcctattaactatgcatccaaaacaaaaggtaaaaaaaatgcttattttatgaaaagtactggtatcactgattttttttaaaagtggcttttaatttatcaaataagtatcaagaactacctaactttgctttactatacaaacgaatgaagcaaaggaaacagtgacacagaacttacctttaagaaattaaattttagtaggaaagatacctgataataatagtacctacagacaaagggctattcgaaaccacagagaatctatttctctgacgcttgcctaagagaatttcattccattaaattttataaagaaacctaaagcatttgaaggatcaaacaatcaacatcactgaagtccatatatttacagtaaataatagtgggggaggagtcaggagtggagcacagatatggcaacctcccactttaatctgtcagagcagtgacttcctacaaagttctgtaaatgttttgactgcaccacagtgttaaatgtatggctaggcctgagtttctacaactcgtgttttagtaaatacgatgaagtttctgttacaaaatagaatggacattttttttccccccaaagacagctgccctacacaaaagggaacagaaagatgattttacttccttcctaccctgaagcctaatggcaaagttgctttgcaaatttttttctcccaagagtttgcagctgtttctgtctttcctattgtgcttatgttcagctctggctgggaacacaagctacagccccagctgttgggtgcaaagtgaatcaggtatttcacagtggtcatttgattagaaagaattatattgtttagctaacaacattttgtgtatggcagggaagacatttttgacatgttcctaacatttaatgatgtgtaacttatcttgtacaggtgcagctatatctgaaaatactgatgcatacatatatttaagtctcaatatctgcagagccatgtcaatgtagatgaagatttaaaaataatttttatttgcatgatcactctcttgggatacttcgaagtaaaatagtaggataagcaatgtttgagatagtgtaagtgaacaatgagaacgtgccttcttacagactggggaaggagatgtagaacagagtcagacttgggaacattaacacagtgtacacagctacgtgggagagggaagagggattctcatgaagatcacaggactaatcacagggattgtccacgtctcccttctgagcgcctcgtctaatctacatccagaacaatgcttccttgattttttttaacagcacttgtataaggcttttaatctctaaatgcaaagcattgctattaaaatatttgtgcatgactgtcaggccagggagagtgagtggatcagggatgcgagagggggtggggaggccctttcaagaattgtttcaagttcagctccacaaatactcactgggcaactactatgtgcactacactgtgcctgctcccaatggccacagcctgggcactgtcactgctgctactgggctccgtggttccatcctagctcttcccgcatgcccctttcgcctctccaagttcctaaatgttgttaccacccactcatcactcctgttctcttctgcctcttaactggactagttggatcttaagtaagaaacccaaggaggtagagatcacctaaaaagatgtcccatgttcaagatcattacttatgaccactacttaaaggactgtgttagtaatcagtgaacctaagaataattactcacttccaataagaaaaatttgtttatctgttgacctcctgtcttcaaattccttcagttcccgtgcccccatcgtggcatgtcagtgctttctgtgagaagcctgtagtatgcatcatgtttggaattactgccattttagagtatgtagatgcagatccccaattcgtcaatgttgtgaacatctggcagagacacagctgaaggaagcttcaacttgaacaatgattctctttagggatttctaacttacccatctcttttataaaataatcagataaaaatattatctgcctttttgtgtgtgtacatcattaacttagttttaaccctaaagaatgttagctttggcttttttttttttttttcacagtgtctcgctctgttgcccaggctggagtgcagtggtgcaatcttggctcactgtaacccccacctccagtattcaagcaattcttgtgccttagcctcctgagtagctgggattacaggcacgtaccaccatgcccagctaatttttgtacttttagtagagacgggtttttcgccatgttggccaggctggtctagaaatcctggcctcaagtgatctgcccgccttggcctcccaaagtgctgggattacaggtatgagtcaccgtgcccacaagatttggtatatttctttagaggaaaatacactcaagggttctgaaatttcttttgtgtaagaaagaactttttataaataataatttcagttatgtccataactaaaaatcaaggattccatttatatgaaatatctagaataggaaaacctatagagatagaaagtagattagtggtagtcaagggctaagaggatatggggagactgggaatgacagctaagggatgtggggcttctttttgagataatgaaagcattctacaaccctgtctcaaaaaaaaaaaaaattaaaaccgttcaattgtccactttaaaaacaatgggggaggtatacagaaactgcatacaaacatcttatcttaaattgtattcatcattcttaaaatttaattctattaataaaacggtttaattaaagataaaactgtatatgggaggtaaggagatatggcctttacatatttgtggatatctcacacaaagttactttgttcaggtttacagatttgggggcctagccacaacagttttatttgtacatgtatttcttccccatgtcctatctacaaggggctatgtgagatcaaaaccacaaccatttggtaaattcagattctgccctgccccaaatgtattagtcctgtattttcaaggccattaaagaaaaaatatcctgtgacctaattactaaagattagttgttgaatagtaggaactcaaagataattgttggtcttctattttatgcgaattcttctaagattcccaggttatttatcataagaattacatttacatggcaaatttagttctgttcctagaaatatctccatgacaaccaaaaggaactcctaatttctggcacacattacttcaggggtattttgagagttaaagtggttaatcgattatttagaatcctagcaataagagaaagaaaagaattaagggtagaaaaacatttatagcagtaggtatccctgcagagaacgggctaatgatcaactaaaaaggcatttgcatctgtggtacagcctctgcgcaaaattccaaatggcattctcacttccaagtcacctcacttctccatgtgccttcctgtcttctcatcttcatcccattttctatagcaagcaacactcatgctaactcgtgatcaaaagtagagcttggcggagtgtgctagtaacattttctctatgccctcaaaaactagttagatgcagagactttctccttaggcacacttaacttgtgcagcaaaaattactgaaacacggagtaactggcgaggcaaatatattgtgaaatttgttttagtacttttactcacgagtggctcttgggagctcagagttgaagctttttcaatggtatttactctggtgctccaagagcctagcagttgagtgtttaagaggtcaagcacatggattctggcctcagataaagctctgtggaaatctgactcatgtactttctagctgaaattctatgttgtattttttttaaggaaaataatagtacctaccttataggagtattgtgaggagtaaataaaatctccatttaaagcacttggcacaatatgtgactcagtttcctgttatgaaagtacaaacatttggtgcttttcagacaaagctttttaacagaggatacacatatcaatcaatccaagtccagaggtgcaaagagcttccgaaaagaaagagaaaggttaattctttctgggaaaggactatttggatgggcttcagatatttcataaagtcaaagatgatgacctagtaattaagaagggattgcttattatagatttgggaaatggtattaaaaagagcaagaaggtaggagaaaaaaagggctctaggaggtgattgttatgtagccggtctaagtagaacggaggaaaccagggagacagacacaaaatgcaggtgtccattgcaaggttcatagtgatgaataatcttcagtgaagtgcaaagcatagaatgagctggaaaacaaagtcagggtattaagacagactggtgttctgtgttgcttttgacctgtgtgtgagaaaaggagtttttttgcttttgtgtttttgtttttgttttgttttttgttttacctttgcagtttgaagtgattggcaacagccaaagaaatatggggggtattgggcaggagtataggaaaaatgagatgtgatgagcccagaagggagttaagattgcaaaattgggtaaccaaaatctggagaatttgtaatagaagctttagaagtctaacatctgatattctgcttgtaaccagtacccaaagggaggtgggactggtaattgaatttctgttcactttgcctgcaaaggtcaccaatacctattgggccctaactttaggaaataacaatagtttccaacctttcccatcctgaccaagtgacccttcatccatcacttaacttctgtgcaaatataaccaccctttttaatggagatgttttgaaagcgttgagtgtttagagtagaacaaacattagagcacaaatgtcatgatgtttaacttttacagctgtatgtgagcttggttagtttctctatcaacaatccactctctgagaacaaattaggtactttgagaatcttcccaaattgcttcaggatacttggctcctttgttatgctgaagaaaaaatttacaattgttccccagaacatttatatgttgtatgtgtttgttagagtacaaagcagttaattattgctgtaattttcattcccattatacgaatgagaaagctgaggtagagggagtgactatgtaatcgtaatctcacagatgtccatgtttgtcctgtgatttcatacccatcgcgagtaaatgcatgttcaatgcaatgtaaaaggctattagagatgttgggcaatttcacaaagtagatttcaagtctagggctgtgctgagcctcctccaccttcatgtatatgcaacccagtggcctacttaagagtgaaagtttctctgagaactccaacaccctcctaaaaatctaagtgttcatgtaagataatcatttggattttatcccaattgttgtcaattatgctctgaactttattattactgggttctaggaacaggacagatggaaattagatagctgggaaacatcccaaattttaaaaacctgaaagcaaaaatgacatcaatcatcaaacctcatttcccgggcattgttaaaaccatcaggccttattttaaagccagaccaagaagcagagttttataatccaagtaataatatattgtgggacagtggtttataaaaaaatacaacacatcatttcaaagtagctgggggcctgttttgacctgaaaagatctataaatgtggcttaagagtagcacagctggaactagctccagtattccagactccgcgtccactactcttaaccattacatcaagggaaactgcctggcagggaggattaagaggatatatttaaaaaataatccagattcattgtagcatgtgtggtgtcttctttctggagagagttttggttcctccattttccaatacaattgcagggatttgtctgtatgtgctgccaattgattgaaagatctctttcccttgaaaccattaaaagatcataggcaaagtctgtcttgggggttcagataatttggcttcaaggcaagagattagaagatgacatattgatttacaatgaggggaactgttgggtcttcagttcaaacacccacaagccctgctaatctgttattaccattatcatctacattttccacttatatttaaactgagcttgttggaataaggatgttataacttttttgctgtttaggttgtggtttctcgatcaggaccatcaacccctcatgtgaattttctcctggactcccatccagtgtctccagaagtgattgtggagcatacattaaaccaaaatggctacacactggttatcactgggaagaaggtaagctgttcccacagggaatttccatagacgtggtttttcccaaatgcatatttacaaccagtgtcacttggccctttataatgtctctcttcatcttaaatttacccctcctccattaagttctttagtgagtattccagagatcttctgaaatctagttaatttgttctccaagaaagactagacctaagggaggtctttttcaaaacttctccttttgtcctatatttctcaacaagaaaaataaacacacagaatgagaattacagtcctaatgacagagctctagtgcaggcagataaatcctggaaatgtacattggaatccgactccaaccaataatcccttttctcctagagaagaaagtgcatcttgatgccagaatgacatgcaactttacttagaattttccagagattcaagtgtgttttcccaccacttaaattatactctcttgttattttaaaatcatctcagacagggcacaatgtccctactatgtagaacctctaacattgtgtggcaatgctatgctcactggacaataatgttactttttcacatacctgctaacaataaaggaaaggaaggaatcagatttttaaaattttaatcaccgttatgacaggatttgcacacatagttgctaagtctagaaaattccatcaaatgatatttacatgtaccttttgtgtacttactttataattaattaacaaactagatacccctctggaagctctttccaccccttctcttcacagatcacgaagatcccattgaatggcttgggctgcagacatttccagtcctgcagtcaatgcctctctgccccaccctttgttcagtgtggctggtgccacgacaaatgtgtgcgatcggaggaatgcctgagcgggacatggactcaacagatctgtctgcctgcaatctacaaggtaggaatctctaacagctggcatacatgtttttgtttggtgttttttttttttttttggtttggtttggtttgttttttgtttttttagatacaaatcccactaatgaaaaaaatttaaaaatcaatttactcatttagctgtgagtcatcagctaaagcaccatctctctcttggctttatccctcgggcagggagggggtggtgtttgggcatccccccaagtcctgcacctgaagtgcttgcttcacattgtctaggttctatcgctgggcagctgctcacctttagtgccgtgtgaataaaagagtggtggtgaataagcaacagtgctccccattttctcacactggggcctgttccctcctgactcacccactctctgattcctcgccacttcctatataggccaagtgcccagacatgagcctccatcacagaaacagatctgttcatggcatatcctggaaccctgagctgaatcctgcaaactggtgatccctgccatgctggggcacacaggacagttttcttcctgtccgatgcatagatggtggccttgtctgttcacagatgagactgaagattatttcccggggtgaggtgggcaaggcaagtggagggtcaacacccatgggtggctgtgagtcttccttcagtgttcccagaaaaaaaagcaaaggctcaacggatgactatactaacatctatacttctgtaagccatgccactctttaattcattccaaaaatatttattgagtgcataccatttagcaggctgccctctagtccctgaggagatatagtccagaacaagatgagcacatctcttgctgatagagaactcagtttctggcaatggacattggctctaacatcgcagccatgctaactgtgttgccttatttgcttaagcatatattcggcactatgaaaatctccacgcaatttttaaaaatttcttagtccaaaacatcttgcttaaaaacacttccctggtgagaacccagtgtgtatttttctctgtgtgcatgtagaaaagttggactttagtaaatagttcttatgaaagattcaagttaaaggtctcggtcacctggttcatgcccaagtaaacaaaatgtgcgagtcagaacaagaaccacccccaagtgcatggctgttttcatttagttacggtttggagcaagatttgtagtgggtgactgggttttaaaccaagttattttctgttaggtgtgacacagttattaagacttagcttgattgaccagagaataaactaaagacagtgacaaaacaaatttaaatctatactgtagtatttgtgtacttttttgttgttcagtatacttttggaaccgtatgcaattttatacttttataaacaaacaacttcagcaatttgagacactaggaatctgaactctgctattccatgaaatagatatggaaaatatatgtgtgtgtgcccatgcaattaaatcacaacaatttcatttcaaaaataaccaagctggtattttaagtaaagaaaatggtttgataacctgtacaaatgaaacatttaatttttactaatgtgcttccttttactaagcataaaagctatactaaaatgcttaaaaataaagtaaatatttcagaattttctggaaccagagaatctcttgcaatatttaaatgtccctcctctctcacccttcttaactctagcattctatagttgatgattctcaaaggttgcgtgctaccatgcacaagtcagtgaggcttaagctgcagttaggaaggcagggcagctgagtccataaatccctctaggttcatagttgttaggaagatttcatgctgcaccagactgtgacagttagcattcttcctgcaaaacataagacagactcgaggtgggtgttaagatggccgagtaggaacagctccggtctgcagctcgcagcaagatcagtgcagaaggcaggtgatttctgcatgtccaacagaggtacacggctcatctcattgggactggttagacagtgggtgcagcccacagaggttgagctgaagcaaggtgggatgttgcctcacctgggaagggcaagggattggggaactccctcccctagcaaaaggaatccttgagggactgtgttgtgaggaacaatgcattccggcccagatactacacttccctatggttttggcaactaacagaccaggagattccctcatttgcctacaccaccaggaccctgggtttgaagcacaaaactgggcggccatttgggcagacaccgagcaggagttttttttcataccccagtggtgcctggaatgccagcaagacagaaccattcactcccctggaaagggggctgaagccagggagccaagtggtctagctcagtggatcccacccctacagaacccagcaagctaagatgcactggcttcaaattctcactgccagcacagcagtctgaagttgacctgggatgctggagcttggtgcagggaggggtgtccaccattactgaggcttgaataggctattttcccctcacactgtaaagggtacagcttcagcagacttaaacattcctgcctgctggctctgaagagagcagcaaatcccccagcacagtgctctagctctgctaagggacagattgcctcttcaagtgggcccctgacccctgtgcctcctgactgggagacacctcccagcaggggtcgacagacacctcacacaggagagctctggctggcatctggtgggtgcccctctaggatgaagcttccagaggaaggaataggcagcaatctttgctgttctacagcctctgctagtgataccctggcaaacagggtctggagtggacctccagcaaactccagaagacctgcagcagtgaggcctgactgttagaagaaaaactaacaaacagaaagcaatagcattaacataaacaaaaagaacgtccacacaaaaaccctattcaaaggtcaccaacatcaaagaccaaaggttgataaatccatgaagatgaggaaaaaccagcgcagaaaggctgaaaattccaaaaaccagaacacctcttctcctccaaaggatcacaactccttgccagcaaggaaacagaattggacagagaatgagtttaacaaattgacagcagcaggcctcagaatttgggtaataacaaactcctccaagctaaaggagcatgttctaacccaatgcaaggaagctaagaaccttgaaaaaaaagctagaggaattgctaactagaataaccgtttagagaaaaacataaatgacctgatggagctgaaaaacacagcatgagaacttcatgaagcatacacaagtatcaatagccaaatcaatcaagtggaagaaagaatgtcagagattgaatatcaacttaatgaaataaagtgtggagacaagattagagaaaaaagaatgaaaaggaatgaacaaaacctccaagaaatatgcgactatgtgaaaagaccaaacctacatttgattggtgtacctgaaagttacagggagaatggaaccaagttggaaaacactcttcagaatattatccaggagaacttccccaacctagcaagacagcccaacattcaaattcaggaaatacagagaacaccacaaagatactcctctagaagagcaacaccaagacacataatagtcagattcaccaaggttgcaatgaaggaaaaaatgttaagggcagccggagagaaaagtcgggttacccacaaagggaagcccatcagactaacagtggatctctctgcagaaaccctacaagacagacacaagacagggatgccctctctcaccactcctattcaacatagtgttggaatttctggccaggacaaacaggcaggagaaagaaataaagggtattcaattaggaaaagaggaagtcaaattgtccctgtttgcagatgacatgattgtatatttagaaaactccatcgtctcagcccaaagtctccttaagctgataagcaactttagcaaagtctcaggatacaaattcaatgtgcaaaaatcacaagcatttttatacaccaataacagacaaacagagagccaaatcatgagtgaactcccattcacaattgcttcaaagagaataaaatacctaggaatccaacttacaagggatgtgaaggacctcttcaaggagaactacaaaccactgctcaaggaaataaaagaggatacaaacaaatggaagaatattccatgctcatggataggaagaatcaatatcatgaaaatggccatactgcccaaggtaatttatagattcaatgccatccccatcaagctaccaatgactttcttcacagaattggaaaaaactactttaacgttcatatggacccaaaaaagagcctgcattgtcaagtcaatactaagccaaaagaacaaagctggaggcatcatgctacctgacttcaaactatactacaaggctacagtaaccaaaacagcatggtactggcaccaaaacagagatatagatcaatggaacagaacagagccctcagaaataataccacacatctacaactatctgatctttgacaaacctgacaaaaacaaggtatggggaaaggattctctatttaacaaatggtgctgggaaaactggctagccatatggagaaagctgaaactggatcccttccttacaccttatacaaaaatttattcaagatggattaaagatgtaaatgttagacctaaaactataaaaaccttagaagaaaacctaggcaataccattcaggacataggcgtgggcaaggacttcatgtctaaaacaccaaaagcaatggcaacaaaagccaaaattgacaaatgggatctaattaaactaaagagcttctgcacagcaaaagaaactaccatcagagtgaacaggcaacctacagaatgggagaaaatttttgcaatctactcatctgacaaagggctaatatccagaatctacaaagaactcaaaccaatttacaagaaaaatctaacaaccccatcaacaagtaggcaaaggatatgaacagacacttctcaaaagaagacatttatgcagtcaaaagacacatgaaaaaatgctcattatcactggccatcagagaaatgcaaatcaaaaccgcaatgagataccatctcacaccagttagaatggcaatcattaaaaagtcaggaaacaatatgtgctggagaggatgtggagaaataggaacacttttacactgttgatgggactgtaaactagttcaaccattgtggaagacagtgtggtgattccttagggatctagaactagaaataccatttgacccagctgtcccattactgggtatatacccaaaggattataaagcatgctgctgtaaagacacatgcacatgtatgtttattgcagcactattcagaatagcaaagacttggaaccaacccaaatgtccaacaatgatagactggattaagaaaatgtggcacatatatgccatggaatactatgcagccataaaaaaggatgagttcatgtcctttgtagggacatggatgaagctggaaaccatcattctgagcaaactatcgcaagaacaaaaaaccaaacaccgcatgttctcactcataggtgggaattgaacaatgagaacacgtggacacaggaaggggaatatcacacaccggggcctgttgtggggtcgggggaggggggagagttagcattaggagatatacctaagtaaatgacaagttaatgggtgcagcacaccaacatgcacatgtatacatatgtaacaaacccgcacattgtgcacatgtaccctagaacttaaagtataataaaaaatatatataaaaaaagaaaccctacaagccagaagacagtgggggccaatattcaacattcttaaagaaaataatttccttcccagaatttcatatccagccaaactaagcttcataagtgaaggagaaataaaatcctttacagtcaagcaaatgctgagagattttgtcaccatcaggcctgtcttacaagagctcctgaaggaagcacaaaatatagaaaggaaaaaccggtaccacctactgcagaaacataccaaattgtaaagaccattgacactgtgaagaaactacatcaaccaatgggcaaaataaccagctaggatcaaattcacacataacactattaaccttaaatgtaaataggctaaatgccccaattaaaagacacagactggcaaattggataaagagtcaagacccattggtgtgctgtattcaggagacccatctcacgtgcaaagacacacataggctcaaaataaaggggcggaggaagatttaccaagcaaatggaaagcaaaaaaagcaggggttgcaatcctagtctctgataaaacagacttcaaaccaacaaagatcaaaaaagacaaagaagggcattacataatggtaaagggatcaacacaaccagaagagctaactatcctaaatatatatgctcccaatacaggaacacccagattcgtaaagcaagtccttagagacctacaaggagacttagactcccacacaataataataggagactttaacaccccactatcaacatcagacagatcaaggagacagaaagttaacaagggtatccaggacttgaactcggctctggaccaagcagacctaatagacatctacagaactctccattccaaatcagtagaatatacattcttctcagcaccacatagcacttattctaaaattggccacataattggcagtaaaacactcctcagcaaatgcaaacaaacagtctctcagatgacactacaatcaaattagaactcgagtttaagaaactcacttaaggccgggtgcagtggcttacgcctgtaatcccagcactttgggaggctgaggcgggcggatcacaaggtcaggagatccagacatcctgactaacatggtgaaaccccatctccactaaaaatactaaaaattagctgggcatggtggcgggcgcctgtagtcccagctactcgggaggctgaggcaggagaatggtgtgaacccaggaggcggagcttgtagtgagccgcgaaggcgccactgcactccagcctgggcaacagagcaagactccatgtcaaaaacaaaaacaacaacaacaaaaaagaagctcactcaaaaccacacaactacctggaaactgaataacctgctcctgaatgactactgactactcggtaaacaactggtacatttgttatttttcaagttaaataatgaaattaaggcagaaataaataagttctttgaaaccaataagaacaaagacaaagacacaacatatcagaatctctgggacacagctaaagcagtgtttagagggaaatttgtagcactaaatgcccacaggagaaagtgggaaagacctaaaatcaacccctaacatcacaattgaaagaactagagaagcaagagcaaacaaattcaaaagctaacagaagacaagaaataactaagatcagagcagaactgaaggacatagagacacgaaaaaccccaggagctggttttttgaaaagatcaacaaaattgatagactgctagccagaatcatcaagaagaaaagagagaagaatcaaatagacacagtacaaaatgataaaggggatatcaccactgatcccacagaaatacaaactaccatcagagaatactataaatatctccatgcaaataactagaaaatctagaagaaatggataaattcctggacacatacagcctcccaagactaaactaggaagaagttgaatccctgaatagaccaataacaagttctgcaattgagacagtaattaacagcctaccaaccaaaaaaagcccaggaccagacggattcacagccgaattctaccagaggtacaaagaggagctggtaccattccttctgaaactattccaaacaatagaaaaacaagggactcctccctaactcattttatgaggccagcatcatcctgataccaaaaccagacagagacacaacacaaaaaaagaaaatttcaggccaatatccctgatgaacatcgatgtgaacatcctcaatacaatactggcaaaccaaatccagcaacacatcaaaaagcttatccaccacaatcaagttggcttcatccctggaatgtaaggctggttcaacacaggcaaatcaataaacataatccatcacataaacagaaccaatgacaaaaaccacacgattattgcaatagatgcagaaaaggccttcgataaaattcaacaccccttcgtgctaaaaactctcaacaaactaggtgttgatggaacatatctcaaaataataagagctatttatgataaacccacagccaatatcattttgaatgggcaaaagctggaagcattccctttgaaaaccagcacaagacaaggatgccctctctcaccgctcctattcaacataacattggaagttctggccagggcaatcaggcaggggaaacaaataaagggtattcagataggaagagaggaagtcaaattgtctctgtttgcagatgacatgattgcatatttagaaaaccccatcgtctcagcccaaaatctccttaagctgataagcaacttcggcaaattctcaggatacaaaatcaatgtgcaaaaatcacaggcattcccatacaccaataatagacaaacagagagccaaatcatgagtgaagtctcattcacaattgctacaaagagaataaaatacctaggaatacaacttacaagggatgaaaaggacctcttcaagaactacaaaccacaagcaaatggagaaacattccatgctcatggataggaagactcaatattgtgaaaatggccatattgcccaaagtaatttatacattcaatgctatccccataaagctaccattgactttcttcacagaattagaaaaagctactttaaatttcatatggaaccaaaaaagagcccgcatagccaagacaatcctaagcaaaaagaacacagctggtggcatcacgctacctgacttcaaactatactacaaggttgcagtaaccaaaacagcatggtactggtaccaaaacagagatatagaccaatggaacagaacagaggcctcagaaataacaccacgcatttacaaccatctgatcttttacaaacctgacaaaaacaagcaatggggaaaggattccctatttaataaatgatgttgggaaaactggctatccatatgcagaaaactgaaactggaccccttccttacaccttatacaaaaattaactcaagatagattaaagacttaaacgcaagacctaaaaaccataaaaaccctagaagaaaacctaggcaataccattcaggacatatgcatgggcaaagacttcatgactaaaacaccaaaagcaatggcaacaaaagtctaaattgacaaatgggatctaattaaagagcttctgcacagcaaaagaaactatcatcagagtgaacaggcaacctacagaacaggattaaattgttgcaatctattcatctgactaagggctaatatccagaatctacaaggaacttaaacaaatttacaaggaaaaaaaccatcaaaaagtgggccaaggatataaacagacacttctcaaaagaagacatttaggtggccaaaaaacatatgaaaaaaagctcatcatcactggttattagagaaatgcaaatcaaaaccacaatgagatcccatctcacaccagttagaatggtgatcattaaaaagtcaggaaacaatatgtgctggagaggatgtggagaaatagggaatgcttttacactgttggtgggagtgtaaattagttcaaccattgtggaagacagtatggcgattcctcaaggatctagaatcagaaataccatttgacccagcaatcccattactgggtatatacccaaaggattataagtcattctaatataaagatacatgcacacgtatgtttattgcagcactactcacaatagcaaagacttggaaccaacccaaatgcccatcaaagatagactggataaagaaaatgtggcacatatatgccatggaatactatgcagccataaaaaaggatgagttcatgtcctttgcagggacatggatgaagctggaaaccgtaattcccagcaagctaacacaggaacagaaaaccagacactgcatgttctcactcataagtgggagttgaaccatgagaacacatggacacaaggagggaaacatcacacataggggcctgtcgggtggcgggggtctaggggagggatagcattaggagaaatacctaatgtagatgacagataatcttatgtgtcttaaactttgcaggcacaaaatccagctaatgtatggagtttcactttctaatacatgcaagttaacctgcttttcaaggtacatgatgttcagtggctaaaattctttacagttctagatatgagagatttcaggactgtaagcccattattttgcttcaaacatggtatctgatctcatacttaaagagcaatgagaaatgcttcagaaaagggagagcactttttaatatattctgaatgtattaggatgcagttatcatatcttgtaaggttgaaaattcaggccgggcgtggtggctcatgtctgtaatcccagcactttgggaggccgaggtgggcagatcacgaggtcaggagatcgagaccatcctggctaacacggtgaaaccctgtctccactaaaaataggaaaaattagctaggcatggtggcaggtgcctgtagtaccagctactcgggaggctgaggcaggagaatggcgtgaacctgggtggcggagcttgcagtgagccaagattgctccactgcactccagcctggatgacagaacgagactctgtctcaataaaaaaaaagaaagaaagaaagaaaattcaaccccagtgagacaacagaactattcattgatcagaatactcagaaaagcagtattatatagggataggagggtaggcaggcagtatactgccaccagtaaatatatttgtgagttctactaaagaggaaaggagaccccttttggagtttttttgttctgttttgtttttgttttttagttttctcatgttttatcctaatgggttttgaaagcatgatcatttaaaatactgttggaatgggcccatcagtgatgtgatctttcacctgtgaaaagacaagggctacttttgtggctgtatctcccctatccagacaggtaggagacccagcctctgtggctttatgccggacgctcatttcctgcccacagagtttctctgcccttcaggataactcagagtttgccagccattgttgggtctatccaagggtgtgtagttcacaactgcttccttcctttttccctagaagggtaaaggttaccccataagctaaggggaaaatgcccagcccagagagaaaagctaagcagagcgagcctcttggatcctgagggtctagcagagggcttataatatctcttcctattgccagtgccccagttgcgcagctctctgcgtcttttctcaaatcatcacccaatccgtttgccttttatagaaagtgatggtaatgatgtgtgtagagtgacagacttcagtttttacatagaaagacgggatgtaggcagtgggatcaggccaacatcagccttgggcagcgttttcagtggggaagcctcctcattagaagagccggcagcagctgtgtgactgcctcaggctgaagagagtcctgggagggttggatgtcttgttctctcctactggatttctaccataataataataaacagatttatttttctagtagttctcatttgactagacatggatgaggtaaattttcaggaaaggcacaacagtgtaatggatttttatgggtaaaatggctatcataaaagctttaagctaaaactttaaaggggtttgataacgagggtacattaagactttggtttgcaattatttacttaggaaggatggaaatgtttgcaagtttgaatttggctaaaagcccttcttaattgtaaaagaatcacttttagatgttcacaagctgagctttagcaaatacctttactggttcttgagttgcctctatcttagttttcccaccattgtactttacagcacaatttacaatatgtccccacccccaaaagagcatttcctttctcaattgtcacaaagctgctgagaagaagcttatttttaacttggaaatgtgttttgttttaatagttttagcctgagagcaattatcttacacactttataggtgcctaatgcggtcttaaatcatgactgaccaaggtttatcaataaatccattgataacataccagaaatgagtctgcaataacaaaatgagtctgttatttgcttaacatcaaccatcagggggaaaaatttaatcctaaaaatgagatataaaacaataccaatgaagataattaggaaaaattgttacaatactgattttgggccctctctggttccgtttttatctatttctaaaagaaacaacataacacatgtattaaatattacataatttttaaaaggctgagtgtgtcaactaaccagcctggtatacatcaaatagtgaccatatttaaagaacaaggaaaaatcttcagtcattaataaatgtgaactaataggtaaaaagaagtagattcacttttcatttgttagtgcctggtgcataggaggtgctttattaagaaataattaatgaaacctgggcagcataacaagaccccgtctctacagaaatttaaaaattagctgggtgaggtggcgcacacctgtagtcctgtctactagagaggctgaggcgggaggattgcttgagcccaggagtttgaggctgcagtgagctaggactatgccactgcactgcagactgggcaagagtgagacccccatctctaaaagtaaataagtaaataatgaatgaatgaatgaatgaatgaattattggcagatatgtgttccaaaaccatctatatgtttcatattatgctagctgctgaatgcaactgggcaaacactggataccaaatgaggtatttttactgtgcaacttttgtctctgggtggggaataccatagcaaccagaatgtagtgcacgcagccagtgcacagagcaaggcgtataatggctggaccttggcttatagagcacatgaaggagtttgataagagctcagtccgaaggctgatgaagagttacaatcagagttatgagcaagtaaaagtctgggcccaacgtgtttctactcctaccctaaagagccctagaagatgaattcacttcagaatggcccaaaaagggccaggtccaatggctcatgcttgtaatcctagcactttgggaggccaaggcaggaggatcacttgagcccaggagtttgagaccagctgggcaacgtagtgagaccctgtctctagaaaaaaaaaaaatagccaagcatggtggcccacgcctgtgatcccagctactcaggaggctaatgtgggaggattgcttgagctcaagaggttgaggctgcagtgagccatgatcacgccactgcactccagcctgaacaacagagccagactctgtctgaaaaagaaaagaaaagaaagaaggaagaaaggaagggagggaaagaaaaagaaagaaagagagagagagagaaagagagaaagaaagaaagaaagaaagaaagaaagaaagaaagaaagaaagaaagaaagaaagagaaagaaagagaaggaaggaagcagagaaaggaaagaaagaaagaaagaaagaaagaaagaaagaaagaaagaaagaaagaaagaaagaaagaaagaaagaaaagaaagaaagaacggaaggactcgaaaagcccctttattcctaccaagctgcatctgctctttgtcccatctttggatctcctgaaaacaacttgtttcattaacatgtcatgtagttttaatgtttgttccagatgctctgaaatttgtgaccctttttcctttagtgaaaattaaatttttactaaattgtgggaaaatgaaagaatttcagactatttaaggatatacattttgtttgttcgttttccatatatgtgaaaaattataatatattgggtttttttaaaagttctatgttgtccttgtaggttttcccaaatagtgcaccccttgaaggagggacaaggctgaccatatgtggctgggactttggatttcggaggaataataaatttgatttaaagaaaactagagttctccttggaaatgagagctgcaccttgactttaagtgagagcacgatgaatacgtaaggatcttaaaatgctttgctggggtgtgcttggaaaataggttttgtttttgaatgaatatttcttttaaaattgctcaagaagctcatctcttgaattaaaaagggtcttggcctgtcacatgccttgtgggtctgttctgttttgttcttgtaatcccatttactcattggatttgaagagagagaaaggtgacatggcctaggtgaagagaagaggccagaaatgggagtttctcaaccatttatgcgacaagtcttcaggtgttgtctgagtagatttgcaagagtagcactagttgggatcacttcatccttggagtcttcaaatgtagagtctccaaaggctttttctacagaaatcagtaaacagctcagcatggatcctctcttttaaattcactttctaaacctcagaaatgtagtgaggcagctgaatcacgtgtttgagacttttttagatgagttaaaatttatattcagcttatatttactggcactgcaatatatgggctgtatctcactgaaccatccccacggtcctgggagggagcagtatcattcctataatataaaagaggtacctgaagttcagagagatgaagtgtggcttcacagaggtaatccagagagtaagagctgaacaagccttcagctcagctctgatcatcttctgatccaagacccgtgctagttctactgtattctacatgtacccttctacaagctttgaattccataatcatcagagaatccagaaattattcattatcacataataacaacactcaaatatttaaagttttatggttgaatctttatgattgaacccattctatcaggtggttattttatatctaatagaattcatttcagggttacacaaaggtccgaatctatccattttactgagaccaaaacactaatgaaggtaatatttgttagctgaatggcaaaacaaattttttctagaaatctcccttgtaaaatctccaaaactcttaatcattgcatataaatcaggacctgtaaaagtaaagcataattcattctctcctttaaaaagttatttaataaatcaaattgtatttaaattttctcagaactatatgattattcattcagaaataattctatggaaagccatcacaatttcattatcatttaagtaatttaaataagcatgtacaagtataaccacagaaatgtacctgttgacatactttaatgaagagattggcctatttgtagttagcccattgtttcatatgcatctgaagtggaccaaagattatccccaaatattaatattatccaaacttagattattatgcactattcaactggtgaggtctttatggataaggtctgatatttcctgtttgtctgtataagtgctatagtaccattaatgtaaagtttagtataagcagggtgcagtggcttacgcctgtgatcccagcactttggcagaccaaggcaggaggatcacctgagcccaggaattcaagaccagcctgggcaacgtagtgagactccatctctaccaaaaaaaaaaaaaaatttttttttaattaaccagatgccgtggcatgcacctctagttccaactcctgagtccagaggatcccttgagcccaggagttcaaggctgcagtgagctatgactatgccactgccctccagcctgggtgacagagcaagatcctgtctctttttacataaaaataaaagttaagtttatcatagtatagaaataggattatataatttttggccttaatgcttatcttgaaactctgcttgctattcaaagcagtcagctcaccatttagagttaatgtcacttcctataaaacaacctaaccagaaaattccttggatttgtcatgtattaaactttgggttttttttccagattgaaatgcacagttggtcctgccatgaataagcatttcaatatgtccataattatttcaaatggccacgggacaacacaatacagtacattctcctatgtggtaaggaagattctatcctatcatgtttgatttttacttaatctatttaaattataagatgaacaagttactttgttttgtttttatctcccctccaggatcctgtaataacaagtatttcgccgaaatacggtcctatggctggtggcactttacttactttaactggaaattacctaaacagtgggaattctagacacatttcaattggtggaaaaacatgtactttaaaaaggtgttgtaaatttattttttgttgcatctgtcaatttgaattaatatctgtaccttaaaaattaagcagattgttttgtgtgtgtgtgtggagaagaaaaatcaagatgtttatttgtttactctcctactgacaaaacttcctccttccaaaattcatctactccttttgctgatttttcttcctttctcttgttttttagcaatcctacttttcagttttgtcttcccatccaccctctttattgttatagcttaggatcttagctatactatgagctgtgagagtctggtcattgataataatttaaaataaacattttcatcaagatttgtaattagactaagtcactctggggaaggaagaaatggggaaaattgggtctggaagacagttatgtttctgcttcttagagttggaagagctcagtttaatcaagtaccaaaagtactttaaaggtttttttttcaaatctcaaatgttttccagtcaaggatagcttgtccacaacaaaggtaagtttgagatccagtcagattaaacagcctacactagaaaaggcttccactcaggaaattcccacttaggaaccattgagttatatccttttgatttgtggatataattctaaaatatgtgtatctctaatagctaaaattcacttccttaattttttttgttcagtgtgtcaaacagtattcttgaatgttataccccagcccaaaccatttcaactgagtttgctgttaaattgaaaattgacttagccaaccgagagacaagcatcttcagttaccgtgaagatcccattgtctatgaaattcatccaaccaaatcttttattaggtaagtagaagcttctgatgggtataagaaaacaatgaatacaaggatgattttgctgtagaatagtcaagaggaattgcagttttatctctggctttgatgctgttatgttgcttttgaaggcttctttccaattcaggagagaaaactatattcaggttctgagtgtagtttgacttatcaatgctagttcattccaagaagtatcttatcctgttctattacatttaaacagagtatagcaaaatagtttaatgtggcattgtagtatacatgcacttacattatgtacatatcaattctatactaaccttagtgcccagaagtggaattaccttttttcttccattctctagatatgtttttgtcctgcctgctttacacacagcttttctttatgccagactctctttgaattgatatctcattggacccagttcaatctgccttgtttccgttaattctatcagtctagcaacaatagttaagttcggttttctttgtatttttttcagaggtgaaatatttattttgtgtaattcggtgaataaaatacaaatgcatttcttaagcttatgaaatatgcattttaaaaatattttcaagttaaataagttgtttccaaagaacagttacccatgaacttccatttgatgttgactgtgcctctgacctgtaatcagtgcaggtgattaaattgaatccctctcttacagtacttggtggaaagaacctctcaacattgtcagttttctattttgctttgccagtggtgggagcacaataacaggtgttgggaaaaacctgaattcagttagtgtcccgagaatggtcataaatgtgcatgaagcaggaaggaactttacagtggtaagtcctttgagcaatggttctactcagagctctgcatctttgcctctaaccatgtggctttcatggtacctgagacatctcagtttcgcctttaaggtttgctagttaatttccttgcagtgtagccaagtagtattttttatttaataactgaaattatctagagtcttgggctaaccatgtggaaaaaatacatacacatacacacatgcacatataatgtttagacaagaatgaagattaccaatttgagacagtgtttttttatgtttgttggttggttggttttgagggtttttttgagacagtatctcaccctgtcatccaggctggagtgcaagggcacgatctcagctcactgcaatttccccctcccaggttcaagcgattctccacctcagcctcccaagtagctgagactacaggcacgagccatcatgcctggctaatttttgtattttttggtagagacgaggtttcaccatgttggccaggctggtcttgaactcttgacctcaaatgatctgcccacctcggcctcccaaagtgctgggattacaggcatgagctactgtgcctggcctgaggcagtgtttttacagacagtcagtacaaatggaaatcacagcatttccctagtccctttttaatgtgtcatagaacatggacccttttgctctaataaaatccttggaaaaggttgctgatcttgcagcagtattcttgcatttctaagcagctgacgtatgctttcttacagccccctgttcttcttatcattcttcttgtccctttgttagctctttcttgaaagagctaacaaagaaagagcattagaatatttatgttatgtcctaaagtgtgaatgttatttgctgtttctccacctatccttattttatataggtcacattaaagtggtagttttagtttagaccttagaaagcttggagttatttccaaagattccatacattttgttgatgtttttctctaatataaaataccataatctagtaggacttgagcactcaactcagaatgaaagttctaagtgctcttgctcaagcaaggtcttgattggtcaggtgatagattgaattacagcacttccttttagattctccatccaatatttcttgaagactaaagccacaatgttctttaattacaaaaaccaatttggggctaaaaatgtcaagccaaatcaccaaataataaggtcatttcaaataagatttttcttggccttctcaatcagccacattgcatcacctctagagagtattattagatttttatcatattcctgagagattgtactctagggagtcaccatatgaagcaaagcattttgaaaccaatccccacacatggccacaaacaaagttagagtaccactgctattaatttaaaggacatcagttctccacaactaagcataacaatgtttcattaaccaaataagaataatagtgaccctctttggtgttggtatgagaccttttaaagtagaaatctgagaaattattagtttatctaattaatgctgagcctccattattaagataatgactgaatttcctttcttctccctcattggcattaaagtgacactcagaatgccttagcttcagtcattcatttgtaatcaaatatttattaaaaactttttaggtgtcacacatgagagttacatatcccaaggatgattcaaacaatggtagacgataaaaatcttatttgtttatatatctggaaatataaacttctgttgttttagtgacaaacatgttagtacagtagaactgtacattagaatcggacaagagtgaaaaattcagtggatctattttactatttactatttattttactgtcgtttgtgaaaagtactttataaggagatatgtattcattccatgttccttgccacttatagaatttaaagctgaccatgatgaattgaacccatttattatttaacaaataaaaactcttggtcaggtctgatttagatatataggtccagccacaataactttaagtccaataaacttgaatcctttcaaaacaagaacaatcatcttcataacaaaatgtatattaaattgttaacatgtgcattatgccctaggagcctgcagtttattgtgtagttctcaaatttcttgttatgtaaacaattattgtgatgacagttaaattgttcatgtccatcaggaataaataacttttagcattataatattaattttatataaaactaaatagtataattttatccatattatatctctatcagttttatctgctgcctatatacatttttaatgtaagatcattttttaaatgattttttaaagaaaatagcaaataacaaattctgtttgtcctttttatgtatatcctgagtcctttttctattgtgggcataagtaattgttttatctccaactatacttgtcaaagaaaaggaaatctaagggatgttgttgcttgtttgtcttttccttgggggaaaaatgcaaccgttaaccttagatgtaccactatgtgttgctggtttagtctaagtacaatcaagaggaagctacattttccaaaattccataaatcagaattccaaagaggaagatttgaaatgagacatgaaagggcatgaaataataatagcagaggctttgtaaaatagagagcataggaaaaggtttcagtataaaatatgtcatagacaaaaagatagcatgggagtgaagacactgaattttggagttaatggcctaggatttatattcgctattctgccactccaagctgtgtgacctggcctaatgacataagtttgcaaagctcagtttcttcatttgtaaactgtgggtaatcataatacccacctataggattatcaggagaattaaatgagaccaactttgtaaagtattttgcacagaacctggcattcaataattaatagcttaaaagacactaataagattacctaacaacatagttaattatcatgttcaccatatggtgcttggtgctttacaaagcactttaccatgtggtatccaacatggtaaatagcattttcatcttaattcctaaatgaggaaactgagttattcagtgtgggccctaccttagttcccatagcttgggttaaagctaggagatgagccaaggccttctaaccccacaaagctgagctcccagtctgcctgactgcctcacacaacaaggggcagttcctccaggtgactgtcctgtcttcttaaggaaaataaaatgatgagatgaaggccagcttcagatagatcagcacagtttatgctgggcaggtggagctctgtgtttctttgaagggtgggttgtttggataattttgcatgtatcgtgtttccagaaatgtgtagtctaacattaggaagttaaatacagattttttcaaaaattatatattttcaattgattggggtggtaaattataaagttgctatggatgttgccaagctgtattctgtttacagtggataattgtgtctttctctaggcatgtcaacatcgctctaattcagagataatctgttgtaccactccttccctgcaacagctgaatctgcaactccccctgaaaaccaaagcctttttcatgttagatgggatcctttccaaatactttgatctcatttatgtacataatcctgtgtttaagccttttgaaaagccagtgatgatctcaatgggcaatgaaaatgtactggaaattaaggtaagaaatgctttaaacactgtcttaaatcatcagctcaaacttaattgacttcatagctatgtgaatacaattgttgtacttggccattgtatcttatacaacaccagcaaatatataaactctgaaaaacaaatctttttggcataaaactaaaagataagaataaccgtggactgcattttaatgaagcattaaaaaaccctttcttgtgtatgtattaaaacgtagcaaatgtgggacacaaattatccattaaagaggatccgcgtcatgcattatcttgctgatgttatacatttccccggacatgttacctaaatgtgctcattataagataaaacataagagctgtgaaagtaaatgcatcaattgtatctccgttcttccttgtaatacttggaattttgtatctgggtatggtcatctctaagctaatttgtaaatggaactagatatctgccaccttaggaacatattagcttctaaatgtaatttaatagagaataacagatcatcttttctaaagcaagcctgttgcaaacaaagaacactaagacccagaaaggttaagtgattgacaagtgacaaaatagtggcagaataataaagactagagtgcagcttttttatgtcccttcagtagtttctacttcaaataataacacaggcaaaatgctcaagacttgaattattcatagctccagtcactagaaacagcaaaatatttatccttcaacatgttgttaaaacatttagaattttttttcctgaaagatgatctgaatgcaaatatgaacaaacataaagcaataggatagtctttatttggttgtaatataggctttcatgggtcatctccatctaagtaataatatgtttccattgaaatttttctgactttttcaacaaaaatttaactgcagcccaacttatgcatatgttcacgttcatacaagtttactaacctcattattgtgttttgtacaataattaagcaagcccagcataaaattgaatggaagcccgcttcaatgaacagtgtgtttacaaaagcaaagttctttcatctgcttctttaattagttttagaaagggagaaataagcttttatcacttctttttttttaataaaactaatctagtgtgaccttttgctttcaacaattactgtgtttgccatttgaaagattccatttggtttttcttgatgataacaaaggtttatgtgcaaatagttttacactcacagaaactctatttttctgttcctgtatctatgatgaagggattagagataaacggttctttatctacccttccaagcacagtctttatggaagagaaaacttctctttccataaattaaatacccattattcaacatcctacaaaattgttggaccaagaaaaacataatttggcatcatcctcggcctgtcaatggtattcccaacatggcgaaagggtcttctagagactggcaaaaaacactttattttcttgcctatatatggaataactctttctctaacaagtgtatagcacctgccacgtgacagaatagtaatctagtgggagcagtggcaattcagggagattattttagtatcatggttcaatattttttcatacttcatttttcttatgtatgagaggaaagcaaaggcataagagaatatttgttgtgtcagcaatctaactctttatcaatacgttaagttgatcacattaaaacttctacctctcagccaggcacggtagctcatacctgtaatcccagcactttgggaggccaaggcgggtgaatcacttgagatcaggagttcaagaccagcctggccaaaatggtgaaaccccatctccactaaaaatacaaaaattagctgggcatggtggtgggtgcctgtaatcccagctactcaggaggctgagggacggaggtgacctgagtcctgaaggcggaggttgcagtgagccaagatggcaccactgcactccagcctgggagacagagcaaaaaaaaaaaaaaaaaaaaaaccacgtacttcatcaatgaaagtgctctggagagaatcatgtgtttagaatgagatatgctctttattgccaggaagatttcatgctcctcatgcagccatgcatgcaagagttcctagggtgaaaagagattgtgatcattccctgccctagttgtgagagtccctcaattcatagtaagcccagtgactacaccatgggcaaaagggcgagccaggtttggatgagggaacacaataggggtcaagcataagtcacccctcagaatgaatcctaagccccatggatggagaaggaagtttttggccaaggcttcaagtcccccaagagcagtcgtagacagtggtcatcaaaagtaggtacctctttgtgggtatacatgactccccaaatgcctctatcaacaacagctcatgtttgtatggaattttacagttgacactgtactttggcatattttatttcatttgagtctcatgtggacccatgaggttgggaggtcagtgatgattatccccatttatagataggtaaacaaaggtttaggaagattagctgatttgtcttgggtcacccaggaagcaaagagcagaactggggctcacactcaggcttcttgattccaaatttggtcttctgtcactgcatacactaaattacagtatttcttatattaactctcatttaatgtatactaaaataccattatagagacacttttctatcatatgctatttatatatctatgcagttctttagagggaatagctcttaactttttataaatatctaaaaatttattctgtttaaagaaactctgtatttctccctgagtgtcttatttctgactttttatgcatgagcatatcttatgaaaagtagaaaagtattctgtttcatgctggaacaaggactgcctgacattgccttgggggtttatcttattctgcagcatataggaacatatgagaataaagatgcttcaaatgttcaatctggagaagtcaggtcaaacaggaaaaagaagcacaggaagatgagccagggcagggagcggggacttggtctatgacactgtcatcacaggaacaaatgctgagagctcaggaggaggtgaagcatcagtgtgtgggcattggaaggatcaaaaaggaagcatggttttgaaccatcctaatccacctgctgcccagagccagccagatgttgtccttctccctttgaataatttatgtgcaactctacccctcaatctcagtcaaaaccaccatgaactcagttctgagtccagacaggataaaagtgaagggttcttttttcagaggttatttggcccagtgtcgaaacctgttcttattaatggtgctcaacgcttactctcaaactagtatttctttgtgctgcccaggttaatgggcattctgcaaaatatatatatattctttttccagggcagtttcatagtatctaataataaagatagtaaaaaatatattcctgtggtttcatggtacctagtagtaaaggtccccaactagccagcaaagccaccagtttaattttggtttgcccagcttttcccaaatggccagggaagttttccccaaaatgcctattaacatctggtggaactcagttctgaagctgtctgtgaggttcgttgcttggttcctaagttgagggacttgtgtcctctatgtgaagtgtaaatctcaccccctcaccaccacctcactaatttcctactgctgatctccctggactttggaccctcagcctggctgagtcctgctgccaaactgtactgacttgcccagacccagcctgtggccacctgggtgtatgaaaacttgaaggaccctcctctcatagtgttatttttcagatcctacccacttccactcccatctgctcggttctgtaaccatctcagacatgagtccccgggtgtgaatactcaatagaaacatgtcacacctggccagggttggagaggaaagagacatggtacatcctgatatagcacattgggagtaattagttttcatttttgaaatggatccattttgacattgcagtgagaggaagaaatccttactcatctttatattctcagtgactagaactgtgtctaacacacagtagacggtaagtagattttgtgtcaaatggaatttgatttgcttcatgatctagcccctttctggataatagttctccatatgtaaagcagaaatgacaataatacctacttcagggggagtatctttgcaggataatatgagatgattataactaaattgctctatgtctgttggagattaaagatcagaaagctctctctcttttgttgctttatttttaaacccacatattaccattttagtgactgaaatcaccctgaagcagttgaatgacttttatttaataatagttaatattcaataataaatattaatataattaatagtaaaatttctaaatataagttttttagcatctcaataaagctatgtttactttcttttattttaaatgacaaaaattagcctataccttttaaaatttttccttttttgggccccattgttatatagaagtgagctaccagtatcacttttgtaatatctgggactttacgcttctaatatgcatatatatatatatgtgtgtgtgtgtgtgtgtgtgtgtgtgtgtgtatacatatgtgtgtgtgtgtatatatatatatatataactgatagtagttgcttatataagtcactacttaccatgtgtcctttggtatctacatataaaatgagacacagtggatgtgtgatctgtttttgttttagagaagcctttatgcaacaaccagggagatcctaagcctgaaaccataagtattggaaacacaaatgttgtacattcatcccttcccccaaccttagttattatctaagcaagcaagacacattttagaccttttctcataaatcaaatcctacagctctttaatctcttttctttgtcattccctgaattccctccaatatgtggataagggttttatcccccttcagacctagccaacaagttgtcgtttgaagccctaaagtcatctcttagattgctgagcttctgtgttgtgttggcctgtgtggctgacctggttcaatggactacacatactgcttctagaagtatcataaggatagggtttgtctatatccattttatctgaaactccaacatcaggttataaagaagtattttcttcccacttcttttcctagaataataactgcctgaccaatcaatctattgagatccgtatgagaccatgtatgtgaatggagtttgccgagtattaaagattatataaaacaaaggagcagcattttagctattatgggctgctctttgttagtaagaagaatagtaatatgctttgatatatgtcacctcaaaataatagcttgctcaataaataactgtactcattaagtcttgatatgagaaattatacctaggtttgcacttctttcgcaaggctaattattggtttctcaaacaaaacgttgatatttttaaaatgcctgatggtaacttcagttaactaaatatgccacattaactaatttttaaaaaatttttgtgtaactatgtaattgttcaaaataatggaattgtgctctcaaattataatagtcatacagcatctcacataaatttcttttaaaatgaattcacttatgtataggactcaagtgtgcaagaaggatgaaagtaaactacccaactcaaacaaaaaaagaatgtattaatattaacataacataatacagtgttaatacattaacaactatttaacatcagatctctggagatgagacccggacatcagtattttttaaagttttcacggtgattccaaaagcaaagtcaaggctgagaatctctgcattgggcagtgttagatagtgcaacaactgaatctctacattgcgtcttttttgccaaacattgataccccctgaggacaatggtgaggtgatgataggtaagacatcattccacatttaaggatgtgaagcaagaacctctttccttttctttaaggtccaatttgatgcaaaagctatatgctataattcctaactaacacatgccctgaaatggtcatgctcccctttagccatcccaattcccatgaaaattagtatcatagaatcgtgtgccttggcaaacaacatggcctgtgtttgcagtatatttatattcctttgccattgttagcattcctgcagaactgtgaagtgttaacaacctttttttttttttttcctttcagggaaatgatattgaccctgaagcagttaaaggtgaagtgttaaaagttggaaataagagctgtgagaatatacacttacattctgaagccgttttatgcacggtccccaatgacctgctgaaattgaacagcgagctaaatatagaggtgggattcctgcattcctctcatgatgtaaataaggaagccagtgtaattatgttattctcaggcttaaaataaatcattaaagctcatttatgtgtgggttttggctcatcaactcagcctgcattcctagttgttattttagaaatagtgagctttttgccacattgtctccttccccaagcctgggaggtagatctcaaaagttctttctacccacactgcttctccatcacgccacactcttcccaaaatttgctgtaattctcagaagaaataaggatgcatccaagagtgtccttctactgcctcccaccaccccaggaggccagagccagtgttccactgccaaccactgtgatcactaatgcatagagtcccataaataaaggaagatgcatgcatcaaacaaagtaaaataaagattaaactactttacagtaacttttttcgtgtagacaactgaatcaaacaagctagaaccaaagcgagtgatctttttcattctttttttagcagctttattgtgatgtaattcacataccatgcaattcacccattgaaagtgcacagttcaatgggtttcagtatattatattgtcaatttctttgaattgaggtaaaatatacataatgtaatgtttgccattttgaccatttttaaatgtacaattaagttgcattaatttcattcacagtgttgtataaccatcagcattacctaattccagaactttttcgtcaccccaaacagatactctataaccaataagcagcagctccacatacccttctctcccccggctcctgataacttccaatctactctttctctctagaatttgcctattctagatatttcatgtgagtggaatcatacaatatttgtctttttatgtgtggcctattttacttaacataatgtttatccacgtggatgaacataagattcatccacgttgtagcctgtgtcggtacttcattcctttttgtggatgaataatattccattgtatatatcccacatttatccaagagtaagtgatttttaaagggttcctgaagtcttctgaagttataaaatggaaaaacacacaaaaattagaaaatcaaaggctgaatcatgagatcagagttggaatttcagaaggaccataaatcctaaaaatcataaaatgttagagccagaagggacttcaaagatttctgctgtgtatcaaaactgaagtaaaaatattctgagactttattgttccatcataacagtacaattatttacctcttatgggaagtcttctctgccctccaccccaccgtccaggacagaattaatgtcccattgtctctgttgattactgtttagtcatacttctatggtacataccacactgtactggaatcatttatttatatgtctgtctccccttctatacttcagttcctgttttttgtacatctttttatccctaatacctagttacaaatacaaacagctaagtaccacataagtacttaagggatcagtgtcccctaattatttgaacactggagcataattgaggaatctcttattatcctgaaggcagttatgccatttgtagaatggtaataaccagttggtatttgggacccaaagtgctacaacctgtgtagtacaaatatctatcatggctaaatgctgacttttctttatttgtcatttttagtggaagcaagcaatttcttcaaccgtccttggaaaagtaatagttcaaccagatcagaatttcacaggattgattgctggtgttgtctcaatatcaacagcactgttattactacttgggtttttcctgtggctgaaaaagagaaagcaaattaaaggtgcatttttgttactgttcatttttagaagttaccttaagaacacagtcattacagtttaagattgtcgtcgattcttgtgtgctgtcttatatgtagtccataaaacccatgagttctgggcactgggtcaaagtctcctggggcccatgatagccgtctttaacaagctctttctttctctctgttttaagatctgggcagtgaattagttcgctacgatgcaagagtacacactcctcatttggataggcttgtaagtgcccgaagtgtaagcccaactacagaaatggtttcaaatgaatctgtagactaccgagctacttttccagaaggtatatttcagtttattgttctgagaaatacctatacatatacctcagtgggttgtgacattgttgtttatttttggttttgcatttatatttttataaaaacctaaaggaagtatttacctctgccaagtaagtatttgacacaaaattacatggctcttaattttaaaagaacccatgtatatattacattatgattttagagtccataagctctcatttcacaaaaaggttaatttgagcaaaagtaatttgtttatcatctaagtgcaatagtaagaaattgcgaagctctcttttacaatccaggaagagttaagttacaaaatatacttatttaaatgtaagttggaactgctacattttttacctgttgaagcccaaacattgaaattatactgttagtaattcttcgaagtgttttcaatgaactgttagtacacagcctttttcccaccatattctaggacttgaatgtattttgagacttagccaaggaaaaccttcaattatgccatgaaaaaaaggaggggtcaatatcatcagctttgtaaaacactatgcctagtaatgttcaggttaatcagagttttcatgttgttttatttaaatctcctggtaaaagcaaaaggtctgtattgtatcagctccattatctttagaagttacaggatgtgagtcaagtacaagcatttccttggttgaatatttaccattggacaaataaaatgagtcacagatcattgaggatactggaaaagttagaagttgctcatccaaacaagttcaagagcaatgaagcacttaacattttaacattttcaacacttactacctcttatgttttgaagtttatgttatttctatggagatacacatagtaaacattgtctttgccctgattccattcacctttaaaaatccattcgtttaaccgtgtggaaaaatcaaacctagtttattgttttgaaatttagatctatttagtattttatgtgcacatttagtgcatctatttagtattttatatgcacatttcatagttctaatctgagatcattaaaatttacaaattttctttgaaaaaaaaacttacctaatcttctttgaacctccttactcaccaaagctctgtcatcattgctaagaaggttgagtttcacactcttttctccattgagcctgctccttggagacatgaaaagaaaacaggtaaaagagggtcatttagagagaatgagaaaataggtgcacagccaaaacctaatgaagaggcaactgcagagctttcctctctacatctggtggggacagcattctcatcagactttttcacggagacctagagtgctatgtggtgtgacatcagggtggcacactgatggtttcaattggtttctgcacatgttggaatttagctgaagagtcacgttttcatgccaaagggcttttatccatgtctcaccaaggatttccctcaatctgtgcacccttaagcatttagagccctgatctccagatgcaaaggctttaggaagtgagaatgaaagacctgagtttagagaggctgattggcattcccaatcccctggggaaggtttagagaccctgactccttggaattaagggagcaagtacccagctaggctccttccttcctcactcacccaacatttcaggtacttcactgatgttccacatccttctttaaaggttgctcttgtcttttttctggctagtgtctactataactgtaattgatgcccaacgcttttctggaaccacttttggccaagttcatttattattaatcaaactgtccactgtagaaaatactaaaaatgctcaagtgggattaggaatagtcaaggtactaacagcattctttttatgcccttctctcagattctgattctcctgcttatttgcaaacaaatgatacattttggtgctaatgaggaacccccacataaccttctccctgtgttacatactaatacatttcaatactatgcctagtttatcttcatgtcagttgctgtggctatgatgccccctccttgatatgtgtgaattcccagtggaaagagaaagggaaagtggaaatgccctatttggcattaagaaattgactatcagcaccatttcttcccctgaaataaaaaaaaaaattctccttgcaaaagggaactttgcctgaggttcttacagagctttggttataaagatcaacttataaagaatgcttacccctttcatagtgtccttaactaaacaacaaggatggtccactaaccgagatctaacctgccttctctaaacaacagtaacactaaatccagtgccatcactgcacagtggagaatttaccactaatgtgaaaagctttcagttttgggaatatagccattatttatttctaatcatatgtgtatttttcccttggccaggaatccataggttttgcacaatagtaattaattccattaacaaatagtagtgtctcaaaaggcatctttttcattttcttatatttgagctggatttttgtgagacgaggcaattgctcaactacctttgctgctaccactgcttccattcttaaggacatagtatattcaaaaataaaccataagcatggctttttgctattgataaagagagaaatgtctaaggaaatgagggtaaaaagctttcaaaattaatacttagtctacttaaatgaaaatctgtaaacatctaatgaaatgcttgtatatataacttagtatcttttcccaatttattatcatttttatcaaactaattccattataaaagctcttcctgtttcagtccccattaaatgaggttttactgttgttctttaataattttccttcatcttacagatcagtttcctaattcatctcagaacggttcatgccgacaagtgcagtatcctctgacagacatgtcccccatcctaactagtggggactctgatatatccagtccattactgcaaaatactgtccacattgacctcagtgctctaaatccagagctggtccaggcagtgcagcatgtagtgattgggcccagtagcctgattgtgcatttcaatgaagtcataggaagaggtaagtatttccactcagctttttgttaaatacgattttccagtaagcattttatctttggcctttgcagattaggaacttagacaatggtgaaagcaactgacagagcagtgataacaagtgtacttgatttctgttctatagaaatgtagccctgtaaatcatatccgtggggatttgcccttgtgcatggaagcaattggataatcccccaaatatattagaactaaatcacaattcgtcctcgtcctgtgtgtactagcaattatagtttcttcaaaggtgccatttactttcttctaaaactcagggccaggcgcagtggctcacacgtgtaatcccagcactttgggaggccgaggcaggtggatcacctgaggtcaggagttcaaaaccatcctggccaacatggcaaaaccccgtctctactaaaaaaatacaaaaattagccaggcgtggtggcgggtgcctttaatcccaactactggggaggctgaagcaaggagaattgcttgaacccaggaggtggaagttgcagtgagccaaggttgtgccacagcactccagcctgggcagcagagcgagactccatgtcaaaaaaataaatacttataaataaataaatatcactcctttaattttgagtatttttattcaatctctctccagtctttctttaccctgagaacagtgacaaactctatgaagcctggtttatagcagtttgtacactgctggacagcatcagaagacagagaatttatagcattctcctgatctaaagcaacatatatcatctctacaatgcactccaatttctttatacaaagataaatgaatatttttaataagctagccaaagcagcaataacagctagcataaacagtatttgtggaaatatttagcaggaaaagaaaccaatcaaaaaccgggaaatgaacttcattcttcttgttgtttttttttttctaaaaagcttttacccttaatactaaatggcctctgatcccttttattctatatgtgctgcaagaggttgtacaggcatctgccagtgtgatacaagagaagctgatggcgtgatttcccttatatgaacacaaggccttctcactttcctgtggtagcatccacacattcttctgtcaaacaccccagagcgtaatcctttgtgtgctccttcttccccaagagtggcttcactgttaacaaacatctttccatttctcttcagagtaatatatagttctgtcataggcctataaatcccagtaattgcatcaattttagagtgtgtggactcactaattgtgttctaattctacacatttggaaaactagaattttttatcatgaaaggtactaaaatggcaattatttctcttttgaagttataatcattaacagctctataaatattagctactatgtatttatatgtttttctgcaggagaataggagcactcaaaagcataagttttattttattcttctttgcattagtagagggcagcctaatgcctgacactcacatactaggcactcatggtgtcttggccagctggatgaattaattagtgaatgacttacacagctatcagacatttggcacctctgggggaaattactgccactggataaaaggctaccattgggaaaatgatgtggttaaagccagagagaactggatgaagtgagtcagggtgaatttgcttcatctgggcaactgcctttcagtttctgccaacctggattacgtattaaccagtgactaatggggaaatccttattctataatactaatcctatttttaatggtaacatttttatttcatttcagcttattagaatatagagaacttattttattatagttcttcatgtgggttaactttattttcatattttaaaatactatgtcatcctttaaaaaaatttatttgatgaggccgatgttactcaccttttcagtggttccactgtggttgaatattttattaggttaggctttaatatgagtcatatcatctacaacttattcatgaattaaataatcacattgcttatatccttgggtgaaatgtgttgcatctacatatatatttacaaacacacctacgtacctatagtggtattgttaaaagtattttttaaatgtactcttttgctgtatagaaagaagaaagaataaaatgaagctcataaagggtttgataaataattatttcataattaaatgttacgcagtgctaaccaagttctttcttttgcacagggcattttggttgtgtatatcatgggactttgttggacaatgatggcaagaaaattcactgtgctgtgaaatccttgaacagtaagtggcattttatttaaccatggagtatacttttgtggtttgcaacctaataaatagcttataataaaacgttgatttacactttccccttgtggaaaaatcagctaccactgaaattatgggcctaatcctgaaaatttgttttgttctagacttttattgaactacttcccctgaaatgatccctcagagccctcattagtaagggggtaggagaaatgaggttcttggatgaactgagtatcatttaactataactatgtttggtttataatatttgttttgcaagtgacatttctggaaactattggaagcatgttggcacctacagtagtaatgactcattttacccagaggcattactataattattttttaaccacaacttccattaaaaagataaaaaatgaaataagacaaacaggagaaaactacgctggccaaaaattgaaaaatcataagtatggtaatacctcatttatccacatttttggagagtgaggcattccacatacatgaacttcctaaataaatgaaacctacccctttttaatgctggaacattacttaaaattttagctgttattgagaaaatctttttaagatgaaatgcatactctgtttaagggaatgcttccaaatacaaactaagtctttattggtgaccccaagccataattacagccataaattactatattacacaaacagtgtactccacatacatagtgttcctggctccgcctgtgttgacaggtctcacatgcttgcgttttctactcccatttctcattttctgcttgcaaattgcagcagcctgaaaaatgttaaccagctctactacaaactttatatgggacttaataagctttaagtgcacaaatgaaagattttcctgcaagatactttactgtcacaattatttcagtctttttaaaatataaatcaacatgctaagtagtgttctacatggttaattttgttggaagtctgaccatgagggaaataaatggacagtctttatgaaacctaagtataacctttgcactaagtttataggagacaaactggtggctggttggactctatcttgcaaaagtgggcataggtggtgactggaaggcacagtgcacggtggcatcattcactcagatgtgatgtaaaaagaacactctgcagtcaaaccctcaggacaagatgctaactgtgtggtttaccatttcattgctcttcctatctaaatttgacaaaagtattcactgttccataatgaagttaatgtctccaccactggatttctcaggaatcactgacataggagaagtttcccaatttctgaccgagggaatcatcatgaaagattttagtcatcccaatgtcctctcgctcctgggaatctgcctgcgaagtgaagggtctccgctggtggtcctaccatacatgaaacatggagatcttcgaaatttcattcgaaatgagactcatgtaagttgactgccaagcttactaactggcaaactagctgtaagccagccatcccttcaaaataggcctgctctgagtctttaaaaagctagtagccaaagatgcacatttaaaatgttagcatcattcaaatgcacctcaaagtcttctatcctggtgggaaatagtgacacctggaagggtttcctggagcaatgattcttacttgctctgcaagcaaccttgctctaccttccctctgatagggacatttagtcatctttgcatgtctactatgtgccagaaactgtgcacagcacaggagaagtggaagcagagcaagcctcagcccatatggaatgttaactctacaaggcattgaaaaattaactccagatgcgttccttgctgttccttgtccttgccatccactctcacacctcaggaactttgcacttgtgctccctcagcctggaacactctccccgcaaatagccacgtatctcacttcctcatcttcttcagcttttggccgtaatgccatcttcaacataagccttccctaatctgtttaaaattgcaactgaccacccaccctcatggcttcagactcctcttccctgctctattttcccccatcacacttaactgtcatctgatacatgcatgaagctgcctgaagctgcccaatactatggccatgagccacatgtaaaaggaggctagttcgaactgaaatgtgctgtacggtgtagaatacatcccagattctgaatacttagtattaaaaaaaaaagaaggtgaaatatctcactagtagttgtttatattgattacatgctgaaatattttggattttgggggttgaaaaatacattgtgaaaattaatttcacctgtttctttttacttttgagtatggctactagaaaattttatattacatgtgtgtcttgctttatatttctattgaatagcactgtagtagataataaacaaataaacaatagctatatagatgtatatgtatgcatatatatgtacacacaccctcatcccattagaatggaagctcatgagggtaggatttttgtgtattttgttcactgctgtggctccaacacctaaaacagtgtttagcacatagactcgcagtaaataattgttgaatgaatcagctaagggttacaaaaaaaggttcttagcctcttgcaagtggtagatttttttcttgacatttatgccaggacctaaaagtcaccaggccaggaccagggagggtgggaataagaatctcaagaactgaattcatagaaggcctcaagctccgtctcggttcctgctctccaagtctctgtgggaggtaatgaagttgatcaaaagcaactttataaatatggggtcaaattatcagagaaaataagctctaggagagtaatgagatattactcagccaaaagaataaaacattccctggcagtgaacttttgcagataaggcgaattgaccttacaaagcacacagctgccctgacagaccccactttcccacttcaacttttgttattaccctgatggattaatgtggctggaggtgctaccttctctagggtactgttaccccaggattaaagcatgatagagatttcctgttatccagaacggaatagtgccatggccttttttaatccaaggagctgatactgagagcaaccacaaacccagatgtgtcttaaagagaaacctaaaaccaggaactggcctttctctatgctgtgtgcattgagtggggctacagcccttttgcagggtccccactgactacatcttgcactgacaaactcctcagtgactgttgaaggggaataccccattcctgattgccagccagtgacatcaccagacttgacagctgagtggtttggggtgatttctttctgagcctcctctattcactgtgcttctgatgttctaacatcttgggccttactaaccctggaggaactgtccctcccaaggctagctaattcctgcaaatagtaaacagcttgccttcaaagcatacctgtcatgtgcaaaccaaccaatccagagcccttatctaacctcctcctttatcaggctcttacactttgggctactatccacctgccctaatcaccccagggcccagttccagacaactagaactatcctcggagcctgctgaaatactccagattggccagctccaaacctgcttaccctgccttaccagtttcttcccagggaaactgcaatgaaggctcttgctcatgtttttcccctctctctctctgcctctagagcccagggcttcccccatgtgaccctgcatgacagggtgtgcctcctcctcttgcaaactgtgaatagcaaactatcttttcaatggcagttgtctcctgttctgttggcctcatcatacctggaaaataataaaactacattttaaaacacctccattttcccatctggaaaatggagcctgtaacacctgcctgacagaagtgtagaagtagctgtaatttatgaaaacaattagcctggtgtgttgcatacaataaatacttaacaaatggttgatctgtcaatggggcacactttttgttgttgttgttttgttttttgtttttggagacaaggtctctgtcacccaggctggagtgcagtggcacagtcatagtgcactgcagtatccaactcctgggctcaagcaatcctccttcctcagactcctaagcagctgggactataggtgcacaccaccacaccaggctaatttttttgtgggcggtggatgggagtaaagacaggatctcactgtgttgcccaggctgatctcaaactcctggcctcaagccatcctctcgccttggcctctcaaagttctgggattacaggcttgagccattaagaccaaactaatttttgagacaagataattttttataaataaacatttcagaattctaaggtcaaaattagaacagtagatgcttagtttatgcttttctaactctctttgactgcagaatccaactgtaaaagatcttattggctttggtcttcaagtagccaaaggcatgaaatatcttgcaagcaaaaagtttgtccacagagacttggctgcaagaaactgtatgtaagtatcagaatctctgtgccacaatccaaattaagtgacaaggaggaatctgtttcccactgttcaatgctagttaagctgttttctcttcttatgcaaaagtcctttatttctgttacaatcttaaatcgatgtgtaagccctggggatgtgggtgggactttcagactttatccaacagagaatttaaaaggattctccatagggggtcttaaacagctgttgtgtacttttgcttttctcagtccttccctccagtagctctcaatgttgtggtttcacactgcattagtgttggggagggagaatttgatcttcagcatttgacagtgaaaaggagagggctgggaacacaaataccaacatattgcaacttcccaagagtggatttgaagccagcctgcagaagccctaccaaaaatggtatttggcaatgaatatacaaagaactttatttgtgtctggctgcctggctatgtaatacaacagtcaacagtttgtaattgagttcatgttttcccttgcatagcactgattcatgacttatggtatgtgtgaatgaaaaagggtgtgctattaatttcctaccttggttttggtcactgtaacaacataaaagccagcttaaacagaggatgcatagccccagatagcggaaattgatttttgttgaacttcgctgtttttcttagatgctttactgtgtatcctagttctctattacctcagtggtgggatatatgagttttgtgtgctaacctagctcatttaagaatgaaaaagtaaagtatcagtcccctgtcatgctctcccataaaactgagtatcgctaatcagttgacaagcgaagattggtgattgcttgggtagttaattagcatacttcatttagcaaccaaagtaaacccacaggggagacagccttactactgcagatctacattaaagcaaaaaggactttcttatgccatacaattcatgatctctttcctcagcctgttgaattggcaatgtcaatgtcaagcatttttattcaagaattctgttgtaatttagtgttagtcaatagaggccagatgaaatacttccttcagaagttatggatttcaaatactgaagccacttgtttaatctgtagatattcagcatcattgtaaattattctatttcagccacgggtaataatttttgtcctttctgtaggctggatgaaaaattcacagtcaaggttgctgattttggtcttgccagagacatgtatgataaagaatactatagtgtacacaacaaaacaggtgcaaagctgccagtgaagtggatggctttggaaagtctgcaaactcaaaagtttaccaccaagtcagatgtggtaatgtattggttatctctgagtttctcctcttttactttcatatccaactttttttgaagttttatcactacttaattttttaaaaaaattcaacaccaccaattccagttttcttcatatgtaaaaatggacttgtctgatacgtacacattgtatattttcataaattcactcatttgttcaaaaatatttgttgagtggggcaacataccagctccttaggaagcccagagctgaaccaggcatgaaccctgtcggccaagaactttggctcagaagggaagagatgagatggtcaacaatgactgtgacacaggtggcctggaatgggccctgattctcatagccccaggcgagcaagaattccacatcaagaaatctggaagctgtaactgaggcagtctagcagtgagggcatgatccctgggcctagctagtaaagtgccttcccttatctgcaaaggccatccttcttgcgcagaacaagctctcaaaaggcatgcacctgagtgctgaggctgggagaaatactcacctgggcagccagattcaccacattccccttccaccatatggagaagtggcatttgaattgggttaaaggacagcaggtttggagttgggcagctgggcaatggaaataccgatccaggtgtggcagaagagcaggaaagtataagcacctgtaaagttataaggaaacagtacttagttatttggcaagaacagaacacagagagggaagttatgagaataaatggagaaaaatatacttatactaggtcatagagttccttgaaaactgaactagagagtatggaatttattctctggtaatgtggaaacaaaaaagtaatcagattagactgcaatctttcatcattgtattagtccgttctcacactgctataaagaaatactgagcctgggtaacttataaaaagagatttaattggctcacagttctgcagactctacaggaagcatggctggagaggcctcagggagcttttacccatagcagaaggcaaaataggagcaggcattttacatggcaggagcaggaccaacggggctgtgggaagtgccatgcacttttaaacaaccagatctcctgagaactctatcacaagaacagcaccaaaggaagaaatctgcccccatgatccaatcacctccaaccacgcccctccctcagcattggggattacaattttacatgagagttgggtgggaacacagagtcaaaccatatcattccgccctagttcctcccaaatctcacgtccttctcacatttcaaaacacaatcatgccttcccaacagtcccccaaaatcttaactcattccaacatcagctaaaaagtccaagtccaaagtctcatctgagataaggcaagtcccttctgcctatgagcctgtaaaataaaaaaacaagttagttgcttacaagatacaacgggggtacaggcattgggtgaatgctcccattccaaacgggagaaattggccaaagcaaaggggctccaggccctacacaagtccgaggccctatgcaagtccaaaacccagcaaggcagttattaaatcttaaagctccaaaataatttttttgactccatgtctcatatccagggcacgctgatgcaagggatgggctcccaaggccttgggcagctctgctcctgtggctctacagggctcagccccatggctgctttcatcggctggcattgagtgcctgcagcttttccaggcacacggtgcaaactgtcagtggatctacctttctggggtctagaggatggtggccctcttctcacagccccacctggcaaagccccagcactaaggggaggtctcagggagctttttacccatggcagaaggcaaagcaggagcaggcatcttgcatggcaggagcaggaccaagtggggggagggggagcatcttatatggcaggagcaggaccaaggtggtgacaagctttcaccaaggggagaggtgccacacacttttaaacaaccagatctccgtagaattctatcacgagaacagcaccaaagggagaaatctacctccatgatgcagtcacctcccaccaggcctcagctcccacactggggattataattcaacatgagatttgaatggggacacaaatccaaaccatatcaatcattctccaagacaacttgaaaggagtagaagcaggaagatgaagtgagaagtggaacttgaaataagacacaatgagaatggaaaggaagagatgaaaggaggagcatctcagaggtagaatcagaagtatttaccaaggaattgataaaaagtcaaagattagcaaagatatatgctcatgcaataacacatatatgaagcacagaagcaaaagctggactcagaacaaaaatagcaagttgagccttaaacacactgagtttgccttgggagtagaatgtccaggcagagaagtccatcaggcaattgaaaatgtgaatctgcaacttgtaaaaaatgtattattcagcctgggctgtcatacaatagaccacagactggttggcttaaacaacaaaaatgtatttctaaccattctgaaggctagaagtccaagatcaggatgtcagcatggttgggctctattgagggctctcttcctggcctatagatggccaccttcttgctgtgtcctcacatggctaaaagaataagagtcagttctccagtatctcttcttagaagggcactaatcccagcatgaatgcccaccctcatgaccttgtctaaactgaattacctctaaatggccccatcattaaacattgtcacagtggggcttagagcttcaacatatgaatttccggggaacacaattcagtccatagcaggggtcaaggctgggaatatgcttttgagagtccaaaagcaattattcagtagtccaaaagcaattattcaactacatatataaagtgaaagagaaaagcagtgaggtaagggacccagaagcaaagaccaccatgaaagtcagagtaagagaaagtttcaaggagaaattggatgctcaacagagtccactgctactcagtacaccagaagggtcttggaagctgagtaacttgagtgatttggaggtctagagtgtgcttaggagcacaggtgttgaatggaatggagagtacacttattctattcacatgttgtaagtcagaggactgtgatgtctgaagatagagaaacatttgatgtttcagtccttaaggatgacaactaaaaaaggaaaatgtgcaaacaaagtagtcagaaaataatgttcatgggggacatgcacttgaagagaaagggttggtagcttttgagagatgatgggtcagagatctgagtgtggcatgggaagcaagaagtcatctcatccacctctctgtgaatcagcaagagggagaggtgtgacccctattggcaagagttgcaaagaaattgtgacttcaactgaaagctgagtttcagttcctgtgaggaggtaggggaactattagagaataagacgaggtgactgggagtttgttttcaatgagtaagtaggtcataggtcatggtggaggaccaggacttcagcatgcatgagattggtaagagaaagtgatagtgccatgtagagcttaatgcctgggattttgatcctgaaagattctgaaagaggtgaaagaagtgggtgctagagagggagactggggacatgttagtgacagtggcaggtgaaggcaaaagatagggagaattaacccatcctccaagaacatactgttcattcagacttgagggttagtctgccattaagaagccagagccaacccttacaactcaataataagactgtcttagtcgttttgtgctgctataacacaataccacaaattgggggatttataatgaacagaaatgtatttggcccacagttctggaggccaggaagtccaagatcaaggggccacatgtgctgaaggtcttcttgctgtgtcataacatggtggaaggcatcacatgggtgtgagagagtgcaagagagagcaagaggtgaacagattctctaacaaacccccttccacaataatgaactgactcccaagataatgacattaattcacccatgagagtagagcctcatgacctaattacctcttaaagatccctcctctgaacactgttgcattgggaggggattaagtgtccaacacatgaactttgggggacacattcaaaccatagcaaaggcaatattactcaatttttttaagtaagcagaagatttgaatagacattttaccaaagagacgtaagaatagctagctaatgagcacatgaaatgaaacatatgcccacatgaagatttgtacatgaatgatcacagtagttttcttcataatagccaaaaaccagaagcaatcttaatgtccatcaacgggtgaatggataaaaaaaaaatgtggtgtgtccatacaatggactaaaccattcatcaacataaaggaattactgatgcctactacagcatgataaacctcagaaacattatgttaagtgaaaaaaaggcagataaaaaaattacatgttgaatggttccatttatatgaaatttctagaaagaggcagaactacagagtcagaaaacaaatcagtggttgcctggggccaagagaaggagtgaagataaaccacaaatggacatgagggaattttctggaatgttgagatgatctaaaactggactgtgatgatatgatagctgcacgtctatataaatttactaaacatcatttaatcactttaatttactaaacatcaccaatcacttaaaattggtgagttttatgatctataaattatacctcaacaaagctgatttataaaaaaagagcctgatgaaattttggatgtttagggcaagtgttgggattctaagcttcttgacagccacatacatgcaacaatacccccacctccccaacaaacacacacagacagcacagaggccaaggcttcccccatagccacagtcactcagatacttgactggaaatgtacatagatttctgcagataggatggtgctatttctttctcactctcatcgaaagacactattttgtgctacataaaggctgaacctgaataatctgtacataatgctgctttgggaaatggttactgattgcatggataaatttgcacagtgttttacttccaggacagcgcaatcttgaatgttgacatggaacatttccaaaagcatgcaatgagctatgtgtatgttgaaacctgcgaccaaaaacttgcctgcttgtagattgggttttctttctagaaaatgcccaaatggagtttggctaaaatctgaatactctttaagtccattcaaacaaaatcggagtgtcactacactggaaatcactcacaccctcctctgaacccttttgcaatgggtgttgtaattgtattatacgttgtttcacacttaatacaagttcttccattaaactgtgtattgacttccttgttctcagcccttatctgcctcatctttctgaagtgtttaacattattgtaaccctcatttttcttgaaatttcctcttcctttggtttctgggacactgaaacttccagttttcctcctgcttctaggttgttttctttatcctcaatggcttctcttccttctgtcttccttctctcagatgtagctgtctcccaggatttttgtctttaggggtcatcctccaccaacagttggaaccattcccatcaataaccacctttgattctctctacctggatgtcatcatcagtgtcacaaatttaccatgttcagaatcaaactctttcctgccaaaccctcaatttctcacctcctggctttgattaatggcatcaccattgtgtaatttacccactcctcattcttttcagtgttcggtttttcaggttttgacaaatgcatgcagttgtgtaaccaccaccccaacaatcaggacatagaacagttctatcatctcagaaaatttccttatgctcctttgtagtcaacctctaccctatccccaggacctggaaatcagaaaaccagatttattttctgtctctagagttttactttttctaaaatgtcatataaatggaatcatgcagtcagtagtcttatgagtctgtctccttttacttcgcatattacatttgagagccatccatgttgtcgtatcagtagtagtaacgtatcagtaattcattcctttcttattgtggcaaaaaaatacataaaatttaccatctgaacgatttttattttattttaagttccagggtacatgtgcaagatgtgcagatttgttacgtaggtaaacgtgtgccatggtggtttgctgcacctatcaacccatcacctgggtattaagctcggcatgcattagctgcttttcctgatgctcctcccctccctcgataggccccagtgtgtgttgttcccttccctgtgttcatgtgctctcattgttcagctcccacttagtgagaacttgcggtatttggttttctgttcctgcgttagtttgctaaggataacagcttccagcttcatccatgtccctgcaaaagacatgatcttgttcctttttatggctgcatacaaccatttttaaatacacagtacagtattgttaactatgtgaacattgttgtgcaatagattcctagaactttttcatcttagcaaaactgaaactctatatccattaaacaattctctctctcccccaggccctggcaaccacaattctactttgtctaagagtttgactacttcagatacctcatataagtggaatcatgcagtatttgtctttttaggaccgacttatttcatttagcaaaatattctcaagcttcatccatgttctagtatatgacaagatttccttctttttaaaggcagaataatattccattgtacatatatgccacattttctttatccattcatctgtcaatggacatttaggtttcttatacctcttggctattatgaatagtgccgcagtggccatggatgtaaaaattctctttgagatcctttttttcaattcttttgtatatacacacagagacaggattgctggatcatatggtaattttattttcaaatttttggggacctctctactgttttccacagcagagtagttcatctctttttatttttgagtagtattccatcgtacagatgtaccacattttatttatccattcaccagttaaagaacatttggggccaggagaggtggctcacgcctgtaatcccagcactttgggaggccgaggagggcagatcacttgatgttaggagttcgagaccagcctagccaacatggtaaaaccccatctccactaaaaatacaaaaaattagccgggagtggtggcacatgcctgtaatcccaactattcaggaggctgcggcgggacagttgcttgaaccctggatgcagaggttgcagtgagctgagatcatgccactgtactccagcctggatgacagagtgagacccgtctcaaaaataataataataaagaacatttgagttctttccattttcaggcaattacttatacataattgtaatggctatgacatttgcttgaaggtttttctgtgaacgtaatttttatttctcttgggtgaatatctaggtgtaagagtaactaactgggttgtaagataagtgtacattcaactttatgagaaactgccaactatttttcaaagtggctgtatcattttatgtccccaccagcgatccataagagttccagttgttcagcatcctctcccgcacttgacattgtcagttttctgattgttagtcattctaattggttgtagtgctgtctcattttctttttaatctttatttcccaatggctagtgatgtcgagcctcttttcatgagcttatttgccatccttatatcacctttagtaaagtgtctactcaaatcttttgcctatttttaagtatttattaataatattaatttagttagggtttattttattggcttgtttttgtttcttattgaattgttcgagttctctgtatattgtggatacaagcatatcttatgcgatacacttttgccaatgcatttttttttcttttgggacgaagtctcactctgtcacccagcctgaagtgcagtggtgcaatcttggctcactgctacctctgcttcttgggttcaagtgattcttttacctcagcctcgccagtagctgggattgcaggcatgagccaccatgcccagctaatttttgtatttttagtagagacagggtttcaccatgttggccaggctcctgacttcaagtgatccgcctgccttggcctcccaaagtgctgggatcacaggcatgagccaccggtgacacctggcccacaaatgcatttttctagtctgtggattaccttttcatttatttaatggtatccttcaaaaagcaaaagtttttgattttgttgaaaattttatcagtttaccaattgataaaactttatcaatttattttttttcttttatcaatcctggtgttgatgttgtatctccatgcatctactcttgaatgctcagatttgcctatcatccttccttgctcacttacctcagtagcaaccctgtctatcacttttcatagcttacaaccatctttcacatttaatcatttctttgatcatcaccttcagtaaagttaggccagatattctccagatgagcttattgctggtgctcaaatgctcaaaatggcttgaccaatgccatacagtaagcacggatgatagcgctctcatggcttgaaactaaaactgacttgtttcctaatgcacatgaattgtacacctccctcccctcacccccgaccccccctcaaccgacagacacacacacacacacacacacacacacacacacacacacacacaccagcttctctcttcttggtcatcatcctaatcagcatcacctcctctttcactgtccctcccctcaccctgctgtcagccccacaatgctttcaggggagtgtggagtgcagacaatacaatgctcttcctggaaaccttcttcctcttacctccctgtcccgtgagtcctccagctattttctgatacccagttattgcccacgtcctttaattccttggaaaattacccaactccatcccccttttatgtgactttgtctccagacaaatctacatgtagcgtagactgtcagatagggagacctgatcacagaactttggcttcctcatcctaaaataaaaccaattacatcacaggattgtaaccaagtacaatccattataaggattaaataagatgttttgtaaaggatataatgcctatgcatgaatcattatatgacaaatacactctttcactaccttaattccagagaaaagcctcataggcttccgtattgtaggtatgcaggagtgtccctcacctattcttattcagaaacctcctaactggcctccatattgtgaatcagcttctcctttctgttctaagcttggcgcttacagatgccatctccctgagcacaactcagaactcagccatgtcccattgatttcagtctaacgcactttctttttttttttttttgagacggagtctcactctatcgcccaagctggagtgcaggggcgcgatctcagctcactgcaacttccacctcccaggttcaagcgattgtcctgcttcagcctcccaagtagctgggattacaggtgcacaccaccatgcctggctaatttttgtatttttagtagagacagggtttcaccatgttggccaggctggtcccgaactcttgacctcaagtgatctgcccacccccgcctcccaaagtgctgggattacagatgtgaaccaccttgtcccgtcctgtctaacccactttcaacatttaaaaacctccacagcacagtcccatttcaatcttatgggtccctaatcccttcccctactccaacatgtcaagcaacgtgaactattatactttatggtttaataagaacacatatgcagccaggcgccgtggctcatgcctgtaatcccagcactttgggaggccaaggagggtggatcacctgaggtcaggagttagagaccagcctggccaacatggagaaaccccgtctctactaaaaatacaaaaattagcctggcatggtggcaggcgcctataatcccagctactcaggaggctgaggcaggagaatcgcttgaacccgggaggaagaggttgcagtacaccaagattgcaccacttcactccagcctgggcaaaagagcgaaactccatctcaaaaaataaaaaaggaaagaaagaacacatgtgtactgttactcctggccccaccccctccacccaaaactctccctctgccctcatattacctgcacctataaaacaaagtctccctgttcctcaagacccaccttactgtcactctcttcctgcagcctttctcagtaccctactattatctctttgacttttggcaacctttgtacctctttgatattactgctctatattacagctattatcttattgtcctgtgtggcagttatctgctcaattctcttaaccctgttcattcagccctgggacctatctagtaacttgaacagtaacctactcgtatgtgatcaagggtcaattgatacttgttaaattgattttaaatgttaatgcatattctgggacttgaaagttaacacgatgatgttgtcagaagtgattgttgattgttaagattttcagactttgaaaacttctactttgcaaagctgaattagacagcaaagttctgtagctccctcctggcaaggggtttgagttttctgttgggatcaaggcagtcagcagccatcaagggttcttgcacttgggcaaagaagtcattaatggtaatttgtatcagcaattacagcatctacctcatttctttctttcagtcgcagcgttcaaaggcaggctttattctccttcttgctgggtactgcaagctacacttgcctctcagttttatgtcttcctactccagctgtctggtgtggattttccttctgctccaagcttccttcatttcttcctccttatgcttcctactcttagagtggcctggaagtgttgctgggccagaactgcccccctgggtcctgtccacaggggcggcctctgcccatgctgactctcctcgtgtcattcttgcatgggcacatgtccagggggagataatatgtatgacctggtctatcctgagcacagtgttttaaatcaagaaattgcatgtttattgaagttcagtagaccaaacaagacctaagggtcaggaactcttaaatgtttatcccagtgtggactcagatgtattggggaattttagcaagtcacttaacctctccgtgtccctgtgatcttcctatatagtactgatacggctattttatatgaatctagtactttcacatcttcatgtgacagttttattgaaattaattttcaatagagaaacttgttgccttgcagttttttttatttctgatttttaatatgtatttttacttatgttgatttagaccttcccatttaatagtaacctttcaatgtggttacatttcttaaagagtatttatgttcagtttgaaaccacacaaatttaaattttgggaggctttcttcttcttttacaagtaatgtaaaattgtagtgaagctattggaaaagaaaaggatagaaacatgttagtgctttgacacagcgggagagaattttggaagagatattctaccaactacagatggaatcttcatcatcatgtagacttcagatattcttttagaaaactttacatttacttataatctaaaccttacttgtttaaacaagtcatgaaatgtatagcttaataattgcctttaagaaaattgttgcccaaaacagaaaccgtattgagtatgtaaagccaagtttagttaccaagacctactgatttcctttcatatatgtatggtcacatctctcacctcatctgtcctgtttcttgttttactagtggtcctttggcgtgctcctctgggagctgatgacaagaggagccccaccttatcctgacgtaaacacctttgatataactgtttacttgttgcaagggagaagactcctacaacccgaatactgcccagaccccttgtaagtagtctttctgtacctcttacgttctttacttttacagaaatgcctgccttcaaagggtctcttacagcatgtctttctttttggaacagatatgaagtaatgctaaaatgctggcaccctaaagccgaaatgcgcccatccttttctgaactggtgtcccggatatcagcaatcttctctactttcattggggagcactatgtccatgtgaacgctacttatgtgaacgtaaaatgtgtcgctccatatccttctctgttgtcatcagaagataacgctgatgatgaggtggacacacgaccagcctccttctgggagacatcatagtgctagtactatgtcaaagcaacagtccacactttgtccaatggttttttcactgcctgacctttaaaaggccatcgatattctttgctcttgccaaaattgcactattataggacttgtattgttatttaaattactggattctaaggaatttcttatctgacagagcatcagaaccagaggcttggtcccacaggccacggaccaatggcctgcagccgtgacaacactcctgtcatattggagtccaaaacttgaattctgggttgaattttttaaaaatcaggtaccacttgatttcatatgggaaattgaagcaggaaatattgagggcttcttgatcacagaaaactcagaagagatagtaatgctcaggacaggagcggcagccccagaacaggccactcatttagaattctagtgtttcaaaacacttttgtgtgttgtatggtcaataacatttttcattactgatggtgtcattcacccattaggtaaacattcccttttaaatgtttgtttgttttttgagacaggatctcactctgttgccagggctgtagtgcagtggtgtgatcatagctcactgcaacctccacctcccaggctcaagcctcccgaatagctgggactacaggcgcacaccaccatccccggctaatttttgtattttttgtagagacggggttttgccatgttgccaaggctggtttcaaactcctggactcaagaaatccacccacctcagcctcccaaagtgctaggattacaggcatgagccactgcgcccagcccttataaatttttgtatagacattcctttggttggaagaatatttataggcaatacagtcaaagtttcaaaatagcatcacacaaaacatgtttataaatgaacaggatgtaatgtacatagatgacattaagaaaatttgtatgaaataatttagtcatcatgaaatatttagttgtcatataaaaacccactgtttgagaatgatgctactctgatctaatgaatgtgaacatgtagatgttttgtgtgtatttttttaaatgaaaactcaaaataagacaagtaatttgttgataaatatttttaaagataactcagcatgtttgtaaagcaggatacattttactaaaaggttcattggttccaatcacagctcataggtagagcaaagaaagggtggatggattgaaaagattagcctctgtctcggtggcaggttcccacctcgcaagcaattggaaacaaaacttttggggagttttattttgcattagggtgtgttttatgttaagcaaaacatactttagaaacaaatgaaaaaggcaattgaaaatcccagctatttcacctagatggaatagccaccctgagcagaactttgtgatgcttcattctgtggaattttgtgcttactactgtatagtgcatgtggtgtaggttactctaactggttttgtcgacgtaaacatttaaagtgttatattttttataaaaatgtttatttttaatgatatgagaaaaattttgttaggccacaaaaacactgcactgtgaacattttagaaaaggtatgtcagactgggattaatgacagcatgattttcaatgactgtaaattgcgataaggaaatgtactgattgccaatacaccccaccctcattacatcatcaggacttgaagccaagggttaacccagcaagctacaaagagggtgtgtcacactgaaactcaatagttgagtttggctgttgttgcaggaaaatgattataactaaaagctctctgatagtgcagagacttaccagaagacacaaggaattgtactgaagagctattacaatccaaatattgccgtttcataaatgtaataagtaatactaattcacagagtattgtaaatggtggatgacaaaagaaaatctgctctgtggaaagaaagaactgtctctaccagggtcaagagcatgaacgcatcaatagaaagaactcggggaaacatcccatcaacaggactacacacttgtatatacattcttgagaacactgcaatgtgaaaatcacgtttgctatttataaacttgtccttagattaatgtgtctggacagattgtgggagtaagtgattcttctaagaattagatacttgtcactgcctatacctgcagctgaactgaatggtacttcgtatgttaatagttgttctgataaatcatgcaattaaagtaaagtgatgcaacatcttgtatactgatagtggttattgccagtcatgcttgattacctgcatttgcataatgatagaggaagcctaagattgatttcacctggctgcatagagctcatccatgtaggagagccttagtcaagtgaatgctgaggaagtagtaaaacagcatgcatccccgaatctcaggaagtctctgtctttccaagggtttggtctaagttgctgattacctggatttttctgacgatctttcaactgctagagcatctggttcctgttttagcatggtgctcttctccagcaaggtgtgtccttagactagaagacacaaaaatggagcagcagccacaccattggcgcacagatacctaggtgtgggttggagagagaggccttcttgccccatcaaaactactctttatctacacaggtgcccacccttttacccccagttaccagagaaattaccttcaggttatctccatgtatattcttgtaatggtaagggaattcaaaggtgataatttcagccatctaagaattgtgtgacacattgggggtaatctaattttaaaagaacccaatttaaaataatgcctacaaaatacaatggacactgatcctttactgggagataattcaacccccgctcacggccaaactctctcccactcaaaagatgcatttccccagaaagttcaatccaactctctcccataaggagaacaacctgtcatctttacatctctagaatccggcacttagtagattctcaaataattgctgaactgaaacagcattttcttattccccatcactttttatttatttatttatttatttatttatttatttatttttgagacagggtcccactctggcccccccagctggagtgcagtggcatgatcttggctcactgcaacctccacctcctgggttcaagccattctcctgcctcagcctcctgagtagctggaattacaggcacacgccatcacgcccagctgatttttgtattttagtagagacggggtctcgccatgttggccaggctggtctcaaactcctggcctcaagtgatccacctgcctcagcctcccaaagtgctgggattacaggcgtgagccaccacacccagcctactttaaaccaccatggacagagttattgcctatgtagctcccatgatgtttggagaacactaatatggagaatgcagacttttctggggaaagagaaatagaaagatagacctttaagaagtttggcttggtgctacgcatttttaattatcacagggttttcgcttcacgatataagcatcaattatatttttgctcgctgacctacacagtggattccatctttaaagaaatagggagaagggatatataacgcgtagaaatacatcaaatgcttgaatgctgacatctggcattgttaatctacctgatttagttcagaaaatgagttagcattatataaaagaaattgattagtattttatttaactcaacgaatatttatcaagcacctatatatgtcagacactgctaggtaatggggatataaaaataaacagtccctctcaccccaaggaatttgatgaaacagacaaaattacataattaatgaatattaaaaattattcatttcttagatttgtgagttgtcttgaagagacaccacagtttaaacatacacaaagtgcaggctcctgggcaacagaccaagccctaactcagattgggcaacatattggacttctctaaacctgtgttctcatctgtcaaatacattaatcatggttacccccacaaagttgtttgaggactttaaaaaaaagtgtataaaggcacctggcacaccatagttgttcaataatcataatatcattattatctttagtcttagacaataaaagcccatgtataggtagccttagttggctaaagggaaatgaggcttggaggggcattacagatgtttaaatccaaattcttaccccattctttttgtttttgttttttgtttgttttttggtttttgttgttgtttgttttgttttgtttttgagacagagtctcactctgttgcccaggctggagtgcagtggcatgatctttgctcactgcaacctccacctcctgggttcaagcgattctcctgcctcagcctcctgagtagctgggattagaggtgtccaccaccacaacagctaatttttgtatttttagtagaaacggggtttcaccatgttggccaggctggtcttgaactcctgacctcaggggatctgcccgcctcaggctcccaaagttctgagattacaggcatgagccaccatgcccagccaacttcttaccccattcttcacctcacacctgctttatatacagtagaaacagctgtgattctgcctcatcctgcatatgacagtgagggtgagagaggagaaaggtgacaagacagtggcactggcaagagaactccctcacttctttctctacactccccactatcactttaattacttctcctgtgacagattccttttttctgttttagcctttagacctggaatacacaacagacatggaagagaacattctgtctaaatgacaggcatgttgcatgaaggtgcaagaataagagccatagtcttcagtattggtgtctagaaattattattgttcctcatttttgctcaaatgttaatagatggttaatgatcattcaggttgaagaaaaagtaaactaagtacagtattgttttagttatgtgctatgtgtttgaagatgaggaatacatgactagacacacatagcaagttacacaggcacacatgactcactgttgtagcacttcagacagtttcaagacacagagaggtatgcagacgttatgccccaaaggaagaaatgcttattgctgtttttctttttcatatttgaggggttctttcaggactatctcaattccttatctatcaaagaattggaaagaacttcagtcataaaccaatgaaatatttcagttggtgaattgaaggtaataaaatggatgcttgcccaaactgtcctttgttgtaaattattccagagaactagattacgtcagccaaagatattgatcacaatgctgagaggtttataactactattaacttaccatgtgaccccagggcagaaatctaggaaaattgcaaaagcatatctactgtaatgaaaagcccatcattaataggacttactatcttgtcatccaactagtactatgttggcttcaaggcaaatatttaacaaacatttgaaacagaaagcacttctgtcttctcccttttatcttccattgatgttcccgagctattctgatgaatgtgtttttgttcttatcaataaaacatgtaggttaaaataagtgaatatatttataattattagcctatataaattagcatccaaatattgaaatagctcctactcctttattattactatcattattttaataaggagttagctcctcatgtagaccagtttagaatacggctcaagtccaattctcctgcgtagttaaaccctacctggttaagcattctgaaaactagttactcttttttttttctttttttgagatggagtctctctctgtcacccaggctggagtgcagtggttcgatctcggctcactgcaaccaccacctcctgggttcaagtgattctcctgcctcaacctcccaagtagctggaattacaggcatgcatcaccacacccagctaatttttgtattttcagtagagatgggatttcgccatgttggccaggctgatctccagttcctggcctcaaatgattgccatctcagccttccaaagtgctgggattacaggtgtgagccaccacacccggtggaaaacgaggtactcttagagaagcaattctgagatgaaaatggccatatttagaatgcataaacagacatctctgatttaaattaactactaatttaacgttatttttgaagcactgggcccaaattacaatgagaattaattcttattcctttcttgaaaagaagccctttgtctttgtgcattcaatttttcactgtcacatgagtacattcttttcaccgcatgagtcccaggctggcagaaacatccactaatccttagacctcttggctggaacgacaaaaatgcataaaatcttaccaggccaaaagagatcaactttaaaaatctttggcatccaaacatgtcagaactgtttttcgctggttctgcaaaccatttgtgttcttcatttatggtccaggggatctgtaatgtcagttcctacttttattgggcagcctggaatttttaagcaccatatttcctttacctttcttggtggtttataattttcaccgctgtttttacgagttttcttctctatgtctctaagcctaagtgtggagatgtggtaatagacagcctgctctttgccaatcaaagcccttactttgacgttggccactttgttcctgtgacatctgctctttccattatagacaaactggggctttccttctgcagaactgtgactaaacaaccaccatattcatcagtggcaacaattcttgtaaacaagaaacgctgaattcaaaggctttgtgaaatcctgcccccaagaggccacatgtctaaagtcagtcacgtggtcctcagaaatgattttagaagtctcagtaaagaaaaattacagagacactcaaatatcctagtgtgatactgctgtaaaacttcttctaattttttgttaagctgtgagaaagggcctatggaaacacctggatgaagcagcaaatcactgtcccaaagtcactaaaaatcatatttcagaaaggaaatatctagcgttaaaacaacatagatgcatttttgaaaacaaattgaattgagaaaaataataatgataacaataatgatctaatcccaggacatgtcacaggaattaatgactgactaaaagctaatggtctaaggtaatgctctcaggaattagtcttgcttattgaactgctattgttttagtaaacgaatgcttaaactgacagaaagtaaaaaatcagggctgccattatggagcctggttgattcaaagtggggcagggggagaagctaaagcaaaaaaaaaaaaaatgcatcatttgatcatttgctgttcttactcaattttttaagttcgtttgtcgttcacaaattatagattctttatcatttttttctttcatgtatctgtatgtacttttacttttgtactttaaggatgtgtttacttatgcattgttttattgacagagaagtaatctgataataaaaatgcaactccctctagtgtaggcatatcaaagatctaacattctgtttgcctagaatcgttttattttaaatactctgatctgaagaaaatgtggatcctcggccgggcgcagtggttcacgcctgtaatcccagcactttgggaggccgaggtgggtggatcacctgaggtcaggagtttgagaccagcctggccaacatggtgaaaccctgtctcctactaaaaatacaaacattggctgggcgtggtggcgggtgcctgtctgtaatcctagctactcaggaggctgaggcacgagaatcgcttgaaccccggaggcagaggttgcagtgagccgagattgcaccgctgcactccagctcgggcaacagagtgagactttgtctcaaaacaaaaaaaacaaaacaaaaaaaaagaagtggatcttccatgtgggctttagaatagtgcctcaaaattatacttcacttagaacttattactcaacatcttatttcaagagtattctaacagctgacttcttgattctacctttccgtattgcctcttccttataaccccaaaacagctaccaaaattatatatctgatcacttcactttcctgcttaaaaacctatgcccattcctagatgttctctgtgcagatcctttgttgtttcattttgtttatttttattataaaatatatttttgaggaaaaaattttaaattggacaaaaagatataaagtgaacaggaaatatcctccgaccactttctctccccctccatcctcactccccatgggtagctaatattaatgcactttttcagaaatgttccactctgcatcagtggaactgaactaaaccagacactttagtacatccttcaataacctttgtcttattgaccgaactatgactcggcacacccttccccagtcaagaatattgttcttctacctctgtgactttgaactctcaacagaaatatccccctttggggtatgagccatataaacagggctagaccaagctctgtgaactaccccctcccccactgacttataatttgatattgcttcaaaccagtatcctttacctttgttttgctcaacttttatttaaatggagaggagattaaaatgattttctcttaataaaaaattaaagaaagagattcacttgtttctatttgccaaagcagaataaatatatttttaatcaacaaaatagtatgcttttctaaaattctagttctgtttttcaatggaaatttgcagtgaaagtttccagatgcttggaagttataaagagttttaaacttaggtaataaaaataaatcacccatttatgataagcagcactctgtgaaagattatttcagaatctcagctgactgacaacttttaggagactgaactgtacttaagtgtggcaaacatgcatcatagagatgggttgtttactgtagcaagttacttgccttcggtccaactgtccttttggcagaagcacaccaatctaattttgcctgttacataaagagccacatgtggaaacctgagtcgcctgacatcatgttactgacttaatccagtcataattcagcgcccagagagcggctggcaggcccacccaccccccactctcactctcgatgtattcatgatagcacagaggttagctggacacacttgggaatcagatatgctaggtcagactcatttccaccacttatcagtagtgcgattttggaccaattgcgtaaccctcctaagcctcagtttctgaatccataaagtagaaatactaacagtggcttcctcataagattgtgcaaagattgaatgagacaatgtgtgcaaagctctcaaagggtggcagtcattattgccggagaccttgattttactttttaaatttttattcaagactctagaataaaattacctccacagatgtccaaagtttggcacagttcagaaaagtctgaaggtaaaaatcatgaaaacagacattgattttcttcatcctttttggtagtatcaacctaatagaaactggaccagggtcctgatccagtctgactttactgcctatgtgaccttccacattacttaaaagttgtgcttttcttgtctataaaaaattaagattatacctcacagcattgattgtaaatattaaattgtgtaagattttacacaagtacaaggtgttattatggttcatcagaatgtaatttttttactttgaaaatctccgtagaactcatctgattcacaaaattccctctaaccaaccccagcacttcatttgctcccacataattgctggagttgtttacacaaatctgtactcagaatcaaagagctcaaggctggagaagtcagggaatctggccctgggcctctgcttgaacattctgggtgctggtcgctagctgacccttaaacaactccatgtcctctttggagttcaaagtttgggggtaaaatcactaccccctctcaaagataaacacaaatggagctccaaggtggtgtccggtgctaacatgagacatgttgagtgtgaatctcatcagagcagtgtttttccaacataataaactgccctttgttcaaatcagaaactgatttcactcgattttcccaaatcggccctgccaggtttccttgatttaattgtatattttttgtctgctgacaatggaaagcagaagaaaatagtctcgctaaggaaatgaaatattaccaagaaaaacaggcattctcacactgtgtgaggtggttttttttttcttcacattcaatttgtataagaaaaaaggtctctaccctttgaaacaacagcattattgcagtgactattaggtcatatctacatggcccaaaagaaaatgttggaaagaaaattaactagttcataagggtatgggcaacattatttttaaaaggaaatggttcttcatacatagagagaataataaatgggagcaaaaaaatgcaagttaggcaattatttaaataattccaattttaaaatatgtacttaactaaagcatccgtggagttcaggtaaaatcatttagagggaacgcaaattaaccaaatcactactgaaattcttcactttttaagctaaaattgcttgttcttgctttaataccagagaagacctgagtcctggttgactgttagtgaggagttgtatcaaaagaacaaaggtttgaagccagttagggccaggtgcctatctcagctctgccatctactcatcatttgcccatcagcaaattcaatttttcatttatttggtttaaaaatattactgagacccttctacgtgataggtgctattgcaaagaaggaagatacagcaggcaatatactagccaagcctgttgctcccaaggggcatttattccaaagcagggagaaagaaagagagacaaaaggcagggggagggaggaaggaggggagaaaaggggaaaggaaggaaagagaaaaaagagaaagataagagataaacaacaaaactatcaacatttggtggtatgaagccatggaaccagaatgagactatctagggatcggtaccagagagggccaaggatgcagccttagggcacaacagtgcctagaggtcagggaggtgagattgaagaggccttacttatctcgtcataaaatgctaggttatcacctacaaagattttttttttttttgagataaggtcttgctatgtggcccaggctggagtgcaatggcttgatctcagctcactgcagcctccacctcccaggttcaagtgattctcctgcctcagcctcctgagctgggattacaggtgtgcaccaccattcccagctaattgttttttttttttttttttttagactgagtcttgctctatcgccgaggctggagtgcagtgatgtaatctcggctcactgcaacctctgcctctcaggttcaagcaattctcgcgcctcagcctcccgaggagctgggattacaggtgcacgccaccatgcctggctaatttttgtatttttagtagagacggtgtttggccacgttggccaggctagtctcgaactcctggtttcaagtgatctgcccacctcagcctcccaaagtgctgggattacaagcatgagccactgtgcctggctgatttttttaaaattatgtacattttgctactagcctattaaagatacccaacaaatgttaatttcttcctttttttttttaaatcctctccctcctcaccaactcccaccatgcaaatataattaatctctggttctaaaaaaaagacaactgagctcctgcataccaaaggaataaaaaactaacacttcctttagctcaatttaatctaggccccactgaatgtaatagtgagcaaagaccatacaatagcaaatcattatagatcacaactagtaatcccaaatgacaggtctcctctgttctgaatttcatttcattgaaattgttccaaagtttgcatcttaaattacacaaattatattcactcctgtc

SEQ ID NO: 414 - DNA, 4067 bp, Homo sapiens
ggccctcgccgcccgcggcgccccgagcgctttgtgagcagatgcggagccgagtggagggcgcgagccagatgcggggcgacagctgacttgctgagaggaggcggggaggcgcggagcgcgcgtgtggtccttgcgccgctgacttctccactggttcctgggcaccgaaagataaacctctcataatgaaggcccccgctgtgcttgcacctggcatcctcgtgctcctgtttaccttggtgcagaggagcaatggggagtgtaaagaggcactagcaaagtccgagatgaatgtgaatatgaagtatcagcttcccaacttcaccgcggaaacacccatccagaatgtcattctacatgagcatcacattttccttggtgccactaactacatttatgttttaaatgaggaagaccttcagaaggttgctgagtacaagactgggcctgtgctggaacacccagattgtttcccatgtcaggactgcagcagcaaagccaatttatcaggaggtgtttggaaagataacatcaacatggctctagttgtcgacacctactatgatgatcaactcattagctgtggcagcgtcaacagagggacctgccagcgacatgtctttccccacaatcatactgctgacatacagtcggaggttcactgcatattctccccacagatagaagagcccagccagtgtcctgactgtgtggtgagcgccctgggagccaaagtcctttcatctgtaaaggaccggttcatcaacttctttgtaggcaataccataaattcttcttatttcccagatcatccattgcattcgatatcagtgagaaggctaaaggaaacgaaagatggttttatgtttttgacggaccagtcctacattgatgttttacctgagttcagagattcttaccccattaagtatgtccatgcctttgaaagcaacaattttatttacttcttgacggtccaaagggaaactctagatgctcagacttttcacacaagaataatcaggttctgttccataaactctggattgcattcctacatggaaatgcctctggagtgtattctcacagaaaagagaaaaaagagatccacaaagaaggaagtgtttaatatacttcaggctgcgtatgtcagcaagcctggggcccagcttgctagacaaataggagccagcctgaatgatgacattcttttcggggtgttcgcacaaagcaagccagattctgccgaaccaatggatcgatctgccatgtgtgcattccctatcaaatatgtcaacgacttcttcaacaagatcgtcaacaaaaacaatgtgagatgtctccagcatttttacggacccaatcatgagcactgctttaataggacacttctgagaaattcatcaggctgtgaagcgcgccgtgatgaatatcgaacagagtttaccacagctttgcagcgcgttgacttattcatgggtcaattcagcgaagtcctcttaacatctatatccaccttcattaaaggagacctcaccatagctaatcttgggacatcagagggtcgcttcatgcaggttgtggtttctcgatcaggaccatcaacccctcatgtgaattttctcctggactcccatccagtgtctccagaagtgattgtggagcatacattaaaccaaaatggctacacactggttatcactgggaagaagatcacgaagatcccattgaatggcttgggctgcagacatttccagtcctgcagtcaatgcctctctgccccaccctttgttcagtgtggctggtgccacgacaaatgtgtgcgatcggaggaatgcctgagcgggacatggactcaacagatctgtctgcctgcaatctacaaggttttcccaaatagtgcaccccttgaaggagggacaaggctgaccatatgtggctgggactttggatttcggaggaataataaatttgatttaaagaaaactagagttctccttggaaatgagagctgcaccttgactttaagtgagagcacgatgaatacattgaaatgcacagttggtcctgccatgaataagcatttcaatatgtccataattatttcaaatggccacgggacaacacaatacagtacattctcctatgtggatcctgtaataacaagtatttcgccgaaatacggtcctatggctggtggcactttacttactttaactggaaattacctaaacagtgggaattctagacacatttcaattggtggaaaaacatgtactttaaaaagtgtgtcaaacagtattcttgaatgttataccccagcccaaaccatttcaactgagtttgctgttaaattgaaaattgacttagccaaccgagagacaagcatcttcagttaccgtgaagatcccattgtctatgaaattcatccaaccaaatcttttattagtacttggtggaaagaacctctcaacattgtcagttttctattttgctttgccagtggtgggagcacaataacaggtgttgggaaaaacctgaattcagttagtgtcccgagaatggtcataaatgtgcatgaagcaggaaggaactttacagtggcatgtcaacatcgctctaattcagagataatctgttgtaccactccttccctgcaacagctgaatctgcaactccccctgaaaaccaaagcctttttcatgttagatgggatcctttccaaatactttgatctcatttatgtacataatcctgtgtttaagccttttgaaaagccagtgatgatctcaatgggcaatgaaaatgtactggaaattaagggaaatgatattgaccctgaagcagttaaaggtgaagtgttaaaagttggaaataagagctgtgagaatatacacttacattctgaagccgttttatgcacggtccccaatgacctgctgaaattgaacagcgagctaaatatagagtggaagcaagcaatttcttcaaccgtccttggaaaagtaatagttcaaccagatcagaatttcacaggattgattgctggtgttgtctcaatatcaacagcactgttattactacttgggtttttcctgtggctgaaaaagagaaagcaaattaaagatctgggcagtgaattagttcgctacgatgcaagagtacacactcctcatttggataggcttgtaagtgcccgaagtgtaagcccaactacagaaatggtttcaaatgaatctgtagactaccgagctacttttccagaagatcagtttcctaattcatctcagaacggttcatgccgacaagtgcagtatcctctgacagacatgtcccccatcctaactagtggggactctgatatatccagtccattactgcaaaatactgtccacattgacctcagtgctctaaatccagagctggtccaggcagtgcagcatgtagtgattgggcccagtagcctgattgtgcatttcaatgaagtcataggaagagggcattttggttgtgtatatcatgggactttgttggacaatgatggcaagaaaattcactgtgctgtgaaatccttgaacagaatcactgacataggagaagtttcccaatttctgaccgagggaatcatcatgaaagattttagtcatcccaatgtcctctcgctcctgggaatctgcctgcgaagtgaagggtctccgctggtggtcctaccatacatgaaacatggagatcttcgaaatttcattcgaaatgagactcataatccaactgtaaaagatcttattggctttggtcttcaagtagccaaaggcatgaaatatcttgcaagcaaaaagtttgtccacagagacttggctgcaagaaactgtatgctggatgaaaaattcacagtcaaggttgctgattttggtcttgccagagacatgtatgataaagaatactatagtgtacacaacaaaacaggtgcaaagctgccagtgaagtggatggctttggaaagtctgcaaactcaaaagtttaccaccaagtcagatgtggtaatgtattggttatctctgagtttc

SEQ ID NO: 415 - protein, 1287 aa, Homo sapiens
MKAPAVLAPGILVLLFTLVQRSNGECKEAKSEMNVNMKYQLPNFTAETPIQNVILHEHHIFLGATNYIYVLNEEDLQKVAEYKTGPVLEHPDCFPCQDCSSKANLSGGVWKDNINMALVVDTYYDDQLISCGSVNRGTCQRHVFPHNHTADIQSEVHCIFSPQIEEPSQCPDCVVSALGAKVLSSVKDRFINFFVGNTINSSYFPDHPLHSISVRRLKETKDGFMFLTDQSYIDVLPEFRDSYPIKYVHAFESNNFIYFLTVQRETLDAQTFHTRIIRFCSINSGLHSYMEMPLECILTEKRKKRSTKKEVFNILQAAYVSKPGAQLARQIGASLNDDILFGVFAQSKPDSAEPMDRSAMCAFPIKYVNDFFNKIVNKNNVRCLQHFYGPNHEHCFNRTLLRNSSGCEARRDEYRTEFTTALQRVDLFMGQFSEVLLTSISTFIKGDLTIANLGTSEGRFMQVVVSRSGPSTPHVNFLLDSHPVSPEVIVEHTLNQNGYTLVITGKKITKIPLNGLGCRHFQSCSQCLSAPPFVQCGWCHDKCVRSEECLSGTWTQQICLPAIYKVFPNSAPLEGGTRLTICGWDFGFRRNNKFDLKKTRVLLGNESCTLTLSESTMNTLKCTVGPAMNKHFNMSIIISNGHGTTQYSTFSYVDPVITSISPKYGPMAGGTLLTLTGNYLNSGNSRHIGGKTCTLKSVSNSICYTPAQTISTEFAVKLKIDLANRETSIFSYREDPIVYEIHPTKSFISTWWKEPLNIVSFLFCFASGGSTITGVGKNLNSVSVPRMVINVHEAGRNFTVACQHRSNSEIICCTTPSLQQLNLQLPLKTKAFFMLDGILSKYFDLIYVHNPVFKPFEKPVMISMGNENVLEIKGNDIDPEAVKGEVLKVGNKSCENIHLHSEAVLCTVPNDLLKLNSELNIEWKQAISSTVLGKVIVQPDQNFTGLIAGVVSISTALLLLLGFFLWLKKRKQIKDLGSELVRYDARVHTPHLDRLVSARSVSPTTEMVSNESVDYRATFPEDQFPNSSQNGSCRQVQYPLTDMSPILTSGDSDISSPLLQNTVHIDLSALNPELVQAVQHVVIGPSSLIVHFNEVIGRGHFGCVYHGTLLDNDGKKIHCAVKSLNRITDIGEVSQFLTEGIIMKDFSHPNVLSLLGICLRSEGSPLVVLPYMKHGDLRNFIRNETHNPTVKDLIGFGLQVAKGMKYLASKKFVHRDLAARNCMLDEKFTVKVADFGLARDMYDKEYYSVHNKTGAKLPVKWMALESLQTQKFTTKSDVVMYWLSLSF

SEQ ID NO: 416 - DNA, 4630 bp, Homo sapiens
ggccctcgccgcccgcggcgccccgagcgctttgtgagcagatgcggagccgagtggagggcgcgagccagatgcggggcgacagctgacttgctgagaggaggcggggaggcgcggagcgcgcgtgtggtccttgcgccgctgacttctccactggttcctgggcaccgaaagataaacctctcataatgaaggcccccgctgtgcttgcacctggcatcctcgtgctcctgtttaccttggtgcagaggagcaatggggagtgtaaagaggcactagcaaagtccgagatgaatgtgaatatgaagtatcagcttcccaacttcaccgcggaaacacccatccagaatgtcattctacatgagcatcacattttccttggtgccactaactacatttatgttttaaatgaggaagaccttcagaaggttgctgagtacaagactgggcctgtgctggaacacccagattgtttcccatgtcaggactgcagcagcaaagccaatttatcaggaggtgtttggaaagataacatcaacatggctctagttgtcgacacctactatgatgatcaactcattagctgtggcagcgtcaacagagggacctgccagcgacatgtctttccccacaatcatactgctgacatacagtcggaggttcactgcatattctccccacagatagaagagcccagccagtgtcctgactgtgtggtgagcgccctgggagccaaagtcctttcatctgtaaaggaccggttcatcaacttctttgtaggcaataccataaattcttcttatttcccagatcatccattgcattcgatatcagtgagaaggctaaaggaaacgaaagatggttttatgtttttgacggaccagtcctacattgatgttttacctgagttcagagattcttaccccattaagtatgtccatgcctttgaaagcaacaattttatttacttcttgacggtccaaagggaaactctagatgctcagacttttcacacaagaataatcaggttctgttccataaactctggattgcattcctacatggaaatgcctctggagtgtattctcacagaaaagagaaaaaagagatccacaaagaaggaagtgtttaatatacttcaggctgcgtatgtcagcaagcctggggcccagcttgctagacaaataggagccagcctgaatgatgacattcttttcggggtgttcgcacaaagcaagccagattctgccgaaccaatggatcgatctgccatgtgtgcattccctatcaaatatgtcaacgacttcttcaacaagatcgtcaacaaaaacaatgtgagatgtctccagcatttttacggacccaatcatgagcactgctttaataggacacttctgagaaattcatcaggctgtgaagcgcgccgtgatgaatatcgaacagagtttaccacagctttgcagcgcgttgacttattcatgggtcaattcagcgaagtcctcttaacatctatatccaccttcattaaaggagacctcaccatagctaatcttgggacatcagagggtcgcttcatgcaggttgtggtttctcgatcaggaccatcaacccctcatgtgaattttctcctggactcccatccagtgtctccagaagtgattgtggagcatacattaaaccaaaatggctacacactggttatcactgggaagaagatcacgaagatcccattgaatggcttgggctgcagacatttccagtcctgcagtcaatgcctctctgccccaccctttgttcagtgtggctggtgccacgacaaatgtgtgcgatcggaggaatgcctgagcgggacatggactcaacagatctgtctgcctgcaatctacaaggttttcccaaatagtgcaccccttgaaggagggacaaggctgaccatatgtggctgggactttggatttcggaggaataataaatttgatttaaagaaaactagagttctccttggaaatgagagctgcaccttgactttaagtgagagcacgatgaatacattgaaatgcacagttggtcctgccatgaataagcatttcaatatgtccataattatttcaaatggccacgggacaacacaatacagtacattctcctatgtggatcctgtaataacaagtatttcgccgaaatacggtcctatggctggtggcactttacttactttaactggaaattacctaaacagtgggaattctagacacatttcaattggtggaaaaacatgtactttaaaaagtgtgtcaaacagtattcttgaatgttataccccagcccaaaccatttcaactgagtttgctgttaaattgaaaattgacttagccaaccgagagacaagcatcttcagttaccgtgaagatcccattgtctatgaaattcatccaaccaaatcttttattagtacttggtggaaagaacctctcaacattgtcagttttctattttgctttgccagtggtgggagcacaataacaggtgttgggaaaaacctgaattcagttagtgtcccgagaatggtcataaatgtgcatgaagcaggaaggaactttacagtggcatgtcaacatcgctctaattcagagataatctgttgtaccactccttccctgcaacagctgaatctgcaactccccctgaaaaccaaagcctttttcatgttagatgggatcctttccaaatactttgatctcatttatgtacataatcctgtgtttaagccttttgaaaagccagtgatgatctcaatgggcaatgaaaatgtactggaaattaagggaaatgatattgaccctgaagcagttaaaggtgaagtgttaaaagttggaaataagagctgtgagaatatacacttacattctgaagccgttttatgcacggtccccaatgacctgctgaaattgaacagcgagctaaatatagagtggaagcaagcaatttcttcaaccgtccttggaaaagtaatagttcaaccagatcagaatttcacaggattgattgctggtgttgtctcaatatcaacagcactgttattactacttgggtttttcctgtggctgaaaaagagaaagcaaattaaagatctgggcagtgaattagttcgctacgatgcaagagtacacactcctcatttggataggcttgtaagtgcccgaagtgtaagcccaactacagaaatggtttcaaatgaatctgtagactaccgagctacttttccagaagatcagtttcctaattcatctcagaacggttcatgccgacaagtgcagtatcctctgacagacatgtcccccatcctaactagtggggactctgatatatccagtccattactgcaaaatactgtccacattgacctcagtgctctaaatccagagctggtccaggcagtgcagcatgtagtgattgggcccagtagcctgattgtgcatttcaatgaagtcataggaagagggcattttggttgtgtatatcatgggactttgttggacaatgatggcaagaaaattcactgtgctgtgaaatccttgaacagaatcactgacataggagaagtttcccaatttctgaccgagggaatcatcatgaaagattttagtcatcccaatgtcctctcgctcctgggaatctgcctgcgaagtgaagggtctccgctggtggtcctaccatacatgaaacatggagatcttcgaaatttcattcgaaatgagactcataatccaactgtaaaagatcttattggctttggtcttcaagtagccaaaggcatgaaatatcttgcaagcaaaaagtttgtccacagagacttggctgcaagaaactgtatgctggatgaaaaattcacagtcaaggttgctgattttggtcttgccagagacatgtatgataaagaatactatagtgtacacaacaaaacaggtgcaaagctgccagtgaagtggatggctttggaaagtctgcaaactcaaaagtttaccaccaagtcagatgtgtggtcctttggcgtgctcctctgggagctgatgacaagaggagccccaccttatcctgacgtaaacacctttgatataactgtttacttgttgcaagggagaagactcctacaacccgaatactgcccagaccccttatatgaagtaatgctaaaatgctggcaccctaaagccgaaatgcgcccatccttttctgaactggtgtcccggatatcagcaatcttctctactttcattggggagcactatgtccatgtgaacgctacttatgtgaacgtaaaatgtgtcgctccatatccttctctgttgtcatcagaagataacgctgatgatgaggtggacacacgaccagcctccttctgggagacatcatagtgctagtactatgtcaaagcaacagtccacactttgtccaatggttttttcactgcctgacctttaaaaggccatcgatattctttgctacttgtatatacattcttgagaacactgcaatgtgaaaatcacgtttgctatttataaacttgtccttagattaatgtgtctggacagattgtgggagtaagtgattcttctaagaattagatact

SEQ ID NO: 417 - protein, 1400 aa, Homo sapiens
MKAPAVLAPGILVLLFTLVQRSNGECKEAKSEMNVNMKYQLPNFTAETPIQNVILHEHHIFLGATNYIYVLNEEDLQKVAEYKTGPVLEHPDCFPCQDCSSKANLSGGVWKDNINMALVVDTYYDDQLISCGSVNRGTCQRHVFPHNHTADIQSEVHCIFSPQIEEPSQCPDCVVSALGAKVLSSVKDRFINFFVGNTINSSYFPDHPLHSISVRRLKETKDGFMFLTDQSYIDVLPEFRDSYPIKYVHAFESNNFIYFLTVQRETLDAQTFHTRIIRFCSINSGLHSYMEMPLECILTEKRKKRSTKKEVFNILQAAYVSKPGAQLARQIGASLNDDILFGVFAQSKPDSAEPMDRSAMCAFPIKYVNDFFNKIVNKNNVRCLQHFYGPNHEHCFNRTLLRNSSGCEARRDEYRTEFTTALQRVDLFMGQFSEVLLTSISTFIKGDLTIANLGTSEGRFMQVVVSRSGPSTPHVNFLLDSHPVSPEVIVEHTLNQNGYTLVITGKKITKIPLNGLGCRHFQSCSQCLSAPPFVQCGWCHDKCVRSEECLSGTWTQQICLPAIYKVFPNSAPLEGGTRLTICGWDFGFRRNNKFDLKKTRVLLGNESCTLTLSESTMNTLKCTVGPAMNKHFNMSIIISNGHGTTQYSTFSYVDPVITSISPKYGPMAGGTLLTLTGNYLNSGNSRHIGGKTCTLKSVSNSICYTPAQTISTEFAVKLKIDLANRETSIFSYREDPIVYEIHPTKSFISTWWKEPLNIVSFLFCFASGGSTITGVGKNLNSVSVPRMVINVHEAGRNFTVACQHRSNSEIICCTTPSLQQLNLQLPLKTKAFFMLDGILSKYFDLIYVHNPVFKPFEKPVMISMGNENVLEIKGNDIDPEAVKGEVLKVGNKSCENIHLHSEAVLCTVPNDLLKLNSELNIEWKQAISSTVLGKVIVQPDQNFTGLIAGVVSISTALLLLLGFFLWLKKRKQIKDLGSELVRYDARVHTPHLDRLVSARSVSPTTEMVSNESVDYRATFPEDQFPNSSQNGSCRQVQYPLTDMSPILTSGDSDISSPLLQNTVHIDLSALNPELVQAVQHVVIGPSSLIVHFNEVIGRGHFGCVYHGTLLDNDGKKIHCAVKSLNRITDIGEVSQFLTEGIIMKDFSHPNVLSLLGICLRSEGSPLVVLPYMKHGDLRNFIRNETHNPTVKDLIGFGLQVAKGMKYLASKKFVHRDLAARNCMLDEKFTVKVADFGLARDMYDKEYYSVHNKTGAKLPVKWMALESLQTQKFTTKSDVWSFGVLLWELMTRGAPPYPDVNTFDITVYLLQGRRLLQPEYCPDPLYEVMLKCWHPKAEMRPSFSELVSRISAIFSTFIGEHYVHVNATYVNVKCVAPYPSLLSSEDNADDEVDWASFWETS

SEQ ID NO: 418 - DNA, 4576 bp, Homo sapiens
ggccctcgccgcccgcggcgccccgagcgctttgtgagcagatgcggagccgagtggagggcgcgagccagatgcggggcgacagctgacttgctgagaggaggcggggaggcgcggagcgcgcgtgtggtccttgcgccgctgacttctccactggttcctgggcaccgaaagataaacctctcataatgaaggcccccgctgtgcttgcacctggcatcctcgtgctcctgtttaccttggtgcagaggagcaatggggagtgtaaagaggcactagcaaagtccgagatgaatgtgaatatgaagtatcagcttcccaacttcaccgcggaaacacccatccagaatgtcattctacatgagcatcacattttccttggtgccactaactacatttatgttttaaatgaggaagaccttcagaaggttgctgagtacaagactgggcctgtgctggaacacccagattgtttcccatgtcaggactgcagcagcaaagccaatttatcaggaggtgtttggaaagataacatcaacatggctctagttgtcgacacctactatgatgatcaactcattagctgtggcagcgtcaacagagggacctgccagcgacatgtctttccccacaatcatactgctgacatacagtcggaggttcactgcatattctccccacagatagaagagcccagccagtgtcctgactgtgtggtgagcgccctgggagccaaagtcctttcatctgtaaaggaccggttcatcaacttctttgtaggcaataccataaattcttcttatttcccagatcatccattgcattcgatatcagtgagaaggctaaaggaaacgaaagatggttttatgtttttgacggaccagtcctacattgatgttttacctgagttcagagattcttaccccattaagtatgtccatgcctttgaaagcaacaattttatttacttcttgacggtccaaagggaaactctagatgctcagacttttcacacaagaataatcaggttctgttccataaactctggattgcattcctacatggaaatgcctctggagtgtattctcacagaaaagagaaaaaagagatccacaaagaaggaagtgtttaatatacttcaggctgcgtatgtcagcaagcctggggcccagcttgctagacaaataggagccagcctgaatgatgacattcttttcggggtgttcgcacaaagcaagccagattctgccgaaccaatggatcgatctgccatgtgtgcattccctatcaaatatgtcaacgacttcttcaacaagatcgtcaacaaaaacaatgtgagatgtctccagcatttttacggacccaatcatgagcactgctttaataggacacttctgagaaattcatcaggctgtgaagcgcgccgtgatgaatatcgaacagagtttaccacagctttgcagcgcgttgacttattcatgggtcaattcagcgaagtcctcttaacatctatatccaccttcattaaaggagacctcaccatagctaatcttgggacatcagagggtcgcttcatgcaggttgtggtttctcgatcaggaccatcaacccctcatgtgaattttctcctggactcccatccagtgtctccagaagtgattgtggagcatacattaaaccaaaatggctacacactggttatcactgggaagaagatcacgaagatcccattgaatggcttgggctgcagacatttccagtcctgcagtcaatgcctctctgccccaccctttgttcagtgtggctggtgccacgacaaatgtgtgcgatcggaggaatgcctgagcgggacatggactcaacagatctgtctgcctgcaatctacaaggttttcccaaatagtgcaccccttgaaggagggacaaggctgaccatatgtggctgggactttggatttcggaggaataataaatttgatttaaagaaaactagagttctccttggaaatgagagctgcaccttgactttaagtgagagcacgatgaatacattgaaatgcacagttggtcctgccatgaataagcatttcaatatgtccataattatttcaaatggccacgggacaacacaatacagtacattctcctatgtggatcctgtaataacaagtatttcgccgaaatacggtcctatggctggtggcactttacttactttaactggaaattacctaaacagtgggaattctagacacatttcaattggtggaaaaacatgtactttaaaaagtgtgtcaaacagtattcttgaatgttataccccagcccaaaccatttcaactgagtttgctgttaaattgaaaattgacttagccaaccgagagacaagcatcttcagttaccgtgaagatcccattgtctatgaaattcatccaaccaaatcttttattagtggtgggagcacaataacaggtgttgggaaaaacctgaattcagttagtgtcccgagaatggtcataaatgtgcatgaagcaggaaggaactttacagtggcatgtcaacatcgctctaattcagagataatctgttgtaccactccttccctgcaacagctgaatctgcaactccccctgaaaaccaaagcctttttcatgttagatgggatcctttccaaatactttgatctcatttatgtacataatcctgtgtttaagccttttgaaaagccagtgatgatctcaatgggcaatgaaaatgtactggaaattaagggaaatgatattgaccctgaagcagttaaaggtgaagtgttaaaagttggaaataagagctgtgagaatatacacttacattctgaagccgttttatgcacggtccccaatgacctgctgaaattgaacagcgagctaaatatagagtggaagcaagcaatttcttcaaccgtccttggaaaagtaatagttcaaccagatcagaatttcacaggattgattgctggtgttgtctcaatatcaacagcactgttattactacttgggtttttcctgtggctgaaaaagagaaagcaaattaaagatctgggcagtgaattagttcgctacgatgcaagagtacacactcctcatttggataggcttgtaagtgcccgaagtgtaagcccaactacagaaatggtttcaaatgaatctgtagactaccgagctacttttccagaagatcagtttcctaattcatctcagaacggttcatgccgacaagtgcagtatcctctgacagacatgtcccccatcctaactagtggggactctgatatatccagtccattactgcaaaatactgtccacattgacctcagtgctctaaatccagagctggtccaggcagtgcagcatgtagtgattgggcccagtagcctgattgtgcatttcaatgaagtcataggaagagggcattttggttgtgtatatcatgggactttgttggacaatgatggcaagaaaattcactgtgctgtgaaatccttgaacagaatcactgacataggagaagtttcccaatttctgaccgagggaatcatcatgaaagattttagtcatcccaatgtcctctcgctcctgggaatctgcctgcgaagtgaagggtctccgctggtggtcctaccatacatgaaacatggagatcttcgaaatttcattcgaaatgagactcataatccaactgtaaaagatcttattggctttggtcttcaagtagccaaaggcatgaaatatcttgcaagcaaaaagtttgtccacagagacttggctgcaagaaactgtatgctggatgaaaaattcacagtcaaggttgctgattttggtcttgccagagacatgtatgataaagaatactatagtgtacacaacaaaacaggtgcaaagctgccagtgaagtggatggctttggaaagtctgcaaactcaaaagtttaccaccaagtcagatgtgtggtcctttggcgtgctcctctgggagctgatgacaagaggagccccaccttatcctgacgtaaacacctttgatataactgtttacttgttgcaagggagaagactcctacaacccgaatactgcccagaccccttatatgaagtaatgctaaaatgctggcaccctaaagccgaaatgcgcccatccttttctgaactggtgtcccggatatcagcaatcttctctactttcattggggagcactatgtccatgtgaacgctacttatgtgaacgtaaaatgtgtcgctccatatccttctctgttgtcatcagaagataacgctgatgatgaggtggacacacgaccagcctccttctgggagacatcatagtgctagtactatgtcaaagcaacagtccacactttgtccaatggttttttcactgcctgacctttaaaaggccatcgatattctttgctacttgtatatacattcttgagaacactgcaatgtgaaaatcacgtttgctatttataaacttgtccttagattaatgtgtctggacagattgtgggagtaagtgattcttctaagaattagatact

SEQ ID NO: 419 - protein, 1382 aa, Homo sapiens
MKAPAVLAPGILVLLFTLVQRSNGECKEAKSEMNVNMKYQLPNFTAETPIQNVILHEHHIFLGATNYIYVLNEEDLQKVAEYKTGPVLEHPDCFPCQDCSSKANLSGGVWKDNINMALVVDTYYDDQLISCGSVNRGTCQRHVFPHNHTADIQSEVHCIFSPQIEEPSQCPDCVVSALGAKVLSSVKDRFINFFVGNTINSSYFPDHPLHSISVRRLKETKDGFMFLTDQSYIDVLPEFRDSYPIKYVHAFESNNFIYFLTVQRETLDAQTFHTRIIRFCSINSGLHSYMEMPLECILTEKRKKRSTKKEVFNILQAAYVSKPGAQLARQIGASLNDDILFGVFAQSKPDSAEPMDRSAMCAFPIKYVNDFFNKIVNKNNVRCLQHFYGPNHEHCFNRTLLRNSSGCEARRDEYRTEFTTALQRVDLFMGQFSEVLLTSISTFIKGDLTIANLGTSEGRFMQVVVSRSGPSTPHVNFLLDSHPVSPEVIVEHTLNQNGYTLVITGKKITKIPLNGLGCRHFQSCSQCLSAPPFVQCGWCHDKCVRSEECLSGTWTQQICLPAIYKVFPNSAPLEGGTRLTICGWDFGFRRNNKFDLKKTRVLLGNESCTLTLSESTMNTLKCTVGPAMNKHFNMSIIISNGHGTTQYSTFSYVDPVITSISPKYGPMAGGTLLTLTGNYLNSGNSRHIGGKTCTLKSVSNSICYTPAQTISTEFAVKLKIDLANRETSIFSYREDPIVYEIHPTKSFISGGSTITGVGKNLNSVSVPRMVINVHEAGRNFTVACQHRSNSEIICCTTPSLQQLNLQLPLKTKAFFMLDGILSKYFDLIYVHNPVFKPFEKPVMISMGNENVLEIKGNDIDPEAVKGEVLKVGNKSCENIHLHSEAVLCTVPNDLLKLNSELNIEWKQAISSTVLGKVIVQPDQNFTGLIAGVVSISTALLLLLGFFLWLKKRKQIKDLGSELVRYDARVHTPHLDRLVSARSVSPTTEMVSNESVDYRATFPEDQFPNSSQNGSCRQVQYPLTDMSPILTSGDSDISSPLLQNTVHIDLSALNPELVQAVQHVVIGPSSLIVHFNEVIGRGHFGCVYHGTLLDNDGKKIHCAVKSLNRITDIGEVSQFLTEGIIMKDFSHPNVLSLLGICLRSEGSPLVVLPYMKHGDLRNFIRNETHNPTVKDLIGFGLQVAKGMKYLASKKFVHRDLAARNCMLDEKFTVKVADFGLARDMYDKEYYSVHNKTGAKLPVKWMALESLQTQKFTTKSDVWSFGVLLWELMTRGAPPYPDVNTFDITVYLLQGRRLLQPEYCPDPLYEVMLKCWHPKAEMRPSFSELVSRISAIFSTFIGEHYVHVNATYVNVKCVAPYPSLLSSEDNADDEVDWASFWETS

SEQ ID NO: 420 - DNA, 5415 bp, Homo sapiens
ggccctcgccgcccgcggcgccccgagcgctttgtgagcagatgcggagccgagtggagggcgcgagccagatgcggggcgacagctgacttgctgagaggaggcggggaggcgcggagcgcgcgtgtggtccttgcgccgctgacttctccactggttcctgggcaccgaaagataaacctctcataatgaaggcccccgctgtgcttgcacctggcatcctcgtgctcctgtttaccttggtgcagaggagcaatggggagtgtaaagaggcactagcaaagtccgagatgaatgtgaatatgaagtatcagcttcccaacttcaccgcggaaacacccatccagaatgtcattctacatgagcatcacattttccttggtgccactaactacatttatgttttaaatgaggaagaccttcagaaggttgctgagtacaagactgggcctgtgctggaacacccagattgtttcccatgtcaggactgcagcagcaaagccaatttatcaggaggtgtttggaaagataacatcaacatggctctagttgtcgacacctactatgatgatcaactcattagctgtggcagcgtcaacagagggacctgccagcgacatgtctttccccacaatcatactgctgacatacagtcggaggttcactgcatattctccccacagatagaagagcccagccagtgtcctgactgtgtggtgagcgccctgggagccaaagtcctttcatctgtaaaggaccggttcatcaacttctttgtaggcaataccataaattcttcttatttcccagatcatccattgcattcgatatcagtgagaaggctaaaggaaacgaaagatggttttatgtttttgacggaccagtcctacattgatgttttacctgagttcagagattcttaccccattaagtatgtccatgcctttgaaagcaacaattttatttacttcttgacggtccaaagggaaactctagatgctcagacttttcacacaagaataatcaggttctgttccataaactctggattgcattcctacatggaaatgcctctggagtgtattctcacagaaaagagaaaaaagagatccacaaagaaggaagtgtttaatatacttcaggctgcgtatgtcagcaagcctggggcccagcttgctagacaaataggagccagcctgaatgatgacattcttttcggggtgttcgcacaaagcaagccagattctgccgaaccaatggatcgatctgccatgtgtgcattccctatcaaatatgtcaacgacttcttcaacaagatcgtcaacaaaaacaatgtgagatgtctccagcatttttacggacccaatcatgagcactgctttaataggacacttctgagaaattcatcaggctgtgaagcgcgccgtgatgaatatcgaacagagtttaccacagctttgcagcgcgttgacttattcatgggtcaattcagcgaagtcctcttaacatctatatccaccttcattaaaggagacctcaccatagctaatcttgggacatcagagggtcgcttcatgcaggttgtggtttctcgatcaggaccatcaacccctcatgtgaattttctcctggactcccatccagtgtctccagaagtgattgtggagcatacattaaaccaaaatggctacacactggttatcactgggaagaagatcacgaagatcccattgaatggcttgggctgcagacatttccagtcctgcagtcaatgcctctctgccccaccctttgttcagtgtggctggtgccacgacaaatgtgtgcgatcggaggaatgcctgagcgggacatggactcaacagatctgtctgcctgcaatctacaaggttttcccaaatagtgcaccccttgaaggagggacaaggctgaccatatgtggctgggactttggatttcggaggaataataaatttgatttaaagaaaactagagttctccttggaaatgagagctgcaccttgactttaagtgagagcacgatgaatacattgaaatgcacagttggtcctgccatgaataagcatttcaatatgtccataattatttcaaatggccacgggacaacacaatacagtacattctcctatgtggatcctgtaataacaagtatttcgccgaaatacggtcctatggctggtggcactttacttactttaactggaaattacctaaacagtgggaattctagacacatttcaattggtggaaaaacatgtactttaaaaagtgtgtcaaacagtattcttgaatgttataccccagcccaaaccatttcaactgagtttgctgttaaattgaaaattgacttagccaaccgagagacaagcatcttcagttaccgtgaagatcccattgtctatgaaattcatccaaccaaatcttttattagtacttggtggaaagaacctctcaacattgtcagttttctattttgctttgccagtggtgggagcacaataacaggtgttgggaaaaacctgaattcagttagtgtcccgagaatggtcataaatgtgcatgaagcaggaaggaactttacagtggcatgtcaacatcgctctaattcagagataatctgttgtaccactccttccctgcaacagctgaatctgcaactccccctgaaaaccaaagcctttttcatgttagatgggatcctttccaaatactttgatctcatttatgtacataatcctgtgtttaagccttttgaaaagccagtgatgatctcaatgggcaatgaaaatgtactggaaattaagggaaatgatattgaccctgaagcagttaaaggtgaagtgttaaaagttggaaataagagctgtgagaatatacacttacattctgaagccgttttatgcacggtccccaatgacctgctgaaattgaacagcgagctaaatatagagtggaagcaagcaatttcttcaaccgtccttggaaaagtaatagttcaaccagatcagaatttcacaggattgattgctggtgttgtctcaatatcaacagcactgttattactacttgggtttttcctgtggctgaaaaagagaaagcaaattaaagatctgggcagtgaattagttcgctacgatgcaagagtacacactcctcatttggataggcttgtaagtgcccgaagtgtaagcccaactacagaaatggtttcaaatgaatctgtagactaccgagctacttttccagaagatcagtttcctaattcatctcagaacggttcatgccgacaagtgcagtatcctctgacagacatgtcccccatcctaactagtggggactctgatatatccagtccattactgcaaaatactgtccacattgacctcagtgctctaaatccagagctggtccaggcagtgcagcatgtagtgattgggcccagtagcctgattgtgcatttcaatgaagtcataggaagagggcattttggttgtgtatatcatgggactttgttggacaatgatggcaagaaaattcactgtgctgtgaaatccttgaacagaatcactgacataggagaagtttcccaatttctgaccgagggaatcatcatgaaagattttagtcatcccaatgtcctctcgctcctgggaatctgcctgcgaagtgaagggtctccgctggtggtcctaccatacatgaaacatggagatcttcgaaatttcattcgaaatgagactcataatccaactgtaaaagatcttattggctttggtcttcaagtagccaaaggcatgaaatatcttgcaagcaaaaagtttgtccacagagacttggctgcaagaaactgtatgctggatgaaaaattcacagtcaaggttgctgattttggtcttgccagagacatgtatgataaagaatactatagtgtacacaacaaaacaggtgcaaagctgccagtgaagtggatggctttggaaagtctgcaaactcaaaagtttaccaccaagtcagatgtgtggtcctttggcgtgctcctctgggagctgatgacaagaggagccccaccttatcctgacgtaaacacctttgatataactgtttacttgttgcaagggagaagactcctacaacccgaatactgcccagaccccttatatgaagtaatgctaaaatgctggcaccctaaagccgaaatgcgcccatccttttctgaactggtgtcccggatatcagcaatcttctctactttcattggggagcactatgtccatgtgaacgctacttatgtgaacgtaaaatgtgtcgctccatatccttctctgttgtcatcagaagataacgctgatgatgaggtggacacacgaccagcctccttctgggagacatcatagtgctagtactatgtcaaagcaacagtccacactttgtccaatggttttttcactgcctgacctttaaaaggccatcgatattctttgctcttgccaaaattgcactattataggacttgtattgttatttaaattactggattctaaggaatttcttatctgacagagcatcagaaccagaggcttggtcccacaggccacggaccaatggcctgcagccgtgacaacactcctgtcatattggagtccaaaacttgaattctgggttgaattttttaaaaatcaggtaccacttgatttcatatgggaaattgaagcaggaaatattgagggcttcttgatcacagaaaactcagaagagatagtaatgctcaggacaggagcggcagccccagaacaggccactcatttagaattctagtgtttcaaaacacttttgtgtgttgtatggtcaataacatttttcattactgatggtgtcattcacccattaggtaaacattcccttttaaatgtttgtttgttttttgagacaggatctcactctgttgccagggctgtagtgcagtggtgtgatcatagctcactgcaacctccacctcccaggctcaagcctcccgaatagctgggactacaggcgcacaccaccatccccggctaatttttgtattttttgtagagacggggttttgccatgttgccaaggctggtttcaaactcctggactcaagaaatccacccacctcagcctcccaaagtgctaggattacaggcatgagccactgcgcccagcccttataaatttttgtatagacattcctttggttggaagaatatttataggcaatacagtcaaagtttcaaaatagcatcacacaaaacatgtttataaatgaacaggatgtaatgtacatagatgacattaagaaaatttgtatgaaataatttagtcatcatgaaatatttagttgtcatataaaaacccactgtttgagaatga

SEQ ID NO: 421 - protein, 1400 aa, Homo sapiens; identical to SEQ ID NO: 417

SEQ ID NO: 422 - DNA, 76080 bp, Mus musculus
  misc_feature (1)...(76080): n = A,T,C or G
taatcccagccctcaggaggcagaggtaggcagatctatgagttcaaggccaccctggtctacagagtgagttccaggacagtcagggctacacagagaaaccctgtctcgaaataaaacaagaccaaaagacaaacaaacaaacaaacaccccaagttctaaagtctcaattaaaaacaaaaaaaaacaaaaacaaaacaaaacaaaacaaaaaacactctcaactgcgaacttctgtaaaattaaaaaaaaaaaaaaagttgatactttcttattttaagaaggaaccagggcacaattacaatcagatcaaaacaaaaaacaaactccaaactgtgtaaataagtcaatgttcaatcatctagattcactcacggtcttctgggctcctccaaggaacttgggtcacttctccagctttgccatctgcagcagacacagctattgtctaagtcctggccagctttatcctactgctgctgttcttggtggtcatcctatggtactggtatcttccatatactggggtcttctgctacaactgggctacactttcaccgatagcctctcctgacctctcacagtgccaagcctcagctgcctctggaacacagcttctgcgtgctgaccctgaagaaacttcccagatttcacctcagtgatggtggattcttctcaatcattgctaatttcttagctccagctgaccagcatcaattgtcccaggaaagcaaaggtttcacttcagtggttctagtctcatgttacccacagctgattcttcagccccagttaacccgaaccacagattctcaactcaaaataccaaacataccctataagtctttaaatgactctcaaacttccctctggaactcacagcccaggcctccattgtctgcagggctttccacattcttttcttcccagctcccacagaatagctcaccaagctttgaattctctctcagtggcttttctagcccaaagttccaaggtccttccacaatcctcccccaacatgactaggtctctcacagcaataccccactatgctggtatcagcttcttagggtttctattgctgtgatgaaacaccatgactagaaccaaattggagggggtgggagtggaggaggggaggattatttaatattcacatcattcattaaagtcaggacaggaattcaaacaggaaggaacctggaggcaggagctgatgcagaggccatgaaggggtgctgcttactggcttgtttcccatggcttgctcagcctgctttcctattgaacccatgacccatagcaccacccgaaatgggctgggccctccccccattaagcactaattaaaaaacaccctacagctggatcctagggaggcattttctcaaatgaggctccctcctttcggttgactctagcttgtttcaagttgacctaagactagccaggacaccattcaatgtaggtttagaggttttgttttgactcattttgtttgttgtgcgtatgtatgtgtctatgtttgtgtatatgcacgtgaatgcttgcagttgtgtgtgtgtgtttgtattattcagaggtcggacattaatgacatgtcttcctcaatcattctcctccatgttttttgtttgtttgtttttgtttttgttttgtgaagaggaggcactcactgaacctggagttcagttcaaggccagttagtcccaggaatcctgttctctgcctccccggcacgagggttgtaaaccagctttctcaacctagctttgtaggtgattgggagtcccaggtcaaccagagctacacggtgagattctgcctttaaaaaattaattaattaaaataaaaaataataaagaggctgggtggtggtattacccacctttaatccagcattctggaggcagaagcaggtgaagctctgagcttgaggccaacctggtctacgtagttctacaacagccagagatatatagagaaagccagtcgcaaaaatccaaaatataagtaaataaataaatacaataaataaaaaagaagatgtcacatcctcaaagataattagtagtagtagtttagttaataacccttttgcttcaatagaaaaggaaaaaattggttagggagcaatcacaaatacatagtaagatttttctttgttgtttaaaattacattttatttcatttctttttaggtttacttattttattttatgcacgtgttttccttcatgtatgtatgtgtactaggtatgtgtcattagaggtcagaaaaaagggcatgagtgcccctggatctagcattgtagatggttttaagccatcatgtgggtaccaggaattgaactcagatactctgcaagaacaacaaatgctcttaaccactgagccagctctccagctattaacattatatattagtatgtgtgcatctgtgtgtgtgttgtatgtagatgcctatgcagcatatgggcacatatataccacggtattgtagttagggtttctattgctgtaataaaaaaaatgactatcaattacttggggagaaaagggtttatttcatgttatccttccaggtaactgatcagtgaggaaagtcagagaaggcttgctccctatggcttgtgcagcctgctttcttatatcccccaggtctatcatcataggggtggcactgtacacagtgagctgggcctacccatatcaggcatccatcaagaaaatataccacaaacttacctacaggccattctgttgggggatttttctcaattgagatttccttttccaaaaggactctagcttgtgccaagctgacataagaccagccagcacacaccacacacatatggaggttagaggataacatacaggagtgaattctttctatcatgagggtcctggggtcaagcatcgcagcattgcagctggtatctttacttgctaagtaatatcattggctcctttggtaaaaatgtcaggttctaaagaatgtactctgtggtggtttgaatatgcttggcccagggagtgacactattaggaggtgtggtcttgctggaggaggtgtggtcttgctggaggaggtgtggtcttgctggaggaggtgtggtcttgttggaggaagtgtgtcactgtggagtgggctttgagatactcctaactacatgggagccagtcttctctcagcagccttcagatgaagatatagaactctcagctcctcccgcaccatgcctgcctggatgctgccatgttcctgccttgataataatggactgaacctctgaacctgtaagccagcctcaattaaatgttgtccttcataggagttggcttggtcatggtgccccttcacagcagtaagagcctgactaagacatactctaaaagcatcttccctcccactggtccactagttgcttagtccaccagttttgtgagcttctttccagatattctagatgaacaaatatgttagtcttccatatctaagggctcaggaatccacggactcaggctagagtgcaagatatttttaaaaattgtgtctgctgaatatgcccaacctttttactttccattactccctagacgatgcactgtaacaatatttacacagcatttgtattatactgggagttatcagtagtctagagatgctttaaagtgttaagaaagaggtcgttgttatatgcaaacacccattttatgtgaggtttcccagcatgcttggatttttggcgtctacgattttggtgttcatgggaaggtgaaaataactgttacagcattgttggtgagtgaaaaccaccgaagtcagcgtgcatgtccgttatctgactagtccacagggagcttggcaaaatagatcacgtgcatctataattcaaaactgggcatcctcctctggaggatccaggttgtgtttcaagcaccctgacaggcggttcacaacctcctgaaagtccagacccaaggggtccaacaccctcacacacacactctctctctcactaaataagtaaacaaatacatattcttttaaaatggattaagaaagatcattaattattacctaattaggactgaataaacaggatgcttcatacatctgcatgactgtcatcttgtgttaagaaaatacacttatatagatacctatataaacatagcatagctaatctatgtgtatgcaaagaacatctgggcaataatctcatagaaaagaattactggagccaggtgctttcggtttgtttccttgccttttttatttcttctccccccccgccccgcccccttcttaaagatagtgcttcacgctgacctcaaactcaccaaggcaggagggtgaccctggactactgactctcctacctgcatgcccagagtgttagttaggtctccttcctttccgcagtgctgtggactgaacccagggttatgagtatgctaggcaaacactcccctgcatctgatttttctccgcctcctgcttttaagttctcctcctcttcgaggacgccacctctcccgataccaccaaaagttctcaaccacctagcagaaatggtttgcgactcagatggaatccacttcaaagttcaattcccaagtctgagtctaagcctgaatctttgatctttgtccctaggcagaggccttagaactcatccaccaccccacccccacccccagggcttctcagaaatgcaaattgtttgctctgtcacctttttagtcgcttggccttggatgaattgttggctttaactgggaaaggtttgtaagtgggaggaagggaaactttggaaatccagaggacaaaaggccaacctggcttcagttagtgtcctgaagggaggtggaaaaaccagaccggagaccaaggttgtacagattcgctgaggtctgtataagcctccttttccatacatgtttttgttttcttgtttcacagtaaaacctgtaacaaaggggactgtttatcttggggtgccaaaaggaagggtcggcaagtgtggaaaatatccttttctgccactgctgttggagaaagggatttcaacaggggtgtaggtagagagtggatagtaaagccacacagaatccagaaagtaggctccaaaagagatggcttgggccaaaacaaagttcctgggcttaaacggaataaaaaacgcccggattgatagtgtacctactgtgtgctaggcaccacgccagctgcattgttgcagtatctcatctaatcctttcaacagtctcaagaaatttctcttgggatcttcaaggtaccatcgtggaaacggaactgacaagggaactggcaagagcacaggcaagaaggcgtggcggatccggaacccacactcaaaagtgacctaatgtcaacctaacccatcctcccatgtgtctctgagtctgctttcctccaccatttcaggtaagtttgcatgtttgcttggcggctctcaaaagttcaggcatctcttcctttcctaatctgttctcttggaggcagagcctgacacacagatgtcctccgtctccgagaatgaatgtggcagctccctttcccgcttgctctcgcagcatccaaaacgaactgaaagttatttacaaaaacaccatgccaaacaagattctgcccctccctccctcactgatgctgcactaggaacagccaggggtcaccaaatggcggccagatggtaactggctgctgtccctaactccaggagcctggggcaaaaggcacaagcagcccacctgctacccagggcctgtgaaccagtcacttttaaacggagagccaagcagttcgctgctcttgcatccctctcctgctacggctctcccagctaacccggctaattcccagccttccagggactccagccggctgggctgggctgagcttggtgggccttagagcccagcctctgcttcctccctccctaccagggagcactgatggctggatcaggagggggtgatcggccatgatgggcacagttgattcctgagttaacagcccggagagagcctggctctatagaagtcctgtcttcctgctagaacctgcgaggcagagggaaggctctgcagacgtgttcctaaacaaagaaggcagccggggctttggggaaagctccgtttcccccacttgtattcagcaccgctcccctcctcccaccgatcccagaggcagcagtcccctggttatctctggttctggagcgcaggggcctttgtccccctctctgccgacccaccggcaaggcgatgggccaacaaacctttcctgaacttgctagctctttgttatctcagagggaagattacgtttcccggtaaagagacaactgctaggcgccctccttgcagacccagggccccgccgcggtcgccccaccctgtggcctgcggcgtcctccgaactgccccggggactagttcctgcagagccgcagcccctcttggagccgggagggagtgccacggccctggaggtctgctgcaaggcgggggaaagcaggctccctggctggatctgcgatctatctcctctgggtctgtcaccttccccagtccagcctctctagctgtttcccggagagcaggtggatagctagccgagttggctactcttatctccacttccctgacactgaagaggaatcttaacactgtcaaactctgcgcctcgacacctaataggcacttgggtcttctttcctggttacagcaaggacacattcttcaactcgtactgtctacccgttctttagaaagaaagaaaaatgtaaaaaggctagattataacgttattataatatttatttaataaatttaattatacacaacacacacacagagagagagagagagagacagagagagagagagagagagagagagagagagagagagatctaggcatgcacatatgcatatcaccaagtcacatacccagcccagtgctgtattaaaatcctcttgttttagaagggcctgggagtacaggcctgaatctctgctttgtgaaaggttgatgtcgaagtttgatgctcacctgactgcctagtaagatcgtgtctctaaataaataaagatttttttttttttgtcagaagaactgctgagatgaagtgtaatgctcccgtccttaggaacagtggacaaatgtagttggccctgggtagtcagttctgcattttccatgactccccttccccacaattacccaagtggtaaggtttctttctctggtaatgtaaggatctatgatttgtcaaagaataatactccatactctggactcaaatagtatgtaaacgtaaagagtgttttattctgtagtagtctagtatgttggggtcatgggagcatgaccaagatagacaaccaagtgagcttgcaggcctgatttaaagtacatcagggcattccaggggtaggtgacctttatcttgttctatctctagggacattccattaccaggccttgggggctggcagtgttgttggggagatctggaaactgttgttgactgattgtccttgcctcagaccagcttctgaggcctagacttgcctggacttacccagttcttaaaaacagagatgcaggcctcgtctcctgaactgtcaatggaaagcctgtcatagagtcagcctagccttctcaataacccaggtttctcacatgcagctgttccccaaacaacagatctatagatgtcaggaaaactcttgagacagatgagatagattcgggaccactgtcttagaacagttctgcagcttgctggagagaacccacaaaataaaaaagacagctagtaaaactatgctaaatatcaaatcagtagatacagtgggaggcagaaacacctccaggtggctgggccgaggcagagaaggctgtttggtagcttctatgaaagaataattgggaccagactaaaagccaagggactgaacagggcaaggatattgctatgtgggtaataactcttaaatattagctggtgttcatttattccacagagtcatttctggtttttattttatttttttgttcaaaaatacttcctgaatatttacttcctaggcactcaataaatgtattctctctttacccctcctccaaatctgaacccagatcattttgtatatgctaagcacactcagctaaacattaagctttggtgggtgtggtggtgtcttacaaactgttgtctcaggaggcaagaggcaaaaggtgggagagtccttgagtctgaggctaccctgggctacagcataagactatctctaaaagcaaagacaaaacaaacaaacaaaaaccaacccaataaaccaataatacaccaataaactcatcaatagcccttcttctttttcctccaccctttactggagataaacaaatgtgataatatctccgtagcttcccattttttcacctggtggtcacatagaaaactgtcttagaaactcttagtcttcaatgtggagggaagagttggattgtttggtattcaagctgtcatggcttgctctgtggaagcggaatagaacagtccccctcatgatggctttcacatgtgtgacccttttggcacacttacattcattcagtctgcttctcatgggggagacccatagagggactagatcttatcagattcgtgacatgcccaaagtctttgagtggtggaattcacacctagtgtgacatattccacccttccagtggtccccaagtagacatcacatcacagtcaccaggaaaatttgcagagcccccaccccactgctatgcagcaaaccaacaggtaccaaccacctagtcaggtctagagtgtgctggaatcaaagcactgtctttgcctttgtcaaagctgcatcgccaacccctgtgtttgatttgtttgagacagggtctgtaagcacaggctgtcgtctcagtccctatgtggccaacggtgatcttaagtctctgaccctccagggctaggattgcatatgtacatcatcattttagactgctggaaagtgagctcctgcaacgaggcgaaggccccactggctgtctcagaattgttagcatgcttcatcaaaacatcgggatttctcatgtccaagcaggatcaaaaatttttattttttaacaatctcaatatgattcacgtccactggactcattggattaaagagccacagattaacatctctgtggagggacctggtgggaagggcatttcagcgattttctttgaggttcatagtatactgtggaggctctggtttgactctgattaattcctaaggcaaacaaaacaaaacaagcaagcaagtaaacaaacatccccccccatccgaaaaaaaaaaaaaacaaaaacccctcctctcttcggttgcttcctgaaagctggtgatttctaaggctaccatgaacagcactgtagaatttgcagggtccattccagcgtgaaccacaaaacctaaattatgtggctggggaaagttgagatccaaggaaagggtctgagggggaaagtcaaccgatccatcaataaaaacagttcgtatattgtaagctatgtgagggtcctatttattccttttagagacgggaaaaccgagatttagagcacgaaaatcataccccaaggcacagagataaccaaagaccaagttgcccagtgcaacctcaaaattatagccaggcacccgcccctccccaccctccactcctgtccccaaatcgctgatctacacacagtctgaaattcgggcgccctccaggcgaaaactcaagttagaccagactgtagagcagttctgctcgctccaggcttctccggggctgcagcttgagaactacaaggcccagcaggcaactgcaaggggaggaggaggaggtgggactagcgccgggtgggagtgagagagcgagccctcgcgcctcgccggcgcacagcgctcggagcgctcctgcgggtactttggcggggctctccgctgcgggcggcgcggaacgggagccggaaccctggtgcagccgctgcgtgcagaggacccgggctgcgcagggaagcggggccgagacgtccggactggactgagactgtgcttagcgcattgcggcgacctcgcctttcccggccgcgagcgcgcgccgcagctggaaaagcagcggagaccgaggacttttctcaggtcccaggggcgcaccacagccgtgctgcagtcaatgcacgccggagccccaggaggggtgatggaactcgggctgccagaagcctgagacgccgccaccgccgccgctgcgtactggagagcggggggcgcacgatctggggaccccgggcggcggacccgagccctcccccccgccccgcctccggggcaccagcttcggctccattgttcccgcccgggctggaggcgcccggctcggagtgccgccgggagtcgtgcctcggccgcggagccctcgagaccccatcaggatctgaacggagcccggagacgagcggcgggagcgcaagacacagacacccgccgcgccacggcgagctctccagaggcgggaccgcagcgccaagtgaggtaagagtnnnnnnnnnnnnnnnnnnnnnnnnnnnnnnnnnnnnnnnnnnnnnnnnnnnnnnnnnnnnnnnnnnnnnnnnnnnnnnnnnnnnatccccccaccccacccccgactccgctccctccccggcgcccctgtccctcctccctcggccagtgtcgctgcccgcgccccctccccgcgcgctgggcccgctgctgctgcccgctgcctaacttttccgccaactcgcgctccggagctagcgaggaggctgctgcgctccgagtccagaccccgaccctcttggcccaggagaaggcggcggaagctgtgtgttccctactggggaggagggcgggaatgggccgggagatggagggtgtgtgtgtgtgtgtgtgtgtgtgtgtacatcatctatcttttggtcctcttgcggattcaccccgtttcagccggtggctttaagctcaacaccctacatctgggatcttttcaagtgttttcctacctccgggcaagtctggggtccaggttggggggttgaagaggaaaggaagtggcggggaaggctagcttgtcttggaataggtttgaaggaggtgtcgtcaccaaatggctgaatcggctttagcggagagcgagcaaagattccccccccttttgaggggtgatggtggtggtggtggtaatgttctattttatcttagacctagaggactcttgaaggggtctggagaagcggggggtggggggtctcggggtctggatcgttctgggaagtggaggaaatgaggagaacttgtccggtgcggaggagccctcttctgcccgcttgttgcttctctggcccagaccccctctccacacctcctgtgcctcctcttgtagtgtctccggcggggtaagacaacctagtactcatatttttagaggaatttactgactttttaaatatatagatggggtttgtaataaacagttacccacccagtgaggcagctggacaccttgggagtgcaggagggagttctctttctctgggcctagtagaagctattaactcatttgcaaagcatttcgacggcgtttttctcccccaccccaccccccatttcccagatgtagctgccgcatctggttccgtttcaccctacacgggtacaccgcagccacattattaaacatccctcttcctcccctccccctcctaaattaaaactgagattctttagcaccaccgccaccaccaccccttaacatttcttgagacgtggagcagaggctttgggattggaagagaaaagcaagttatagatcccaaagtgattttggattccttcactctcttgctggtggccgacgatgggggggggggnnnnnnnnnnnnnnnnnnnnnnnnnnnnnnnnnnnnnnnnnnnnnnnnnnnnnnnnnnnnnnnnnnnnnnnnnnnnnnnnnnnnnnnnnncgggggggggcggtgtttaagaatctctggaccctcttgggagccgcttgcttactagaggtggccttggtcggtgggtctgggccaaacttggccctgacgtgtcctggaaccaagtatcgcctctccctttaattatagttggagcatctgtctcatgtggacaccgcgggcccacctatcgccacgcgtccaagtccatcttgggggggggtgttccgtcctccatttggggagtagagtgcgatacctggtgctgtaactgccagagggaccttgtgttttcagtgagtttcctgggttgcagccctcagaagcttaaaatggagtgtttttgccgtttaaacaataactacagggccagggatggaatgtccattcttttggaaggggggggggcaacaaaacatcctaagggtccatccaaagttagcggctgggtgggtatagtttgccggtgcctctcaccctctccagtcttttaaattgaaaacacttctctggtttccttcttagggcggtagttttggaggctgtaatgaaatcgcactttccctagacatggtaattaaggtgactgtttccttcccagatgtgctctggtctttgcacctccggaccattgctttttttggaatagtatctaaattgtagaaccattgccctgagatggttgagcaaaaagtggccagtcttcctcccttggccaggctctgggtttcctcctctctggggcttcttttaaagctaagtagctggcccctgggacctgccaaggtctagccaattacccccacgctggggtggtgtctcttcctttcagtgacctaaggccaacggctcagctcgactaatacccgtcaactgtgctgatggcttgcctccctccctaatggcttgtttacatatttccccagttgggacacactctggggacccagatgaccccagagtgctgggtgtttggggaccctgagttgctgtctggggctcggttccagccggaacagttacacacttcatcagtgacaagctacttaaaatatgttgcgtttacccttagtcatagctgaacgtcagcttttcagtgaggagcagtggattgagagccgtgtgtatttccaatatgagtttcaggggtattttcattcacaatgggaggttggaggaactgcttcctttggccccatggtatatagtcttgagagggttgttttccttggccccaggccgtgaagcaatggtggaaggttaagtcagtgtcctttgaatagcaagtgaagccgaggggctgaagaaacagaggagcggcacacttatcaccatcttctcacctattagaatacatattgccaccctaaaccccagctagctgacttcagagtggactccagatgagggaattgaatggagcattgcgtaggcaagacaccaaccttggagaccaagacaatccacggagtgcactgatagccatcctctctttgcttatttgtgatacttaccccatgcacggctcttaaaagcttgttccagaaaaaagaaagaaagaaagaaagaaagaaagaaagaaagaaagaaagaaacttgggccttagcaactagtgtctctgaatgtttttttatttcacgttcattttttttttccttattaaaatcacatttatctactcatctatttatgtgggcaccccagtgctccagtggagatcagagaataggttgcaggaagtggttcctctggctggagagatggctcagccgttaagagcactggctgctcttccagaggacgcaggttcaattcccagcatgcacctcaggcagttcacaggaaaggtactgtctctgaagacacctgcactggcatgcacatatccacacacaccatatatgtgtaaaataaaataaaaaggaatttggttttctcccactatgtgggttggatctaagagatcaagtttagctgcaatccctccccttctttacctgctgagctatcttgctggccccaaaggctcttttcttgctccaatttttgtaatctctttgatcaaaatggctgttgaagggtaacacctgtcatcttgatgacctccgtgcctctgggtagaagtctgaggagccccagttcaaggtcatcctgcatgctgagtttgaagctggcttggacctcctgacgaccttgtttccttcctggaaagtctgggcctgagctacaggaggaagagcagtttggatggactgtgatgtcttgtgaaaaggccacactcctgtcacttgggaggagtttcatttcctcttgggaaatttgtattgcaagtctccccttctccagggttctggaaagggtctgaatgcaccgggaggaggccaggtgtggaactttagaaaaggtgctggtgtttccagagggagggattaagtgcctcatatgacttaggatattgccccccacccctaattcacacacacacacaccccaccccaagtttgcattggccttaaatagaaattcttagcttactaccattcctccaagaagaagccccagtcccccagcccccaagcctggaaatttaaataatgttcacccgagtaaggaattccaagattacactggtaacactggacacctgtgttatgtcctgtcttcagcagctaagccgttgtttcactcgctgtgttcttgttactgtttgtttgttttttagatttaggtctacatgtatgtatgcggatcacacgcatttctgacccctgatgcatttagaagggggtggtgttaggtcccctgaaactagagttacaaatggtttcgagacacctggtgctgctagggactagacccagttagtctctttaagagcagcaggtacttctatctgctgagccatctctccagtccctgtttgtttgtttgtttgtttggttttttttttttttttgagtctggttttcatagccctcaaggccagcagcttgagatactcctgctggagcctcctgagtgtgaggtggtagacaggcttcatgcccccatacaattactaattttttaatataaaagacatttagataatttttacatatgcaaacacgtctctctctctctctctctctctctctctctctctctcctttgttttgttttgtttcagtagtgttggggctcacccagggtatattgcacttgctaggcaaatagttttactgctaggcaaaaagtttactactaaacttttttctatgtggatactttgtaacagagatgcaaaatcagctaggccactctctatagagaaaccctcgtcctcactcttgggtgtgtctttctttcagaaagcccatttccttcttttaaccctcgttgcttaaaatatttttaataaaccgaacttcttcataaaacatgcaagcattgcatttctttttattttattttattatttttatctatatgtatatgtctgtgtgcgagtgtgaacttgtgccaccaaactcagaactgaactcactagacccagtgatggtcttcagccagcgagggtgagagagctgcagctccacaatttagcatttcttttgttccagtgtcaattttgtgagcaaagcttcccctagtgtttaaaaatgtttattaaaagcgctgtgagtggaaagttccctctattgtttagtaccttttatttttacctaaagggagtcatacttctgtaccatagtcctcaaatctgggccctcagtatgtttagaacattcctctttggtattgtgggtagttagcatggggaactgcctgtggctcccctgctcaaagtctctcctttttccttggatatatgcgggttgagagccttgactccagaagcacatgtcctgttggcagtcaaagaagactccaagatatttgggatctcacacttgggggcttactggcaaagcctatccaaatgttccgaaatccaaacaacttctaaatctgatccgtggaaggttccagacatttcccaaagagggtcctgggtctgggtttgtttcttctaggctcgcttgccttttatcccactctaacatggatgctccatctcctgtgtatatccccacctcccattctgagggtaggatgaaaggcaggtaggcaccaatcctgcttcatggaagcccatagatttttccagtgttttccagtgtcttagagttcctattgcttctgttgctgaggtgaagcaccatgaccaaaagcaacttggggaagaatgggttgatttcatcttacccttccaggttactgcccattgctgagggaaccagggactgatggagccacagaggggtgcagctaactggcttgctccccatggcctgctttgcctgctttcttctagctcccaggaccacccacccaggggtggcactgtacacagtgagctgggcctgcccacatcaatcaccaatgaagcaaatcctctgtaggcttgcagacaggccacgctggtggggcatttttctcagttgaggttccctcttccaaaatgactaggttgtgtcaagttgacataaaactagccaggctgcctggggagagaagaaagggggacatgaggaacatgagcagtaagctgatgacctaggcaccctgggacaggggctggtgatttatacggaaatcagaggactgggctgaagagctagaaggcctctggaagcagagctttgtgacctaattgtggggatctagttgcaagagggacactgactcagacccccaaatacaatgggagcctccttaagtctatgagaagaaacaggtgaaatccactttaaatgtatttgtttagatttttaagaatacattgtatttatagcaggtctatttatatgatattattgctatttctaaaatatccttttacatggaatcaatatgaaaattcggaagtgctggcagttcagttgaaccaacagcttcaagcatgacagagtacacactgtatctggtcccaatatttaaaaaaaaaatggttaagatattttacgttttttttttccctgtgttgatggccgaattctgtttttcactctcattcaccccagttggcaaggaccatatttcaatagctcaacagctgcagtgtggcctggagccaccagatttgccaactaggtctagagtgttagggctgtgaggctggagggtgggaagtacctgtgcgaagcgaggaagctcgtgttctgtaggggagtgtggtccaggagagactcagaatacaaggagtttggggtctggagagacggctcagtggttaagagcattggctgctctttccgagaatctgggcttggttcccagcacccccacatggtgaggctcacaatctgtaattccagtttcagcaggatcggatgctctcttctgttctctaaaggcacacacgggggatacacagacgtacaagcaggcaaaacagctatatacataaaagaaaataagtttaaaagtaatttttttaaaatacaagcttacgattctttcttctgttagcctagtattatagagagaaggcacttcactgtgcttgccatgcgtacatacgtgaacatgtatacatgtaaccacctgtgatgtgggaagacaaatgttcaggtctccttcagctgggaaccaatgcccaggttaaggaactgtcccgtgggtcagtgtcctggataaaagtgtttgttgactgccttctagagaacagggagatggagaactaggggctgaagcaatggctcagctgttaagagcacacactgtccctcaggaagaccagggttcatttcccaggaccaacatcaagtagctcataccactttataccaggggctatgatgccctctctccttgactccttgggtacccatatacacagtcgcaacacacatgcacacacacatacacacacacacacacatacacgtgcacacgcgcatgcacaaagaaaatgtttaggaggaagatgagaaggcgggtgtggaccctagcacttaggaggcagaggcaggcaagtgtggaccctagcacttgggaggcagaggcagttgcttctcttgagttcgagagcagccagatctacagagtgagttaccggatagcccggactacacagagaaaccctgtctcaagaaaaccaaaagaaaaagagaggaagatgagggagaagaagagaccatgaccaatacttggccctgaaagcaccagccagtaggtttcgtgcatcattttagacaaagagatccgatgttaatagactctctagtcctttagagttgaggtacaaggccgggtgctccaggctgacttcccgctagatatactgaagctcctgttgtgtaagttatttaaaagagaccctctccgtctctttcacactgtccatttggtccttataaccacccagatgtcatcaggacagatattttagccttgccacaagtatgaaaactgaggtaatatgatctcaatgcccttccttgaagatctcttcatctaagcgttggaatctgggagcctgggctgagagtggaagaactaactgatggggtgtcagacgtagcaccgtgaggaaacctctgtgtacacctggctgtgggtcacacctgtcaagcagtggaggacagaggcgattcctaagggctacggggcccgtctttaggattccccatcgagtctggattcgtggtttacgccaccgcacgctctgcagatgtgtgagccgtgcactgagtgcacccgacaaccttttcattcctggagttggtaccaggagactgagtgtctatagcatctttgttgtgcaatttgaggcccagagggtagaagagggggaggcaggagggactcttgtacctgttttggacatgagtcagggggaaggtgccagactactctcagaatagtctcaggtgtctgaagagcattcatcaccggggatgaaagaaggtgtgtacagccagcccacacctagggagaggtaggtgggcagatgtctcaggggacagagtgacaggtggaagctgcggtctgctggagtataatcagtcatctcagggtgacacctgctcctcctacccatcctttgttgttactaaggacttagtattcagggttactgtgggattcagggttttgttgtccagtgtacttcttggataacggctatctacactgattaggacggctttgggagcatcttcaggcccgagactgtgcctgaccctgggtcctgaatggccctgagtggacagagaatgagggacttgtcgtcgtttcccagcattaacttggattcctctttatcctcttagtttctctagcgcatgggaatccgcctgtgtctgcccacatcggatggagggctggtttttatttttgaatttcctgtgttggggatgaactcagggcctcttgtatgctgggcagtgatttctcccctgagctgtatcccatttaggtgtggtgaagttatttgcgttctcccaccttgaattaatgtctcccaaacctgggcgatcaagttctagtgttaccaacagctccatttccttgggcaaagttcttaagctcttgggttcccgatctccccacttccccatcccagtttccttctcttagcagagaccagaactctccttagaggcagagtaggaagaataaaggaagctttagagttataaatgtattttacttgtgtaggctccacagaacattcagcaaatattccttccatttctaacccttttcctaaattcaggaggaggaggaggaagaaaaggaaaaagaagctagaagggaaatatttacttcatttttagtttaaaattattaatttttttaagtaagcctttggaggaagctaatggtagtgtgcatatattcttctggccaagaatttggggtttttttggttgttattttttatttttttgccagccaggacggacttgactggctagagaggggcccttcttggttccaggacaggcaaggctgaaacaccacattagggcatgttccggaagcagagtctctgactagcttggacagttccctggagcaccgaggacagaaaacacctgggagataggagatggtcaccccagtccgcagtggccagccagttctcaccacttgtcatcttatccttaggaccctttaaattttaccatcacagagccagtgagacggctcagtccccataacccatgcaaaggtctctagaggggaagagctgactctgtggagttgtcctctgacctttgcatgtgtgctgtggcacagtcaccctgcccaccccccacccccagcagtaatccataaaagaaaaacatttacaataccaaaacatgaccatcacaaactcgaaacggctccagggctgcagaacccacggctttaaccaggtccgtgtgagctactttgcctcaatcagcctctgcaccggcccttgactgcgcttgtccgtagagccttcctctcccactcaccctgacatggccattcctggctgtcagatgttagcgtcaccacccaacgtcgcacagtgtcctgctctgccttcaagggtgaagcatgtgttccctgggagggaggctggtgggactggaggtcctatgagtcttctccttttaggggcaaaaaagaaaaaaaaaaagaccctggggacctggggatggatctctgctgtagcacacttgcttagcctgtgaaaggccctagattccatccctggtcaaacctatccccccaccccccacaaaagtggtttatcaagtctccatattccatgtgacatgaagctatgaactagtacttaacctcctatttcttacgccctctttcccttcctttctctctttcttccctcttcttttccctccctctctccctctttctgtctgtctgtcccgggactcactgtgtagaccaggctagccttactcacagagatctgcctgctctcagaatgcagggattaacaatatgcatcatctttcctttagtagtcacctgcccatgaaagacggtctggagcgccttcggtgtcttgacttgtgaccccactcttcgcctctctatttactctttatcagagggattggtttgtcccggatggaatgaagtcgcgtgttgggaagttagcagattcctgtcccttacaatggttgcataatacttaaacaaggctccctctttctctctctttttctcttctcttctcttctcttctcttctcttctcttctcttctcttctcttctcttctcttctcttctcttctcttctctccttccttccttccttccttccttccttccttccttccttccttcctttctctcttgttattgttttgttttttatttttaatttgcacattaccacaaccatctacaaatagtgtgtgtgtgtgtgtgtgtgtgtgtgtggcaggggttgaggaggaggtgggtcacactggtctatctggggcctagacaccaatgggaccctgagcagcagcagcagtcttggccttgcttggaccatagcctttagttggtacagtctgcaacccttgggccgtgcagccatgaatccaatccccgaacttgggtgggtgataaaagcaagtctgcctatccccgtggatagggctttttgtcattcaacctccttaggctttagaaggggtttaatggcctcagtgtgtgcacttgttgcttctgtattgcttgcctgcatcttaagagattcatatctttgtgattctggtttctttggaggtgggggtggggggttgagacagtttctcagtgtagccctggctgtcctggacttttctatgtagactaggtgggcctcaaactcagagatccccatgcctctgcctcccaaatgctgggactataggaatgcccctccacacccaactttcttacctgcgttttttgatgccattttcgtgccattgggggcggggggctgcttgaatgtggtggttttggccttgtctacttaacccgcatcggaagtgcttgggacttgaaactgcacaatgtctttcttaagctcttgatcacaatatggctctttggggcttccatgaggtcctttcctttccttccatagatgagcgaggcttttatttcgaagaacatcatggtggcagtcctagccaacttggcccttagtctgtactgagaacgttgttgtagaactgcagggtagaacccagcttcccaacgctctcacaaaatagctgaagcaatcaagttaaagagaggaaaggtttctgtaactctccgttttgtgggtttcagtctggggttgactgttgcttttgagcatgcctcgtggtgggatgaaggcaagtccttggagctcttcgtagtagagaaatcctgctcacccatggccaggaacagaaagggtggagaggggtgtaagactggatcgctgtaatcctcttcaagggcatgtccccagatgacttaaaccctccctggagggctgtctctcaaagggctcttcacctctcaaaggtacccattggggaacaagccatattatggatttaagcccagttgagacctgttacctctgattcatgtcaggataggctcagttctctttgtaccctaagaagcatccttctggggttgtaggagccagagaggtcaagaacctcacagcatcaaccagggctcatagggactcagagtctgagctgacaatgagggagcctgcatggtctaacgtaagccctctgcgaatgttacagttgtgtaactgtgtttctgtgggattcctaacagagggaatggaggctgtttctgatgcttttgcctgctttgggaacccttgtcttcctaactgggttgccccgtccagccttaatatgaggggaggtgcctagttgctgttgttgtctttaagatttatttatttattttgtgtgttatgagtgcacagtagctgtcttcagacacaccagaagaggacatcggagcttattacagatggttgtgagccatgtggttgctgggaattgaactcaggacctatggaagagcggtcagactgctgagtcatctttccgccccgaggtgcctagtcgaattgcatcgagtgatatgtcatgtctggttgatatccctgggaagcctgcccatttcggaagagaaacagaggagtggatggggaggggaaaccggggtcaggatgtaatatataaagaataaattaatttaaagaagcagaagcagcagcagcagcagccgccaccgccttccaggcaggttgaccagggatgcgatgcgctctttttccccatcacccctctcctctccaacgtctatttcagccgttgtttctttccccagagtcagcttgcgaaggcagaccacgctcacggtggaatatccatggaggtacggagccttgttaccaacctctaaccgcagaactgggatgtggggctggaagtgcctcctcttctgggctgtgctggtcacagccactctctgcactgccaggccagccccaaccttgcccgaacaaggtaagacgacaggcggagggtcagctggacccctgagctgaggagacagggtgggctaactgtcgtggaggtgatgtagtcagctggacagacttcctctttggaggagcaagggccccttccctatacctgggctgatttgggcttccttccatatccggaaccagcttcatcagaggcagggctcaatggggaccgctagccagaagtgaggttctaggggagtactttctttctgggtctttaactcagatgatgaaagatgaaagagtgacgtgaatatagatttggagaaagcattccagagtaagaagagcttggcagtgtggcctctggcttccagaaagccgttccagtgacagatcttctacaagggcctgagcagtcagtcacgagcacgtgcctttttggactctgtcctccaggtcttacctgggggcctgatggatagtttgctttggagatggcctgtttaagggacttggaaaggaacaggaggcaggatggggatcgggggtcttacgaggccccactggcctgtggtgtgtttccccgaaagttgttcctgctcctaagattcctggtggcttctgaggaacttggagattaatgttgagacctttctgttgtcaaaaggctcgagagttagtggctggtcacagaaggctggcatagaatgggtcaaaggcttgagatgtccatggcaaccatggccatgtatacagggctgtcctctaagctgtcagggacctgttagctgatcagtgagtgaatctgtgcatacgaatgtatatacaaatggcagtgagagaggagcagggtgcggtggctgaaattgacatattcatggtgcattcagtagtagaaccaaagagagatatgagcaagaacatgcttaaggctcaaggcaagagaggacctctgtacctatagggctataggtatatataggtatatagttaccgtcaaacaatggagagacaataaatatgaagcagactgtttacttattaaaacttatttattatatgtgtctgagtgtcttgcctgagagtatgtgtatatgcttggtgcctgcagagatcggaagagggttcgtggatcctttggaaatgggagttaagaatgatcatgcattagccgggcgggcgtggtggagcacgcctttaatcccagcacttgggaggcagaggcaggcagatttctgagttcgaggccagcctggtctacaaagtgagttccaggacatccagggctatacagagaaaccctgtctcagaaaaaaaaaaaaaaaaacaaaacaaaaaaccaaaataaagcaaagcaaacaaagtatgattgtgagttgccttgtgggtgctgggaccccacttccctgcacaagaacagcaaatgctcttaacttccaagccatctctttggccactagtagaccatagttaaactgtacagtaaggttttatcagaatgcagggggatgtcatacctagagctgaactgcatctgtcctgctgtccgcggtgccacctgcctttaatctcaatactcggaggcatatctctgagtccgaggccattttggtctgtgccagtgccacatagagagagtctgtctcaaaaggaaaaacagagaaaagagaggaggggtgttttatctttttagttttgacataggatcttgctgtgtcgcacgatcttctaccacagccttttgagtgctggattacaggtgtttatctgtaatcttacctgagggtactaaggtctctgagggggataagaacgggcattcttagtcgagaggcttaagatgtgtggacagtggtattgctcactgagtacaaagctgtggagagtaacacctgggaaaactggattcagccggcacatggaaggctttcttacatcttgctaaggaactcagtatatttaaatggttcttgccgagaaatttgaagtgtacagacacgacccagttttcggtaacttggtttgctttgtgcgacaaaccactaaaatgggaacaacaataaaggctcagatgtcacaacacagacacaatacctccacgtgaaagtgtgcgtagctgttcttgcatctgctgtcaggaagggctggagaagggcacgttgagtgtcaagtcagggagtgggactgaggccccgggagagtgatggccgtattctaggagagaatccatgggtttcgctaaatagtcggacgccagctcctcttccttcctggtccttttctctcctcctcttcctcctttccattctcatcctccaccttttctcctctaacaaactctttacagcccaaggaaggaaagcagacagacagttcagatctcatgccaggcccttgcaggcaggcagtttccaaatggtcctcttataagaaattttaaatgactttttacttatttttttaaataattttttacgtgcattggtgtcttgttcgtgtgtgcatctgtgtgaaggtgtcagatcccctgaaactggagttctagacagttgtgagctgccatgtgcgtgctcagaattgaacctgggtcttcttgacggatatagccagccctcttaaccctgagccctctctccctgcccccacgtgaggaattttaagtggagggggagggtcgttgaagctgctgagctgccaaggtggagaccgaagcaggggacctatgacctttttacctgttttctttttgtttatttgagacacggtctctgtgtgtagtactgcctgttctggaactcgctttgtagaccaggctggcctcgaactcagagatctgcctgggatgaaaggtttgtgccacgaaacctaggcacagtagtggttctgggaatagaaggggaggggaggggtggaagagtctgtgtagtagtcatagctggagtcagttggttgaaggataatttatgtagtatgaaatgtgcagctcagtgagttttcataaggcctacaccttatgttgctaccatcctagtcgagagatcagtgtgtcaccccaaaagcctttcccatgcttcttgctgtctccaacctctgtcctgtcacttcctgtctccgtacactagcgatgtttgttcgaggatttcctgtcaaggacgaagtctcatgatgacgtatgaatctaatcacctgtgatacccacgtgggtcactgtattatttcatttccttccctatttttttgtgacaaagtctcactctgtagccctgaatgccccggctcttattatatagaccaggctggcctcgaactcagagatccacctgcctctgcctctgcctctgcctctgcctctgaatgctggtattaaagacttatgccaccacaccctgttgtgggggggggcagttttgaaagaacacagacccactattaactgtgatgtcagaggaatatgccctgtccatgccctgtaaactttggaacctcacagacatgccgtgtactgtagtcttggccatgctgatgattaagtaatgctgctattgtctttaaaaacaaaacaatacaaaacaactgtactttatgtgacaaagattggtccacaagttaaaaacaaatcatcccagactttgcttgcacttgggaaggctttaggggaggcggcgaggagatggcagcccctcccctgactgagcacaatcctggcagtcctctgcaaacgcccctgccctgaagggacccaggaggcctgcagtttctggctgtccttacaaagttgatttaataaggattccaggaaaaccagcctcctctcccaccccaccccaccccgtccttctcccgtttgccatattaccgagtcttaagctttgtttcttcagattgggttttggggtttgtgtgtaaaatgaaactgggacacaggcccaggggcagaataccggcttccaaaagtttaggagtctgaggaagactgcttgcatgtatttgtctccgagagcaggacttgaggcatcagtgagtgggtacgtccaaaactttgcagggccacttgtagttgggaatggcggcctctgcttccctgttccctgagcaccctaaaggagcaagccagtgtgagacttccagccttgaaatactttcctccgtccacagaaacctgcatctcataagagatttaatggctgaggttttacagctcctcccacccacccagatttgaaggagtctggtggcaggatgagggaggagaggttacgttaaatggaaaagctgcaggctgtaggcccgcctgtgtaccacaaagcccggctttgtccttgttctgccgaaaaaacctgtgcctatggggaaaggctgggggtgctgccaaaatctggccctggcctcagctgtagctccctggtagccctcccacgcccaccccactaggggtcctgagctgccactggtccaagagggtgtggatttcaacctagctgcctgggagtctagctaggtatgcagtgtgtatcactgacaggcaggctgtagtccaggcagcttttgcttgttggtgtgacctaaggagtaaggttacatagctggcttggaacactttgggggacacaccgtggccaccctccacccccagtaaaatttcttgtgaaaagaccttgtttgtttctaacccactggacagtagaggattccagaatgaaaggtgttaaatgatgccccccccctttgttgttgttcaagcgagggttggggggttaggtccatgaagtctgttgccaggtttccctacgtcattgtgcatcccctccctggaggtagaaccagcgcttctgaaaggtgcttgctagcggaggggggtggggtggggaagggaaggcccgttcctcagcctgtgagagaatgtgagggtactcacgtgtccggatcagcgaggcccggggcagccgagccgctcaaggctgtgttcttggctcgggcctccgcattgctacaccattagcctcactcatttttccactctgccgttgccagccgctccccaaagtaaggggggaggaggaggaatttctcagggaagaaagaacaaatggttgtccagaggacttgctgtcggtgggggagtaggggtgggggggcagggagggaggccatacaaagaatccagccaggattctgtcaccccgagtctgggactacctgtggggagggcagaaccggagggagctggcttctgtgagagcgtgcttctgctgcgtcccgagtgggtgggcagggcctaagcaatgggtcctttctgtcaaggagcagggtgtctctgggatgtcattgatggccttggggaagtgacttctggggatcattatccaggaggtgagagccaggtcagagagtctgaccagcagctctgccctgtttttataaggcctcattcctcgaggctattgggaagtctctttgctcatcccccccatccccaccccccatcccccacatccttacttccctcttccctggaaaccagacaactgtttctcccctaaccgggagtgacccggctgctctctctcctcagcttcgtaacagtgctcataacagattctcagatgcataacagtgtcacaattacagttaggaagtagcaacaaaataatcttatggtgatggtggggtcaccacaacacgaggaactgtatttaatggtcgcagtgttaggaggttgagacccatggccttaagagaagccttttggagtctgggctgcctctgacttttagtttgctctgtcagcctgtagtgtgaccggtaggaacccagtcacctgggccctctaaatggctgtaagtagagagccctgggcttgagccactgcctccctcaccccatcgggtctttggctaacaccactgtccacttaccccataccacacatggttcctgctgtcttcattcgggaatcatgtcctgcatacggagcaaggctagggtgagagttgaaacccagtacaccggtggtcctatctgctgagttgctgtgctcctgagcctcctgggatagctcgtgtaagagaggtgatttgggggcagcggtactcttggttagcctgaaagcagccgttccccagaccctgaatgtgtaggcaaagtgggtaagagggcccgggaattcagcaaaatgtagacttgctgcctgtgagtctggatagaaaacgtcaggactgaaatttcaaatggttaattagcaaagaaaattgagtccaggactcagcctttcctcccccatggtccccacagagactgctaggctcaggctggttaccggcctcttccttcactgattctcccccatctagccaagtatattcctattttttccttgaccgtagcatgcaccatatatatgaccattgcttgtccctctccttttacatgaaatgcccacccgtccccgcccaactttttataattctttaatcatatgtacttaattcttacccttaagatttagtctgggtccccactaagattttatttaaaaggccacccctttcttggggtttcttttgtttccacgttattttatgtgtgttgtgtgcatgcagtgcttgcagttccggacaagaccagaagaggccgtcagctccccccctacacacacaccccggaactaaagttacatacagatggttgtgagccaccatgtggttgctgggaattgaactcaggacctctgggagagcagtcagtgctcttaaccactgagccatctctccagcccagacactgtcagtctttaagaacattgatttgatggatgtagaacctttaattctagtactctgaaagtagaggcaggtgaatttctgtaaattagaggccagcctggtctacagagaccctgtttcaagaagcaaaacagaacaatcaatcaataaaacaacaaaaataaaaacaaacaagaaaacctccaaaacactattttgatatgtgtttataacaagaaatcagaaactacaggcttgtacagacagataaataatgtcttagattctcatcatccatcaataatcacagttggcctgaatctttttttttttttttttagattttcttcttgtgtttatatctgagaaatggaatttatactgtatatattggcttatatcttaaatctgttcctatatagatttttttttggtagtaactatataatattgcattgtgtgggttacagaatttttacccttctgctatcaggaaatgatttaggctgtgtgtagtggattgctctgtggcattttctcttctttctttcttttttgtttttaattatgattttaaagacaggatttctctgtgtagccctgggtgtcctgtgacacactctgtagaccaggctggcctcaaactcatagagattcccctgcctccatcactggaatgctgagattaaagtggtacactcccatatgttttcatagacttgcagatataataaataacccaattagggagtgatacttgaagcccacatcaaataaagacaagatatataagaacatctcacactgcataagagggccaaagggctcaaagtaaaggggcaaactgcttatctgcaggcagtaccagctcattaatttcattatggttggatatacagagacgtatttatattgattatattgatttgttgccttaacggtgtctggaggcttgtactatgaaaaggttttgtcatcatgcaagcaaaataaagtgttcttacaaacttacaaagtgtagcccagcacacctaggctatatagtgcgtacctctgtgtatatggtatttgaccttggtcttaggccacaataagccaacacaagtttaaaccaagtacaagagattcaggatacagccaaagttggaggaacattgaatgtgtgaggctgctcttggcatagtgtgaaacattgttttatagtgaacttttttctttttaaagatgggctctcatctacaccaggctagcctcaaactcccaatcctcctgcctccgtctcccaagtgctgaggcttttatatcactgcacctaattttatggtgaaattttttaaaaaaggaagaagtgcatgtgtgtgcttgtagatcagaggataactggctggagtcagttttcttcttccactatgtgagtcccagggattaaacttaagccaaaacctttcctatgtaatgggtgacattctaaagtaataattaaaagtatagcatagggctggagagatgtctcagtggttaagggcactgactgctcttccgaaggttctgagttcaaattccagcagctacatggtggctcacaaccactcgtaatgagatctgatgccctcttctggtgcgtctgaagacaggtacagtgtacttacatataataaataaatagataaataaataaataaatctttaaaaaaaagtatcgcatactcacagctgacaagatggtgtagcaggaaaaacacttgctacacgtaaagcctgggtgatcacttgctgctgaattcaatccccagaacttctgtaatgggagaaggggtgactccgctccacaaagttgtcctttggcttccacgggtgtagggggtggggtgggtgtgcacatacagaatgacaataaagaatttttaaaaatgctttagtacatccaacctactctatatcatagtttggcccactttaaatgtgtttgccggacttccttttacctgaagcttggccaaagcaggaaacatagagcctaatcttagccaatggaggaacatgcctgtaatctgtttgggtggctgaggcagggggattgggagtttgagactatttaggtagaggttgtaacttagtgtttggctggatgcttgtttgacatgtgtgagggtctgggttcagttttcaaaacgcctcatctcaaaatggtttatgaagaatcagttactttgcagccaaggctgcatggcttgcgagtagcctagaatatggtatagtttctactttccttatattatagttggaaggtttttttttaagatttatttttaattacatgtatgtatgtatgtatgtatgtatgtgcacaggactgcagcccacagaagttagaagagagtgtcagatcccccaaagctggaattacaagtggttatgaacctgtcttacgatgtagatcaggctggttgcaaacttgcagagaactacctgcctctacctcccgagctcggggattagagagctgtgcaccactatactatgttggctccattttcatttttttaaaaaaggtacctctttgttttcaattttattttcatcttttaaattttacctgctttgtgtttgggctgcaatgcatttacatgcactgagtgtgtacagcaccctgctagggtcctctgtaactggacctacagatggttgtgagcctccatgtgggtgctgggagttgaaccccaggtccctgtcactactcaaccactcagtcatctctccacaccctaacaactctaatcttaaaaatgaaaagttggccgggcacagtgactctagaatcttggcgttcgggtgaaatgtggacgctaagccagaaggcacctagggctgggggttagcccacatggagactgggtcttcacaggacatcactagcccagaatcaaggtactaggctctctagcacagttgtctgtctctgctgaactgtgttggcttaatctgggcctgccactgagtgaatgttagacctctcttcccagaggtcattagggttgcttagctgagggaagcttgtatgtaccccaagagtcccatggttctggattaccaggtaaaaaaggtatagagagcccctcaaaagtcagaccccccccccatgctcttttgagcattcaagcaaagactgcttgcttgtttttgatactgtgtgtgcaagagatagaggccgaagagtgaattcattctgtggacaagcaggggctataaatgaggctccattttggacatgtatgctcccagatcttcgtggtcttgtagtttgtgtgagcgagttaggtccagatatatgtaacctaaagctctccactttaacctttgtatggtttttttgagacagggtctctctgggtagccttgtctgttctggaacttgctatgtagcccaggctagccttgttagtactattgcgtcagtgtcataagtgccaggcttataaggcaagagccaccatggctatgttcacattgctgtccagcaatctcgggatcttccgccttccctaattgatagcctattaccaagtaaccagcttttgctgtattattttatcttaaggcattttattttgtgtattttcataatgcaaaataagggacttttttatttttttaaaggcaaggtctcagatcttgttgcatagtctgaatggcctggaaattgctctgtataccaggtttagttaatctgcctgcctctgtctctggatgcactaccccatacacatacacagtgctgggatttaaggtgtgagtgctactaaagagtcactccaccccaccccacccttttttttttttaaacctatgagtgaacgtgatagtggagattgaaacagaacctctagaattccaattaagccctccacccctaaggtgtctccccagctgggggcatttcttcacggcagggaataacatgacgctttgtgagaaggctatttgtccaccctggattgggtggtctaatgctgggctctctgacctaaacacccccagactcattggcacggtgcggacagaccgcaggccacacgtaaccaaaccgtttaactcgggcaccatctgtggtttttgggggggggggggacagaaggcacattccgaaacagctgacactcctactggatgaatggatcagcaagttttttggggactgcaacttttcctgcccagctgccggccttttccttctccaaactggagcttcggagcctggggggaggggcggccctagaaggctcctccccgggcgggcgcttgggggcagggcagtgcattcctttctttaaggaacctgaccagactttaaggtcagggcctagagtagagcggacttcgggagttacctcttccctgtagagtcctcttattcccccctccccctcccccatacttaatgatcttcccattacagaacccagaccaggaagtgtatgacaggtcgcagctgcagacacatggctgggaggcctgggctccctgccagtagtgggagggtccaagctaccgccctagcaacaggaccaccaccctctctcctccccgccccaccccccttcctggcccacaacttagcagagcaggccttaggcttttctctatcattcggtggccaattgtagtttccgattcgaattgaggaagtgactttgggtgatgggggctatgacaagactcacctgcttacagcttacggcgctaggctcttccaagaagtctgcagcgactttaacccaaaattgaagccacctagtacaatcacagaagcttcataatgtgtgtgtgtgtgtgtgtgtgtgtgtgtgtgtgtgtgtgtgtgttgggcaagggtatccataagtcnnnnnnnnnnnnnnnnnnnnnnnnnnnnnnnnnnnnnnnnnnnnnnnnnnnnnnnnnnnnnnnnnnnnnnnnnnnnnnnnnnnnnnnnnnnnnnnnnnnnnnnnnnnnnnnnnnnnnnnnnnnnnnnnnnnnnnnnnnnnnnnnnnnnnnnnnnnnnnnnnntccagtccccccacccccccacccccatccccactatggggatggatcttctgactttaagttgctcaggaaatgtcagtggaccctaaactgccctaggaggcagttgtcacacagttttcttctgctgccagctgtgtggttggcctccttccccgaatctgccatggctgcattcttctggtgccaagtgagacatggtgactccaactcctgggagccctgagcacagacagcccttcctggagctgcagggcatcctctttttgggttctttctggccagtaaactaggaggaagaggagcaatggattaaagacccagttggggagaagggtacaggaagagatttgggtttttttttcgtgcttggtccaggtttttaccagcagagccagaacctttgctggagaagaaggggggatttgattcctttcttaatcatgtaattacaatccttccagctggaccgggctacggtgggagtcgggggggggggcaccagggcctgggcaccataacgccagtgggaaaactacaggcatgaagtttgtgtcccgactgaacacagtcctggtgcacacctttgttgaaaggtttgtaaggacgaaacaaaactcccaagtaagggtttcccttgttacctccttgagcccagctggggaggtgggggtgtcatgtggtggacgcaaggaccctagctagctgcggctttggcagctccgtactaaattacagtgatgaggtggggcgcacaaaagactgaaatctttttttttttttaataaaaacaaaacaaaacttcagccccaagcccctgggctcctgaatggccgtggcttcctgtcaggattagctcggctgcctgggcatgtgtgtgctgcctttctcctcaggaaatacctttagtaagcccgggtggagtccccatggcaacgagagaggggacctgctgacagaggccattcagctctcgttgttccctggcctctttgttgtgtgcttcatcacggcccctgtggcaagcactgcgctttgcaccattttgtcagcccaatgtggagttttacattttaatgggctgttctggcaacggcccatttgcatgcaaaatgttccttcttgctcctctccctttttcctatttaaaaaaaaaaaaaaaaacctgtccaaacccccgtcaggtccccaaatgctgctgaccaggagaaaggcccctggtaattgactggtgcttcggttttcgttaccacaacacacctttgctcccccagttttgcagccctccttgtattgaggagatctctgtgtccccttctcggtgccgggtccctcggagagtgatgattatcacctgggatcttactgtgatcgcttgttctgtcttggtcttgctagatgaaagttaagttttcggttccatttcaaagtcagaataaggtaataaaaacctctgctgagggcccctggagcccccgccgtgttccttcttagtttctttcaatgccaccccaaattcctcccacatccacaattgctccccacttatcactgggagcttgtgccaagactgtaaacattcccagaccaccatctccctcctgttgctgagacgaccccctctcccttcattttctttaaccccaaaaaaaatcccaaccacaggcatttcacggggcggggggggggggggggagctgaccctgagaccactcgaagcacccctgtctggatttagcgaagggagtctttgggtacctaagatgtctttatcgttcctgacctttgaggggtgctacactagtgtagactgttctgtcaggaaaacagggctaaatgtacagatgaagctttcgagtctcggggtgagagtacatctaaaaatgggatgaaggccacacttggtgatacacacctgagatttcaactcaaaaggctgaggcaggaggatcttgactctggatcaccccgtgctacatggcggtgggggatgggctgtccctaaaccgaaccaacaaaaaaggggctagttaccaagtttggtggcacacacctttaataccagcatttgggaggcagaggcaggtgaatctctgttagtttgaagccagcctggtttcaagccatgaaaccatgcatgagtttcaagccagctaggatatatataatgagaccctttctcagaccaaaaaatcccagcagccactgccggggctcagttgagagagtgcttgcctggattcttcgaagccttgtgttccatcctcagcgccacatgatgtggtgtggtcataaacacctgtggtgccagcatccctcttgggtgttcactgatagcttggtagtccctgcctcacagggaaagaaggagggagcaaggaatgtcgcttttctactgtaagcttcagaagtaatttgatctatttgtgttgttgttgttgttgttagaaaaagtcatttaagagatgcaaagtctctaaagtggcaaaaagcttcatgtgagggataatgaagaaatgggtggggggtgggggtgggggacgggatcactgaggcaggggagaggagacagctaaaagactggattttgtttttcaagacagggtttctctgtgtagctctggctatcctggaactcgctctgtagatgaggctggcctcaaactcacagagctctgcctgcatctgcctcctgagtgctggggctgatgtgcgccaccgctacccacagctctggatccttgaggagggaataagctggggctggggaatctcagagtgtgagggagacggcagacagcgtgtcatctctgctgttgagccggacttctctcaggacctctgatctatggatctcggccaaggagaagattgtccgggccccattgactaatgtggatggcgctagaggttatcagctgtaagctgtaaatgacgggtaagaagacagctctcagctgtcctgactgctaagagctgagctgcagggatggaggtgggtgtggtgggaggatagcagggagggctgtgaggacagtgctgtgtctgcaagccatccatgggtcatccctaactgtttagaacacgcttcgggtgagaagcagcggggaggagcccaggacacagctagagccttcttgttttgtgactttgcaggaagtctcacaacctctcttaaatgggaggcaaagacaaggagctcgagcacaaatgaccacgttttgtaagtgtcacatgcagtgccaatgattagttaggggcatgccactgaggagggtacacccaattcccaaacctgctcaattggagaagttccttcaagttaaaaacactggttttgggctggcgagatggctcagtggttaagagcaccgactgctcttccaaaggtcctgagttcaaatcccagcaaccacatggtggctcacaaccatccgtaacgaaatctgatgcccttttatggagtatctgaggacagctacagtgtacttacatataataaataaattaaaaaaaaaaaacactggttttttggttttgctttgtttgcttgtattgagacagggtttcactatatagccctggctgcccttgaactcacggagatctccccgactctgcctccagagtgctgggattcaagttgtgtgcctctacacatagcaaggtaaatgaattcttcaggtattgttgagattaagctgtgaggttgggggtgggatgggcaggataagcccagagcagccagttttagaatcccatgcaagaagatgggaggcaactgggctctattagatgagattaaagggttgaaccaaaagcgctttgcagatctcggggagaaaaaaaaaaaatcaatgactttaaagacatggtgaagctaagttgtgcacacacagtagctcatttatcccagcactccagaggcaggaggcttgtcactatgagcttcataataaatggaagaccagcctaggccattctgtcttgatgggcaggggtgggggtgagggagcaaaacaaaagacacagtgatgtaaatgaaagggtgaaagagtgagctgtgcccgggcttgtgttctgaagagccatggcactcaggtttggctcccacctctttgtaacgcttactacacaggtggattgccctgtaccttgtatccctccggctgcctccatttcccccgcctctgaaataagggtactgatgggaccctattttatcagccgtggggatccaattaggtaacacaagacgagctgtacatggcgcaagccccgcagccacaggatagtgagaacacgatgaactaactcacagcctggagaaaccctcggcctgctgtgtgtgggtatctggtttgcatggttgtgaatgggaagctggggggcgggggggggggggcagtgaatggtaaagtgctgtgtagtactgctgcctcttctctttgaagtcacaggaaaatgtgggggttgggcatgctctgtcctcagtccatgttttatagaagcagggctggggtatgttttaataaatttaataagtttttaaaattgcatttattttatattagtggtgtgtgtgtgcgcgtgcgtgtgcacacacatacactcgagcacacgtgcacgtgttcagggacatgtgtatatgccatagtgcacatgtggtggtcagaggatagtttgtaagagtcagttctctctaccactctctaccacgggagtcctggaggcagaactcaagtcaggcttttcaggaagttttcttgccaagtgagccatcttacaaccccaggaagtgatcttataccatacggtgctgttccagctctgctgattcctgtgtcacgagtgggctgcattggcggtctccacagacaggtgtgcccccgaggatttctttaatggctgtctcctattgactgctgtacaagcggaagcataataagatttatatggatttgggcctccaggctccgctctcccgctgatacagggctcatgtcagagaccagatttcgagtggggagatggatctgatcgacatcctcagaccagaattaacctgctaaaccactggatcacttccggcctgctctggtgtaagcaaaatgcggcccctcttggcttgttgagaagttatcccaatagctgaagtatttgggggtacaaataggaaaggggacaaaaaggtttcattcacatttatcatgttctttaacataaaagtactatgaaaaagatctccttccctgccctttatggctgatttcttgaagaggataaggttgacatgtagttttccctccttctagagcagtggttacttcgtgactgtaattttgctactgttattatagctgcatgctttgatnnnnnnnnnnnnnnnnnnnnnnnnnnnnnnnnnnnnnnnnnnnnnnnnnnnnnnnnnnnnnnnnnnnnnnnnnnnnnnnnnnnnnnnnnnnnnnnnnnnnnnnnnnnnnnnnnnnnnnnnnnnnnnnnnnnnnnnnnnnnnnnnnnnnnnnnnnnnnnnnnnnnnnnnnnnnnnnnnnnnnnnnnnnnnnnnnnnnnntgtgtatatatatatatatatatatatatatataatctttttaaagatttattttacgtatatgagtgctcttctacatgtactcctgtatgccagaagagggcatcatattccattatagatggttatggatgggaattgaactcaggacctctggaagagcaaccagtgctcttaaccactgagccatctctccagccccaaagatttatttatttttgtttttatgtgtatgggtattctgcctgcatctatgtcagtgcatcacatgtatacctggcattcaaagaggccagaagagggcattggatatcctgggactggcattagagatggttatgagctgccatgtgggtgctaggaaccaaacctgggtcctctagaagagcagccagtgcccttaacctctgagccatccctccagcccacttaaaatgtttttcagtcagcttggagggatgcacttttaatctcaatacaagggaagcagagacaggcagatctcttgtaaattggaagccagctacctagtgagttccaggccagataggactacatagtgaggtcctgtccaaaaaaccaacccagcagttttagaagacattgatgtttgtttagtgtgtgtgtgtagtgaggccggggggagctcattctctcccaccacatggttctaaggcttggcagcaagggccttgcccctgcaccattgatctgactggttagctctgtgctttagttcaacaagttcctatcctatcctacctatcctgtgctaccccatgctatcccatgctatctcatgctactccttgctatcccatgctaccccatgctatcccatgctaccccatgctatcctatccagtcttctatcaagactggaatgtggatttcagcattggccgagtatgacccccttttgcatccttcacaaccagtttaatgaaagtagcagttagctgttctctcatcggctgataaacctgccacactgtagctccaggccattggtcttgactgagaaagtcaagctcagaagaggctatgaatgacaagtacgtcttgtcaaaggaatatgtgagtaagttccacacaattcttaaccaaggcagtgagttgctagtgagcgttacctagtaacagggtcaatgtcaggaccactctaacatacaggtaatagtccaacttgttacctttccatgccttccacaacaaagtagctttctttatagctgctttgtaaatggggaacccatatatctaaggcctctgctatcaatgaagaaagccactaatactttaccgccccttggctgattaatgagtcctctaaaagacccatttctgtgttcctggtgttaattgtaagagtcagttctggtctgggttgctttctaggtcttaggagaagcaaggtatgggtacttgtcatcactgagggacagtgctccctgatgttgtcatcactgagggacagtactccctgatgttgtcatcactgagagacagtactccctgatgtcatcactgagggacagcactccctgatgtcatcactgagggacagtgctccctgatgttgtcatcactgagggacagtactccctgatgccatcactgagggacagtgctccctggtgttgtcatcactgagggacagtactccctggtgttgtcatcactgagggacagtactccctgatgccctctggttactggctatgcacccaaacactgttcagccattaaaaagaaagaagtgtggagaacaactctgacatagaagggccttgcttcttcttgacacggtcacaaaataccatacagagtgtgatcccattgactgaaatacatggaacagtgatagctagtatgtggtaagggtgctgggtgtagcggcaggcacctataatcccaggacctagaaagcagaggcaggcagtctctgggagttcaaggtgcaggcttgtctagaatgaattctaggatatccagggctattgagaaaccgtgtgtgtgtgtgtgtgtgtgtgtgtgtgtgtgtgtgtgtctgacgtctgtccgtctgtctgtttgtctatctatagggtgtgtaggggatgaggattcagttctatgactatggatttttttgaggcagggaggtaaaatagtctgaaattagattttttggaatggttttctaactcggaatatacagctattctcccatgtctgtgggatcaatcaaccacagatggagaatctatgggcagaattttttttttttgtctgtcctgaatatggatggcaaccactatgtagactggtatgtctgctgctgggatttttctggcctgtagactctaactgattgaggcaggagaactcgggaggttatgactggtgtcatcagaagtccgttttctgtgcagggggatggtgcagttgtgcaggggcatagccaggtttgggtggagtaggaagacagggttgtcaggagcctttggaggccaagagggatttgggccaagcaatggttgcacctgcctttaatcccagcaggtcagcctagtcttcagagtgagttcccagacatcctgggttagacagagaaaccctgcctcaaaaaattaaaggggggaaagggggggaaaaaaaagaaagagggacttgggtcttactttatatctagggtaagattttttgatgaagacagcgactatgtaaactagagggtgggtcttggagtagtgctgtcccaggatagctgcagcagtgggggttggggggggggggggagagaaacaatgtagaaacaaggatgctggtacccgaggctttcttagctcagagatgagtttctttcccacattggtcagcaccagctagaagttacgaccatgggaaagggcaggctgctggctccttcccttgggagcagtgccggtccgttctcttcgctgagttctttgggagctactgttttgtctctgtgacctgtgtgagtagactgcgcgatgcctgactctgagaatttgacttcgctgttgttgaccagtggctagtggctggtggggatcgagagcagcaaaatatttaatcagtgagatcacttgaggggaaatgaaatcggatcaataggcggaagggacgcttgctgttttccttcagggtcaaatccaggctgtttttctccttttggcgaaaccataaaccactaagaatggaaggaatagtccgcagcagctatttttaatcagccgtgcgttctgttcccctctggtgctctccttgaccagaacacaaaaataaacatgtattagcttactggtattcagatgctaacttgagatggcactgtgtttagaagagagagcccttaggttgataaactgcagtgtgagctccttggaagaaaagccatggtcaacccccatggacctaaggcttctagtgcaaaaccaatggaccacttcagagagaggctcattaaaatgagaagttagaggctagagtggtagctcctaagaggatcagagtagggagggtcccagtctggttcctactccccatgtcacgtggctcacaactgtgtgtaacacctgctttagttgatgggacactgctcgcctccatagggacccacaccccacatgcacacgcccacagacagacacaagcagatacacacagtcaaaaataagaccaatctaaaagagagaggagccacaaggcgctcagtggcccagccttttcccagccctggcttccaccccaagcactgctaaagaagggatgggggtgtcagatgctgtggggccatctgtgctatacagtgagttcaaggcactctgggctatgtagtaagactttgtctcagaaaaacaaaagtcccggtgtaagtaaaggttggttacataccttgaaccccagcatggaggatgaagaagctggtggacctctgtgagttctgggctagccagggctgcaaagtgagaccctgacacaagaaggaggccagatggtggttagacctgagatccctgccagttctaggactagatggtaaactcctagagagaagcaaagggtggagtcagagcaggattgggggagctgcttcagagtttcaggcacacgtgacttccggcacctagaacattcttcagaggaggaggccaggccagccattcatttaaatgtgcagaaaaaaacccagaaagttctttgcttcctccttagcaaagggattaatttatttggtcagtatggctgactactggtagtgccaagaatatgggtctttctgatcacatgactaaagcagctcatccacaggaggggtgggtgcaggggctggccagatggcttagcgggtaagagcactgactgctctaccggaaggtccctagttcaaatcccagcaaccacatggtggctcacaaccacccatgatgagatctgacgccctcttctggtgcgtctgaagacagctacagtgtatttacatataataataaataaatctttgggccagagtgagcagggactgagcgactggagttgaccagagtaagcagaggtcctaaattcaatgctcaacaaccacatgaaggctcacaaccatttgtacagctacagtgtactctcatatacataaaatgaataaataaataaatcttttttaaaaatttatttaaaaaaaaggcaggatgggtgctttccatagttggatgttggggggggggtaggtcttgttctggttgagatacagaaggggatgtgtaagggtgtgtgtaccttagccacttttctgtctctgtgaagagacaccaggactaaggcaaattaaagaaagcacttaattgggggcttgcttacagtttcagaggggtgagtccgcgaccatcctggtggcaaccatggcagcacacgggcaggcaaggcactggaactgcagctgagagcttacctgctgtctacaagttagagggaaggaaaaaagagagatagacagacagacagacttggtctggcatggacttttgaaaccttactcatagcaataacacctcccccaacaaagacacctcctctcactctgtcccagaacagttctgccaacccaggatcaaacatccaaaagccattctcagtcacaccacccacagtgcgacactgtgtctcaaggagaaagatggggtgcaggagagggtgagcccaggcaagcgatggatgaggagggctttatgtgtgccatgtctgttgccagagcaaatgtgccgtggtggcagctgcaggccttgggcctaacacctgttagctggaggctcccctgagctgacctcttccttggctgtccttcccacaaacgcatctgtgttgctggagggccaggcccccacccacgctgagtcatgtgtaccaagagcccctgttgaccaaatgcctgctctcatcttgggcattggggttgctgggttcgtgaggggttggttggcttgattcgctagggagaggggtgaggccgactggggtgtgttctggtgggaagtggcaaagaactgagcagcatatggggaagggggcattctagagacggggagacccttccccttagaacagtggaagttgaaacactgcttaatgctgctgctgcggctgcttcctaactttgcctctttcttctttgactcatggagaagcggggtggagaagagctggggacctcggtttgcccatcatttccgactgatacacgttccggtccccagctctcttgccttagctaaggcctggacagtgcagtgacctacgactcggctcgccctatggctcacctaactccctttctcctcctcctttctccacttggctcttcctcctggcccttgtgggtggctgctgcagctcagccctggggagtccctgtggaagtggagtctctcctggtccaccctggcgacctgctacagcttcgctgtcggcttcgcgatgatgtgcagagcatcaactggctgcgggatggggtgcagctggtggagagcaaccgtacccgcatcacaggggaggaggtggaggtgcgggactccatccccgctgactctggcctctacgcttgcgtgaccagcagcccctctggcagcgataccacctacttctccgtcaatgtctcaggttggtagcaatgccctctgccctatcccactcctccaactttgctagtttgaaagggaggcgggcttcccctccatgatcccgcccctactctgcttcagaactgccgcccactaacattgctccctgcccgctgcgtggcttggcgctctcgggttgaccgggtagggcagacgccaagctaagacctacctcagaggtgattatgaatgctcgggggtgttaagaccctgtcatttctccagcacagcagtccagagcacgctaagtggggctcgccagcttcatcttgtcaaggcctaggcttagtgattgggacctgagaacatatagtaaagttcctgctgtggttggaaggactcagtacggtttgctgccgagttcgggctttgtggggaaaacctgttgcctagcaaccagggagcgagcctagaactctccttgctgggaatatgcttcctgtagaatgtcagtttcccaaaaccagcgtctgaggaagaggcaggaacttttccttgtgccatgatgggggcttggtacctcattccagtcaccatttagaacttgtccccagataagaaacatgtttctctagttcccaagagtggcagtctctccactagagagacctctagtagatatcaagacttttttaaaaaaaaaatagggtgcatcccacctgggctggtgagatggctcagcggttgagagcactgactgctctttcagaggtcctgagttcaaatcccagcaaccacatggtggctcacaaccatctgtaatgagatcagatgccctcttctggtgtatctgaagtcagctacagtgtacttatgtataataataaataaatcttttttaaaaaatgaggtgcatcccattttcagagtgaagtatctctctacacagccctggctatcctgcaactcactgtgtagaccaggctggtttcagagtctccaagatctgcctgcttctccctcccgggtgctgggattaaagaagctactgaacatagcctgtatttacacaaagtgcatcccatttggggagtgaggctagctatagccggcatagtagtgtacacctttagtccctgcactctacaggatgtatgtttttgagttttgtttttgaagccagccttgtctacatctctacatcatgagacaccctgtcttaaaacatccaccaaaaaggcagctctggggcaggagagattgcccagctgttaagagagcctgacactcttgtagagtggaattggttgccagcattcacatagcttgtttacagttgcctgtaacttcaggtcctggggatctggcaccccgttctggcccacccgccttgggctcctgcatacacatgggacatactcacacaggctcatatagatacatataagttttaaaaacaataagacatctttgggggaaagagagagagagagaaaggaaagcaggcagctccagccctcaggaaactcattccagaagattctgattgcaggctggtcagccggaggctttagaagtagcctcaaggcccaggtgtctagatctgcctgggtttctcaaaggctgatgtccagagaatactgattcctcagctgctgttatggatacccaagtggtactgttagctgagtggccttggtgtataggctggaattaaataaatttgggggaaaaaaaggagctggccctgatagagccatctgaacttttaggcagaaggcagtgcgctggggccgggatgagcactggagcacacagctcttaaacacaaactgtcactgaggcaaaattcaggaaaattgggagtccttatgggacggctgttgcgttatccatgtcaccgcgttgaccgcagtgaggtggtctgtctagacagggcgaatgctgtttggatggaggtctagacgctcctcagtccccctccttcctctcacagatgcactcccatcctcggaagatgatgacgacgacgatgactcctcctcggaggagaaagagacggacaacaccaaaccaaaccgtaggcgtgagacactgttttctatcttactgccttcgagactgggagctgggacttagaggaaggcctggctaaagtgggaggagagaggctcagagggcctgggggccatggtgcctggttgctgcctctctagaagacctagggtacttactgaacaggtagacgggaggcatggggtcctgcctgggccctggcttctgagcctggccgcccctgctgccctcattcgtctcctttggcttttcctgtacagctgtagctccctactggacatccccagagaaaatggagaagaaactgcatgcggtgcccgctgccaagacggtgaagttcaagtgcccgtcgagtgggacacccaaccccactctgcgctggttgaaaaatggcaaagagtttaagcctgaccaccgaattggaggctacaaggtacgcgtgtgtacataccaaagaaaagttagagtaaggcgctagagcggggactgggatagcaagtctctattatctgctatgattactttgggttttgttgttgttttggttgcctttgtaaaggtgagattttgttgttgttgttttagtttaaagtttattttataatggtttcacgtgtatgtatgtgtgtgtgtatgtatgtgtgtgtgtgtgtatatatgtatgtatgtgccacatgtgtgcctaatgcctacagaggtctgaagagggtgtcagattcctgggaattgcagtgttttgatttttactactttagaatttttttatttgcgggaggatatgcatatgtggagatcagaggaaaactgggaggactcagttctccttcacctaggtgggtcctgaatatcgctctcaggtcagcaggcttggtcacaagtccctttctttaccagttgagtcaccttacaggccaccattcaccctcccctccctccctcttctcttcctttctctctctccctccctccctttggtttttgagacagggtctcactctctccttagctctgcctggcctagaactcactatgcagaccaggctgccctcaggctcacagagatccacctgcctctgcaatccgggccctaggataaaagaggggcgtgtgccaccacgactggtcctcttgtgcacttttaaaggacctttctcaggaccgattcctggaagtggaattgtcagatccgacggggtagatctgttttaagctcttagtgcccataatccatttccctctctcccatgcctttccccagtgcttccgcttccctgttgggtgttagaagcctgcactgttgagtttcatcttcagcccccaagtcctaaaaggaaaaaccagtcaccttccgtaacagaatattcgaatgacagactcactagacatttgccaagaagtacagctgggtgaacacgtttgtgttgctttttgataccattaggcacttcctatgctgataagctgcttcctctccctccggggggtcaagtcctttgtatttgtaggaagaacattttgatgagaatctcttccttagagatctgatgagtctccaaggtccccaaatatgtctcttttctcatacctttttaactttttttttactgtgttccttctctatgtgccccagactggcctgaacttccattgctgctcctgtcttagccttccatgtgctgagatcacagaggatgtgccaccatgcatggctgttcattgctcctgtataagaaaagtgagaggggatggctggagaggcagcttagtgattaagcagatagcactctactctggtccagaggaccagagtctggtttccagcactcacctcgggcaactcaccaccacctataactccagcttcagggtttctgtggacacctacactcacatgtgcgcgcacacacacccacacacacccacacacacacacacacacacacacacacaatctttttctttctctattcattattaattatttgttctccccgctcccacccccaatcagggtttctctgtgtagctctggctggcctagaactagctctatagatccggctggcctggaattcagagatctgcctgtctctgcctcttgagtactgggattaaaagtgttcaccaccaccagttctttttctccttccttccttccttccttccttccttccttccttccttccttccttccttccttccttccttttttaaagaaagaatatggggaaagctttacctggccttacttaccaagtccttttgtttgcaagttaggattttgtaaccacatctgaaggcgactgtcaaagggcagctgtggtaagcagcctgcagggggagctcctccatgcaagagcacgggaaggaggaggacgggtctgaccagagtcaactagaagcaacgggggtttctgtgtgatatttatgtgcattcattttgtgtgcacatgcgcaagcaatggcgtgcacatggaggtcagatgacaactttcaggaactgcttgtctcctcccaccacgtggggcacgtgcctttatccacggagccatcttgccaaccctgaggagatagcttgtgaaacttgccgcgtcaggcataggtgtgaaattcacgagcacggagaggattcccagcttaggagaattggccaaaggcgcgttggtccagctccccgctgctcctgaacgctgctgtgaagatggccagcgtcttcatggaccttgtcagttttagtttgcaggaaggattctgagtgtgactagaccaggatctagtcctgtgctttgtgtggctaacagtgcagcactggccgtatgtgcggctctcgtctgccctccccctgcccccaggtcctcagcaaagccccttgtctgtgccccacaggttcgctatgccacctggagcatcataatggattctgtggtgccttctgacaagggcaactacacctgcatcgtggagaatgagtatgggagcatcaaccacacctaccagcttgacgtcgtgggtaagaaggctaagtgggcaagaggcaggcagaggcaagggtggggcaggaaagggcagcggaggaggctgaggtcctaggatgggctctggacatttggtactaaacgtcccgctttgaactttactttctgtcccccctcccccttcttccttctttccagtttgagatatggtctcagactttagcccagacagctgtggaactcactgtataactcagcctgactctgaactcatggccatcctcctgctccaacctctcaagtgctaagattaaaggcttgggcctaccttaagccttacttttttcttcctccctccctcctttcctttcttacttcccttccttcctctttctctctctctctctccccccctctgtccttccttccttccttccttccttccttccttccttccttccttccttcctctcacaggtttgccttaagcctcacttttctccctcccttccttccatttatttatttttgagacaaagtatctctatgtatccctggctacctggaatttactatgtagatcagtcttcccttgaactcactggagatctgcctgagtgctggaattaaaggcatgcacaactgttcctggctcacttaaaaaaaaatcattcattaagcaacagctactttacactacatgtctaggaagacacagcttgatatagcaaggagaaatgcagcccaacagtagctgttgcttaaagaacaccactaacgccgggcatggtggcgcaagtccgtgccccctgaactttgacctttgtgtctttgcagcacaggtaccattagagtatctgtataagccaagtgcacattctggggtgcagaggccaagtgccttgaaatgtagaatcgccattctgtccacttggtgtagtatcctggaagacaggggaacaccatgttgctcatctcagggctctgattggaaaggttctgggtcttctgctccagagacggtgtggtccagcacctcacagtgaatacctgccttggcattgatgtagcccaggcagaagattctgatctcagagatctgggaagggtctaagatgctggaatctggggtcgtgtctctatttagacaagagacttggttgtgtccagaaatgtgagtgcaggactagaagaaatggtaccccttctctcaaatcaggttcaaagggcaggagtttagcagaagcagtgggaaggatactgtaggtcagtgtaggcctcaccactggccagtgaagagtctgacatgcctgtcctctctgtgcccccacagaacgatctccgcaccgacccatccttcaggcagggctgcctgccaacaagacagtggccctgggcagcaatgtggagttcatgtgtaaggtgtacagcgatccgcagcctcacattcagtggctgaagcacatcgaggtgaacgggagtaagatcgggccagacaacttgccgtatgtccagatcctgaaggtactcttaacctcctttcttggctagtttgctgggaaggtgaccaggtgtgccctggggctcagtgcctgggatttgagttcaactttacccataagtcacatactatctcctagtagggatctggccacaggctggtgacagcagggggctggggtggggtgaactgggaacagagggtggagtgggtgacgctggtggctggttcctgaagagctttgaagtggcccaggatcttgggtcagttgttcaaggaagacattgaaactcttgcttgctcgtggacccgggaccacaaccttccaacagcaaatgtttcccggtgtcttcctgcttgtttttcctaagttcacaatgcttttggagaatggaggcccacgataagggtgctgcttaaacagatggaaaagcaaatggcaccctataaatcctaagccgctccgggagtaatggcattctcttccttttccctctcgctcccagactcgagtgccccattaatccagggagctaactggccaagtctccagtgagtcttgcagcaggagtaaccagaagttagacctcatcctcccctgccttggctggcctagagatttactggctgtccctttctctctgccactggagctgaaaacgttctggaggagagggggccagctctagctttgggcctttttgaagctcgttcttcaattacgagttcccgtcccaccccggtcttggaggagggagtgtaacatatactgagtgtttgctttgggacagtgacccctcctccgaccccctcctcttctttcctccctccatttcccttttcctccccttccccccctcctgttttactattttagctcttcatctctatccactctcattagcagttttgtttttatttttttgtcccactcagaagagaagactatgtaggtctcagcgtctcccttgccttgactcctcgggctggaagttaccgcccaggggcatagtgtggtcacatctcagtgtctgcccaactgactggtgtgtcgttggtttattccagcattcgggaattaatagctcggatgcggaggtgctgaccctgttcaatgtgacagaggcccagagcggggagtatgtgtgtaaggtttccaattatattggtgaagctaaccagtctgcgtggctcactgtcaccagacctgtggcaaaaggtaatggggagatggacgggaccctgtaccgggtacttgatttaggctccacactactggggcaggttgggaagtcagtaccaactctacctttctccttctgtgttcctaatgtgcccagagccatggaaaaatccctggcttgggaggctggtttggtttggtactatgttggttatctgtggctccctttgtgccttatgtatatatgtgtttctctctctctctcctcacccttttttcttctatgtgtgtgcgtttctgtgtataagtacttgtgcctgtctgcggacttgtgagatgttaggaatgatgtttctgactgaagtttttgatagtgacaaaaagaaggggccagatattctctctcagaccagtatctgcacgttgtgcgtgcatgtgtgcgttttcgggatgctctgggggctgcttttctttccttgctgtcccgtctgtacccactgattctctttacctaaaaccaaacagccccctacctgccaggcctcatttctccatgctgcccaccgcccgcatgcttggctgggccagtggctgccagcgtctggtgaagggtcgtaaccaagccgtcgtctcctcaggtctgccggagagcctcccctccagagcctcgctgttttcctctaacaggtctcgctggctggtggtgtggtttttttgccttgttgcaaaggagatgctggggagcgtttcttcttctggttttggtcccctcctctgtcccctccgtttctccgcctctcggaggtctcatgtcccgggcttgtccattttgcttccgtcgtctcttctagactgctggagttaataccaccgacaaggaaatggaggtgcttcatctacggaatgtctcctttgaggatgcgggggagtatacgtgcttggcgggtaactctatcggactctcccatcactctgcatggttgaccgttctggaaggtatacagtgcactggtcctttccgggtcctgccttttgccatgggagcagcgcatccgttacagggctggggagaggcagaaagggacggctcccgtctgctgcgtacccttttctgctctggctttgagggccatgcagggggagttcctgggttttcaggaagtgacgcgtcagcctccccttgcacatgtacatctggctttctccctggtcaatgtaatgcatgcgtgagccctgggtttaccttgcagcagggctttctagcacaggctccttccatccttgggtacagcatcttccctcatccatttggtacagaggctttgaatgatggggtcttctttagccagtcccacggaaagccatgggcctctcctccatgaatacatgccaataggagcttactacggcttccctggagtattgctggcccactcttcattctgctctgcactttgattgacgtgccaggatagcaaacctgaggcctgtcttagccattcaggacatctggaagtgcccattggtcctcttaggatatccctcctggcctgccctcccatgtgagaagatctgtgtcagtgtgctacccaggaaggaaggaccctgtggccttgccgggtggtgggctggtgaccacaggctcagtatggtcttacttgcatgtggcctgagagctgctctttctgtggccgctaagtgcataccttctctactcttcccttccaccttgcttgcccagcagtctcccacactgccgctagcaaagaagcatcctatctctaccatcgtctctgtctgtttagtcagtgctccctgtgagtcttcatttcctgacagttgatgggcggggcggggctgggaggggaggtggatgatggacagacaccaacagaatacttccctgtggtcatcagctctgttgtttccttgttgggctgggaggactcccaagggtatcacttcggctggctgaggttttaaagggaggactgttggaggaaggctgcatgcatgcaggacaaggaggttccagtaggcagacaatgtttcttacgctgaagggaaagatagactgactagcaagtggggatgagtgtgtgtcttagctgggatcactatggcagcagtgaaaccccgagatcagcttgggaaggaaagagtgccggctgcaacttggcttgctcagcctgcttgcttatagcacccagggcacctggatggcaccacccacaatgcactgggccctccccctatcaatcactaattaagaaaatgacctacaggcctgcctacagcctgctcttatggaggcattttctccagtgaggttccctcctcttggatgactttagcgtgtgtcaagttgacaaaaaactagccagcactgtatgaattctaaatagaggtaaaagaacatagaaaaatgattgcctggcccccatcccatttccttaccttttaagaatcctgtgggaccatgaatagatttcttttcttcttcttcttccttttttttttttttaagatttatttatttattatatataagtacactgtagctgttttcagacacaccagaagagggcatcagatctcattatgggtggttgtgagccaccatgtggttgctggtatttgaactcaggacctctggaagagcagtgagtgctcttaacagctgagccaactctccagccccatgaataggtttcttaaaaacatgttttttcacctagagacatatttagacactatatttactcagcctgtgttttagctatttactgacctgatctaacagaggtgacgggtgtttagtaatacatgagatgagcattcattagagtcccactctgtcatgtgctttgaggactatctggtctctagggcatagcagcctgtttccatatgatatgtgtgtgcaacatatatgcagggtctttggtgcccttccagtccagtgatcaactatgcaagttggctctggagttagtgagtgagtgttgggcttgttttgcaggatagtctaggttgtatgtaccctctatggggtttgagtttaaggatgtttaaggatacttcagaggtcccaaggtcctttgatgccaggatcccaggggagaggggcaggtgctgggtttctcatggggcacacctctcgtgagtgaagcttccccccagcccccatgacctgctgacacactgtccacactgacccagccctggaagagagaccagctgtgatgacctcaccgctctacctggagatcattatctactgcaccggggccttcctgatctcctgcatgttgggctctgtcatcatctataagatgaagagcggcaccaagaagagcgacttccatagccagatggctgtgcacaagctggccaagagcatccctctgcgcagacaggtaacagaaagtagatgggggatttgcaggctcaccactgtcttgccgcctcctcttcctgggcctctggggcccgctccctttcctaccctcctggttggctcctcatctcccactttggacttcgctccaacttctggaccagacacattggaatgttataaaccaactctggctctatgcctgtccaccctgtaccccagccacaaagacctccctctgtcacctgagacatggtgggaggaaacgggttggaaggtgcaggcgtgtgaaagattaatccttcctcagaagagggctgacccagaaaggtgcctttagggactaggaatccgtaaacccgaggtggagcgttttttgcagagtggtggggacaagaaaagagccgttagttctgttagaaaacaggaagctcaccgaggtctgtttggtgtgctcagtgatcaggtgagtaagatggaacccagaaagactttttgtttgtttgtcttttaattttttttaggacaaggtttctctgtgtagccctggttgtcctggaactgactttatagaccaggctggccttgaannnnnnnnnnnnnnnnnnnnnnnnnnnnnnnnnnnnnnnnnnnnnnnnnnnnnnnnnnnnnnnnnnnnnnnnnnnnnnnnnnnnnnnnnnnnnnnnnnnnnnnnnnnnnnnnnnnnnnnnnnnnnnnnnnnnnnnnnnnnnnnnnnnnnnnnnnnnnnnnncccccacccccgccagcactgggactaaaggtgtgtgtgcgtgcaccaccaagcacctggctatggaaggacttttttttttttttttaaaaaaaaaaacttttatttatttttaaagatttatttatttattttatgtatatgagtacactgcagctgtacagatagttgtgagcctttgtgtggttgttgggaattgaatttaggacctctgcttcctccggtcagccccacttgctctggtcagccccgctcattcaggcccaaagatttattttttattattatacataagtacactgtagctgtatttagacacactagaagagggtgtcagatctcattatgggtggttgtgagccaccatgtggttgctgggaattgaactcagtacctctggcagagcagtcagtgctcttacccactgagccatcatcttgccagccctggaaggacgttttgatggtagaaattcctcagtcagagcttctgcccttatggggttggttggttggtttgtttgtttgtttttttttttttccgccacactgttaggtatggaaataagtctgtccagtggttaaaaaaccaagctgggggtttgggaggagttggctaccacttcaccctctccttgctagaagggtgaccccactcttccttacaggtgtcagctgactccagtgcatccatgaactctggggttctcctggttcggccctcacggctctcctccagcgggacccccatgctggctggagtctccgaatatgagctccctgaggatccccgctgggagctgccacgagacaggtaatattgctgtagttttccattgcggatcccagtttcgagaaatattaaaatgaaccgccaagttcctgcgccagcaactcttcgcccccacctccgctgcctccatagctaagctccatgtagcgtccgatcgcagtcttcccttcccagctctggttcactgcctcagtgcctgccacccgtgccctctcagccataatcccgctgtggtcggtggtcccatctttcagtaacccagtaaagcaaaactctagaattaacaaggcagatttatatatcaataaattttcagttcacaagatgcccacacaatcatttcagaaccaactggtaagtgatacaagctgcccacctagatcagacaagttatcccaattattctgtccctatatgatatttataactacctgttgctatttgaaaccacgcgggatcaggatcttcttcctgtctgcccgcctccatcttggcttctcctccccctcttctgagtggctctctgtctctgcaactcttcgctctgccccccttttttctgtccagcaggcttcctgctgcactaatattttaatgtaattgggcagagaaaatcctgccacagtcaccctacaccgcccccccaggcttttgttctggccgttctgtaattttccaccgcagacccctcttgcaagaaatattaaaatgaactgccaagttcccatgttgttgtgtatgctaaggccttctaggcagtgaaagtacatgagatgtctttagaaatagcttcgctatttcctgctcttggctgagtggtgtaccaggagaaacagggttgagctgtcctataaaagcttgctctggggggctggagagatggctcagcaggttaagagcactgactgctcttcccaagaggtcctgagttcaattcccagcaaccacatggtggctcacaaccgatgccctcccctggtgcatctgaagacagctatagtgtacttatatacataaaaaaaaatattaaaaaaaaaaaatcttccgggtgatggtaccacacacctttgatcccagcactcaggaggcagaagcaggcatgtctgtctaccctgcattcaggagcagaggcagaggtaggcagatcagatctcttaagttcaaggccagtctgatctacagagcaagttccgggacagccagggctacccagagtaaccctgtcttaataaatggagtttggggatgttgatctttaccagccctgactgtcatcgcacgtttgtcctgtcctaactgtcactcactgtttatcccccactcaagactggtcttaggcaaaccacttggcgagggctgcttcgggcaggtggtgttggctgaggccatcgggctggataaggacaaacccaaccgtgtgaccaaagtggccgtgaagatgttgaagtgtgagtggaactcctgtgtcctgtagagtcgtctctttcctttctaagcaaagtggggtctgggcctagtcgaaaacatcctatgatgcagtcacggctcacactgtcactaccggagccgaggaggatgtagcaatatacgtgtttaaatctcaccttgcttcttaatgttgtcctgggcccaggtggtcctcttagtcccacaaacgggctgatttttcttgcagtgtctccagctaccctcagtactacatggtagtagtggctcctgggagggaagtgggaggaaagaagggagtcctggagaaaagggggctcctccgggatccgcttcccccaccccacctcacctcaccccgctctctggtttgcatgggaagccgacgcaacggagaaggacctgtcggatctgatctcggagatggagatgatgaaaatgattgggaagcacaagaatatcatcaaccttctgggagcgtgcacacaggatggtaggcggctcctggggcagctctggcctctgggcatcggctgagaaactgccttgccaggggggttgatgcgttgctcaggagctgggccagcctgattggcattcatttaaggttacttaccaacacccagattcacagtgtgaaagggacagtaatgttaatagagtctacattagggcacctaccctcagcttcgcttgggaactttctggcctatactgggagggagtcttcttttggatacttcgggaagaatggttttacctgttcccttctggaggcggcagggaaacatttacaccgggcatgggagacagtggactatggcatcaggaggaggggcctccattaggcgcagctcccctccctgacctattgcctgacctgtggtgtctctctctctctctctctctctctctctctctctctctnnnnnnnnnnnnnnnnnnnntctctctctctgctctcaggtcctctttatgtcattgtggagtacgcctccaaaggcaatctccgggagtatctacaggcccggaggcctcctgggctggagtactgctataaccccagccacaaccccgaggaacagctgtcttccaaagatctggtatcctgtgcctatcaggtggctcggggcatggagtatcttgcctctaagaaggtgtggagactgaatgcatccttccccgcaagaggcagggtgggactttatccagttagcactccaacttgtggctatatcgtccacaccggccttgattcatggtccttctgcctcagtctctctggtgctgggatgttaacacgggctactatatctgtccccagcttacacctgttaatctttagagctgtgggtgcatggagcttggccccttgtgttgtgttaggttttcagagttaggagagccttgtggtcttgggatcagattgaattaggtttgagtctatgtaaccattttctgcgtagactcgggcagataggcctgaaatttataattattctgctttggtctctcaagggctgggattatagattataggcatgtgccactgaacccagccttgtatttcttttttcttttttttttttttttttggttttttgagacagggtttctctgtagccctggctgtcctggaactcactctgtggaccaggctggcctcgaactcagaaattcgcctgcctctgcctcccaagtactgggattaaaggcgtgcaccaccacgcctggctcagccttgtatttctttttcttcaattttaattttaattttttaaaagatgcatttatttgctcagtggcggtggtgcagcctttaatcctagcactcaaggggcagaggccaatctcttcagtttgaggccaagctggtctacagagcaaattctaggacagtcaaaactaacagagaaaccttgtctcgaaaagctgaaaaaaatatttattgatgtattttatgtatataagtgctctactttcatgtacatctacatgacgagaggcctcagatcctgttatagatggttgtgagccaccacatgggtgccgggaattgaactcaggacctctggaagagcctccagaccactctcttctctccagcccccatatttcttcagatacaaaataagagtacttatttctacatagtagaattattgtgacgataaaattaactatgtctgtgaaaattctgagcacggcttcagtgcttgagcaggcgtgcccggccagggagggcgacgctcaacccacacacctcacagacctatcatgggcccaggtggtctgctttggaggtacgaatctaaaagctagaggttaggatcaagaaaaaaaggcataaaggcaggcttgttacagtgactgagaaggctacagttggaggtgtctggaattaaagaatatttgggaggggtcgtcgagaggatctgggaaaatctagagggtatagaggtgtgaaggcagaagaccctcaaggtaacacggtcccgctgcccgctgtggcagtaagtactggagtagaggggactggatgggtaagtgacagttcagggctgtcatctcctctggtctccacctctctgcagtgtatacaccgagacctggctgctaggaacgtcctggtgaccgaggataacgtaatgaagatcgcagactttggcttagctcgagacattcatcatatcgactactacaagaaaaccaccaacgtaagtttcttgcttggcgcggcgtggggctccacaccactagactcgtgcccacttcgatcctgcttcgatgtctttgctgtattcgtgtggggttgagtggtctaacataaaagggcttgtaggatgggctgtggactcgtgtcccatgccctggctcccacctccttgtcaactcactgcctgcgccgtcatcttccgttcaccccgtgagtcctctgtgtcatcccgcctatacacatctgctgctgcttgcagggccggctgcctgtgaagtggatggcccctgaggcgttgtttgaccggatctacacacaccagagcgatgtgtgagtttgaaatacacagttgcctgggatatgcaggagaaagaattctaagggccctgcatgctaaactggtgggaatcttattccatcactggggcaggggtagcattgtcttgtcccatgaacagtgtgcttccggcttccttgcatagtatagtctcttgctgccctcttgtctcctgtgctctgcccccctgaacttaaggtccctgaagaggtgagaaaggttcaagatgcacacctactactcttaacttcttgaggacttgggaaggaactcctagggcagcctgactctgtgctaagccaccgtggaaccgtgttcccctgtaggtggtcttttggagtgctcttgtgggagatcttcactctgggtggctccccataccccggtgtgcctgtggaggaacttttcaagctgctgaaggagggtcatcgaatggacaagcccagtaactgtaccaatgagctgtaagcataggctagaggggaaggatggggggttagtagtcggcactgtttggatccaccactggcaagctgggttggatgttgggacagcttcctcaggtgatggtggcttattcgaggttcctgaggtctcaagcctggctctgaaggaagcaggagcatggtgggcaggggttgaaaggtctctttgggagaagtggcctccctgtccatccctccccaagccctctggtccagctctgccctggtccttcctctctctctaacctcaccatcctgcttcaggtacatgatgatgcgggactgctggcatgcagtgccctctcagagacctacgttcaagcagttggtggaagacctggaccgcattgtggccttgacctccaaccaggtagggctgtcccccggggttggaacttgggcctctgtcacataggctcctgggaaggtttgggtgccacccaccgatccctttctgtcacaggagtatctggacctgtccataccgctggaccagtactcacccagctttcccgacacacggagctccacctgctcctcaggggaggactctgtcttctctcatgagccgttacctgaggagccctgtctgcctcgacaccccacccagcttgccaacagtggactcaaacggcgctgactaccaaccctgtccccagttttctcccattccgtcgtcacccgtgcccctcacccacaatccccttgttggacacactgcctttctcctcctcctttgccgctggcaagagccagtgcctgactgaggccttcctgtgttgtggccttccccctccatcacccccaagacccctcttctccctcttcttagcctgctgtgtgagagaggagccaagaggcaggtgcttgccgacggccgcatcctccttcccaggtgttggaccaagacccgccccgctgcctggcactgcttggaggtgtgcagagcggaagcaagtggagcatccggggcattcctgttgacccatcagccccttctgttctggcggcaggggccttggggctcctggaagccgtgaggtttctgtttaggccttaaccgaaggcaacctctgctccagatggatggtaccagtagcttcttaattccaatactaatttgctttgctgaccaaatacctgcctggtaccagaagacagggaggcagagactgggagccgtgatgtgcccttgggctgagccctagacttggggctctgtacatagctatgaagaaaaacacaaagtgtataaatcttgagtatatatttacatgtctttttaaaaagggtcgttactagagatttacccatgggggagacgcccagggtagcatccgttgctatatattaaaaacaaacgaacagaaagaaaaaaaaaaggaaaatgttttttaaaaggtcatatatttttttgctacttttgctgttttatttttttaaattatgttttaaacctattttcagtttaggtttccctcaataaaaaattgctgctgcttcatttttatcctgggcgtgtgaaaagagagcaggtgtccagcgcagaggagggagacagggggtaaagggccatgagctggtcttccccctgccccccatgacctctgtctcctggattgtgccccagacctcccagccaagccttctatctcccgatgcattgggaacagcaggagaagactgaggtcctgagggcagagagccaagctcgcacacttgattgtttcctcggaggagagagtgagaggatgaggttagccagagggtagaactggacagaaacccaaaccctagaccctgtacattcagatgtcttgtctatcttccccaacctactcctcatattcctctcctgtaaatatcctccccttccctgttggtctctgttacccagttgggtctgtccctgagcttggcttcctatagtttttccttcacaaactccacccatccctcaggaaacagaaaacgatctctttggttggggtcaacttggcaactcaattctgccacctgctggttgctttggtaccttggtctcttattcaaacccacaccactcaagccttagagggtttgtttttgttttttgtttgtttgtttggttggttggttggtcttttttttctgggtctgctgaatacaaacctgttcagtatgatttcatctgtaggggttagggctgcttctttaaatgcagttttggcagctgtggtttgggtcattgtcataagagttcttatcgttgtttctctctgtacacatgtaactgtcaaaatattatgaatggtttttatgctgaaagaagacatcatttggcaaagagggctagggaatgaatttagcacaaactcattttcttggagaccgtgtatcatagtggtttttttttttttttctttctcttgttaaaactgaacattatttctgcctcaggtctacttgactcactgctgtgtggatggaaggagaacacagaaagggcttagtgtgactcaaggagaggagctaggaactggaaggaactgaagtcccctctgttactattcagattgcccgcagacggcccctgggacaggggtggctatcaaatagaaagtagtgacattgacatgaagggaaatgaaatggctatttcacttagaggaccagattaggtctcgtgggagggggaacccagcttacagaatgaagatgttactgtcagagcacagcatctgtctggtttcctgggggttaaaatatggcccaggcatcaatcaatactgcttccccatcttttctaattgccataggctaaaggccatcagtcccctggctctgttaatgtaatgtatcgatttcaggtaagtaagattgaacatagatgaagtaagaaatcggccttaatggtaatgaactctgtttatcaactgccactgggtggagccagcaagctaaaatatcctcctacacacagacagtgttaggttatactgtcagagccactgtcctctgaagtaacagacctacctgcaagcgggaacttttggcctggatatagcattgtcagactctggacatgaccaatatgtcttgtacagaattggacatggcacaagtgcagggccatactattaagtagcagcaacaactattacaattctgtgtagaatgtgtgctgtgtctaatgtcgctacaggcgcatgttagagcttaaaactgtacccaatgagcttgttagcagctgttagcagctggtagagcttggttccaccacatatgcaggaaatagctgggagggagaatggagggctttgaagcaacatggcatgtagaaaccaagaagggagtagaccagcaagaaccctgaagttggctggtcctggtagtgaatgcctgtaatcccagactcagaaggcagagaccggtagatcttgagttcagggacaacttggtctacatcgtgagttcagggcctgctgaagatgcacagtgagactcttgtctaaaaggaaattaaacgaaccagaacacactgaagttatgaaggactctggaactggttccctcttgtttgacacacagcagcattcagaatctttactgcctgctgggtacgtgcatgtcctggtgcacagaagcaatgcattcaattgccgtgctgtcggaggttccagtggtgtgctgaaactggctctctaaaggaaagtatgtgtgtcagcctggggttatggcctagtaacccaaattttgaaaacaaaaggtgatggtctttaatcctgaactcagggggcagaagccagtggatctcttaaattcaaggccagcctggtctatatattgagttctaggtcaaccaagattgcatggtgataccctgtctccaaaaaagtaaaatgggggatgggagtggggtgggtcggggcacaggtggagtcctcaatggccagactccatgacttaactacttccatttgctcattgagaaggccagaaggaatccacgtgcatcagggagatgagaggattaagccagttaagtagctaatccctttcccatattacacatctatagtatgcactaagtttaaaaacccaccacttccagacggaagttgtattgtgagataccttagattagagcaatggcagcttcccagagtggtgtatgaacacagcctacagaagtcagttgattagcacactgggtgggactggtcctccatgactagggagcattttgaggaggtacatgctctgggctggggtgtagtccagttgcttgaatgatgattaaggagttcattggctatgtggtagtggcacacacctataatcccagcactcctgagttcaaggcctgggaagtgggtggagatgtctgtgtcttgtttgtttcgagatagggtctcactgtgtagctctggctgtcctggaactcactctgtagaccagcctggactcccaactcacaaagagccaccggcctctccttccagagtgcttgaattaaaggtacgtgccaccacggtctggcatataagtgttttgtttatatatgtgtgtgtgtgtgtgtgcaccatgaatggtacctgtgaagttcagaagaggttgctggattctgtagaactggagttagaaattggtcgtggcgaccatgtgggtgctgggaaccagacactgaccctctgcaggatttagtggtcttctgacgggacagtccctccagcatcactatctgtttaacttctctaagaagttgtgctttcctgggaagcacgtccgtcctggtcctcgggcacggtactgttctactgaggagtccctctacaaaggccggccaggtgctcttaaaggtggtttggggagtctccatgttctggctaacaattccaagccacaggaggcagagagaggtatttaaggtgccaagctgactccattgtgaaatatatttcctcttaaaaggtccacatccaattgggcctggtaacataaagtctacataatcctagctacttgggagatgcggtgagggaggctgaaaattcaaggctagcctgggcaattccgatcttaccttgccatttacaaaagtgaaagaaagggcaggggaatacatacagctcaatgccagtgcttgcctagaaaccacagccccacccccacccctgctcagtcccctccccaagttcacacaaacaggaagccattcgaacacaacttggtgggagtgtctttatgcaacgtttagtaagatgacaaaattatacagtagagatggactgtaattaagcttctctaaatggcctgaacttggtgtcactgcttgcatctctgggatggtcacaaggcctccaacgacttaatggctgatcctttatctcaagccagacagtcttagctggaattcctttgtggacgccactgctgagcggagtgactgaagagagggagcgccaccttcaagggatccttaggctcctttggaatcagccttgctgttctgtgaggtctcctgggacttggcctggaggatctggatataaaacaacactttaggctttggtcacaaacagtttaaattctgcaagcatctactttgagcttcttaatcaaactaatggccacaagccaggctcagtgtgtgtgtgtgtgtgtgcacgtgtgtgtgtgcacgtgtgtgtgtgtgcatgtgtgtgtgtgcgtgcatgtgtgttgagcctgtaatccctgtcgaggctggtgaggaagtagaactggcctgagttccaggaaagcttgaactacattcagagtgaacgtgctccaccttccccaaaggaaagcaacgagacaggggccacagactcagacctgtacgactgctttggtaataaagatggagatacaaacaagcatggaatccctttctgagtgccagcccagccacaggatcacagatgagcctacggtggacctgtcacacacagttcatctgtccccagccacccaccccccccccccagtgaccttcctactgtttgcttgtgctttctcacctcccccaaattacttggcccaaatgggagaagtgggcacagaaatgtcctatttacgtgtctttttctgaaactttaattgctttcctgcttgtatttcctgacatcagaagcccatgtaaactagataacatgtgggaactatttgcatttaacacataaaactaaggatctgcctatagtgtaattagctctagacttccatgcttgggttgctccagcagggtgcggactttccccctctacttcgggacagttgaggggaagaggtagcggccataagatcgctcgagtccagcctgcattcctgtctggatagcagcaagactcttgtagtgttctgtggtatgcatgatgctgtggccccagtgcccttccagatacctggggagaggttcctctagactacttactgcttctttggaaatagttgctgctggtgctatgagtgatgacggtactgggggcagttgtataaattcttcatccttaaacattagaactgagaaattagtgatttaagccagtgcataccaggatctaccacggataccaggaacttgtaacaactatattatgtagggtttgaaaggtaaaaatctgaaaattacatgtaatcaaatgttgacttaaaacatttctggcagtaactggagatggaagctgtggtttcacattttccacaagcccattaccagtgagctacacacccagtccaatatgctgagctttttacgaatcagattaagcagtgctattgatgttctttattaccaggtggtactgcattggatacaatgagttctgttccactgggaggataagacatgcagagaaatggctgggggtgtgctcctgtcatctcaatccttgagaggctgaggcaaggggtcctggagcctgaaaccagcctgagctacaccatcatctcgtttggaggaaaagaaaattaagtctgatcattttttttttcagtttaatcatgtagaaagaaagtgaaataactaaccttcgttcccttcagctgaggtgcagagtctgtgaggttctcctttgactcggggggtggaggtgtcggtattccaaggtttggctttggagtctggggacacattatgcaagtataaatagtcaggcccagaagcatggacaagaatatgtgccttcctctgtctagcggtatgcatgtggggttgagagggtgtgtgtgtgtgtgtgtgtgtgtgtgtgtgtgcgcgcgcgtgcgtgcgcgcgcgcgcgtatacatgcatgcaaatgcatgcatttgcgagaggtatgtgtatgggcagggtctcactatgtaggtctagatggcctagagctgacctctgctgggattaaaggtgtgtgcctgactatatcttcctctatttttattgttttgagatgaatttcaatgtgaaggttggcctggaactcactatatagaccagaccagtcttgaatttgtagagatcccacctgcctctacctcccaagtgctgggatcaaaggcatttaccactacgcctactagactttcttgagttacatggaatatgttcctgtaagttagtatttgaatactgaactccctatatacaaaagttgcatagtatttatattttaggatttaaaatatgtagttctaggatactgagcactacatagtaagactctgtcctcaaacaaacaaacaaacaaacaaacaaacacaggtagagtagcccatgcctttaatcctagcatccaggaggtaaagtcaagaggatctctgtgagttcaagaccagcttggtttacatagtgggctctaggctaattaaggattcatagtgagatacaaaccaaataaagaaaacctagaaccacaaaacaatttggcaagtctggtgttgctcccagtcataaacaaagccgccagtggtggagcataccttaatcccagcattggtgaggcaggggctggcaggtctctgagttcaaggccagcctgggctacagagcaagttccaggatagccagggctacacggagaaattctgttttgaaaagccaaccaaccaaccaaccaaccaaaaacaaaaaacaaaccaaaaactacaggttaaaaaaaaaattaatgagttgaaaaaagaaaaaagttaacattctaagttattccttatttgctttgacatttatatacatatgaacaattggacttggaaagaaaaggagccattagcttaaaaagatacaagtaataaggagtactaaaagccagctaacccagattcccaaagcagtgcctgctctgaccggaagacattggtggagaggcctgtgctggtggcatccaggctctgtctgcatccatgcacttacctctatattcggtggaagttcaataggctttggcttcacatctatcaggtagaaggtgcgcgacaggagcaaaagagaaggagggacgttctccttcaagtggaggtccagccactagggaatgggaggtaacaagacatgttgatatagactgctgtacctcaagaggacctgtttgtcacctatggcttccctggcttgcagctgttcccagagcacactgatgataacctctggcacaggacgaaagcaccagcctcctggcttctacctctgggcaggtacccagcaaccactcacactcgtcactcaaactctctatccagttttgcatccagatagctaagtgtcttctcttagcagaaacagatggctagaaaggataacccagaagccaggcacaaagtaaagaagtcagcattagaatgaaggtgtgatgtgagttttaaagcaccacaatggccaagtgttttgtctgtctttgtgtttaattttgctgggtagcccaggtttctcacctgtgatcctcttgtcccaaagctcctaagtgctgggattacaggcatgggccaccatgtcacaactgttctgtaaatgttacgtaatgagtgacacatattgctttgtactttgcggtgtgtgtgtgtgtgtgtgtgtatgatatgcatatgtatgggtctgagtgacgttcagaagacacctttgaggagggaccctgtccaccaccattgggtctagaaactaagctggggtttgtggcctttgacagacgagccatcttgccagcctttgtcccttgcagttttgtccccactgaaacagaatcatgtcagcagctgtagtactaaccccttaagtatctggctatgtttccattgtatacaaatgccatagtctcagtgctaaggaaatggaggcaggtagacctctgagctcaagggcagcttggtctgcacagtgagtcctagccaggcagggagatatagcgagatcctgtctcttaaacaaacagagcagaacagaacaaaatttaggataggggcagcagaggtggctcactggttaagagtgtgtactgttccacgttctactgcacactggaccgaggctcagttccagcacccacaccaggcagctcacagctgtctctggctccagctccagggacctacagatgcttctggctgccatgtcttctgttgcttttcagggcagggtctcctacgctctatgacccaggctggctggtcttgaactcttggtggtcctcgtgcctcagcttcctgagtgctaggattagagttatcagctaccaaggcaggcgaggtgtgtgcttatattttgaaggatgatgtggtttgtcttcacagagttttatttttcaggtagcaacgcctaagtgccctctacccaatctctaacagcctgaactttgctaatatgtgaatgtggcttatctctagtttcatttactttataagaaaggttaagatagccatatgcttactatttttaatatcttacttttttttttttttgagacaaggtctcactctgaagcccatgctgtcctaaaactcactatattgcccaagctggtctaaacccatggtaatccttctgcctcagcctctcaaccaatggactgccctctatagaggttcagcttccagtcagttagtgtattgtgctaagaggagaatggctccctaacatggtttccaagtgacaacactggcccttggtcccaaataatcttaacatgatacagaagttcttacactgataacaatgagaacctaatgggagctaattcttggtttttttttttttttttttttttttaaagatttatttatttatttattatatgtaagtacactgtagctgtcttcagacactccagaagagggcatcagatcttgttatggatggttgtgagccaccatgtggttgctgggatttgaactccggacctttggaagagcagtcgggtgctcttacccactgagccatctcaccagccctaattcttggttttttaatacactgctgctgctgttagaatacagtgtgctctctgatgggggtaacagacatctaccaccaaagccaacaccataggctgatttggagcacaagaggaagagtagccaaagtgggctctgagatgacacctgtcagcagagactgaactgacagtgatagacctgtgtgtgagaatttctgccaagaccccactttattttttagccaaattctaaattagccctaagatccaccatatacacaccttccagttattcaaacattaatctagctcagtggttctcaacttgtaggtcacaatgggtcaaatgacccattcacaggggtcacatgacccattcacaggggtcacttaagaccatcagaaaacaaatatttacattacaattcataaaagtagcaaaaatagttatgaagcagcaatgaaaataattgtatagatgggggccaccacaccacgaggaactgtattcaggggtcgcagcatcaggaggttgagacccgctggtctagatgctttatgaagggattttacagatgaaatggaggtcccatgtcagtctactctgagatatcgtcaaggtgggatttacctaatcacaagacctggaggcccaaaccagaagtccaaggtctaaggcatgagtagggactggcacatggcagactttacagatggaagcaggggccaagagggaaatacaggtggctcctggagctgagaacaagcgggctggcagccagcgaggagacaagaacatcttccttccttcctacagctgcagaaaactcagctccgccaacaaactcaaggagtttgggaatggatctttccc

SEQ ID NO: 423 - DNA, 3573 bp, Mus musculus
cggcgcacagcgctcggagcgctcctgcgggtactttggcggggctctccgctgcgggcggcgcggaacgggagccggaaccctggtgcagccgctgcgtgcagaggacccgggctgcgcagggaagcggggccgagacgtccggactggactgagactgtgcttagcgcattgcggcgacctcgcctttcccggccgcgagcgcgcgccgcagctggaaaagcagcggagaccgaggacttttctcaggtcccaggggcgcaccacagccgtgctgcagtcaatgcacgccggagccccaggaggggtgatggaactcgggctgccagaagcctgagacgccgccaccgccgccgctgcgtactggagagcggggggcgcacgatctggggaccccgggcggcggacccgagccctcccccccgccccgcctccggggcaccagcttcggctccattgttcccgcccgggctggaggcgcccggctcggagtgccgccgggagtcgtgcctcggccgcggagccctcgagaccccatcaggatctgaacggagcccggagacgagcggcgggagcgcaagacacagacacccgccgcgccacggcgagctctccagaggcgggaccgcagcgccaagtgagagtcagcttgcgaaggcagaccacgctcacggtggaatatccatggaggtacggagccttgttaccaacctctaaccgcagaactgggatgtggggctggaagtgcctcctcttctgggctgtgctggtcacagccactctctgcactgccaggccagccccaaccttgcccgaacaagatgcactcccatcctcggaagatgatgacgacgacgatgactcctcctcggaggagaaagagacggacaacaccaaaccaaaccctgtagctccctactggacatccccagagaaaatggagaagaaactgcatgcggtgcccgctgccaagacggtgaagttcaagtgcccgtcgagtgggacacccaaccccactctgcgctggttgaaaaatggcaaagagtttaagcctgaccaccgaattggaggctacaaggttcgctatgccacctggagcatcataatggattctgtggtgccttctgacaagggcaactacacctgcatcgtggagaatgagtatgggagcatcaaccacacctaccagcttgacgtcgtggaacgatctccgcaccgacccatccttcaggcagggctgcctgccaacaagacagtggccctgggcagcaatgtggagttcatgtgtaaggtgtacagcgatccgcagcctcacattcagtggctgaagcacatcgaggtgaacgggagtaagatcgggccagacaacttgccgtatgtccagatcctgaagcattcgggaattaatagctcggatgcggaggtgctgaccctgttcaatgtgacagaggcccagagcggggagtatgtgtgtaaggtttccaattatattggtgaagctaaccagtctgcgtggctcactgtcaccagacctgtggcaaaagccctggaagagagaccagctgtgatgacctcaccgctctacctggagatcattatctactgcaccggggccttcctgatctcctgcatgttgggctctgtcatcatctataagatgaagagcggcaccaagaagagcgacttccatagccagatggctgtgcacaagctggccaagagcatccctctgcgcagacaggtaacagaaagtgtcagctgactccagtgcatccatgaactctggggttctcctggttcggccctcacggctctcctccagcgggacccccatgctggctggagtctccgaatatgagctccctgaggatccccgctgggagctgccacgagacagactggtcttaggcaaaccacttggcgagggctgcttcgggcaggtggtgttggctgaggccatcgggctggataaggacaaacccaaccgtgtgaccaaagtggccgtgaagatgttgaagtccgacgcaacggagaaggacctgtcggatctgatctcggagatggagatgatgaaaatgattgggaagcacaagaatatcatcaaccttctgggagcgtgcacacaggatggtcctctttatgtcattgtggagtacgcctccaaaggcaatctccgggagtatctacaggcccggaggcctcctgggctggagtactgctataaccccagccacaaccccgaggaacagctgtcttccaaagatctggtatcctgtgcctatcaggtggctcggggcatggagtatcttgcctctaagaagtgtatacaccgagacctggctgctaggaacgtcctggtgaccgaggataacgtaatgaagatcgcagactttggcttagctcgagacattcatcatatcgactactacaagaaaaccaccaacggccggctgcctgtgaagtggatggcccctgaggcgttgtttgaccggatctacacacaccagagcgatgtgtggtcttttggagtgctcttgtgggagatcttcactctgggtggctccccataccccggtgtgcctgtggaggaacttttcaagctgctgaaggagggtcatcgaatggacaagcccagtaactgtaccaatgagctgtacatgatgatgcgggactgctggcatgcagtgccctctcagagacctacgttcaagcagttggtggaagacctggaccgcattgtggccttgacctccaaccaggagtatctggacctgtccataccgctggaccagtactcacccagctttcccgacacacggagctccacctgctcctcaggggaggactctgtcttctctcatgagccgttacctgaggagccctgtctgcctcgacaccccacccagcttgccaacagtggactcaaacggcgctgactaccaaccctgtccccagttttctcccattccgtcgtcacccgtgcccctcacccacaatccccttgttggacacactgcctttctcctcctcctttgccgctggcaagagccagtgcctgactgaggccttcctgtgttgtggccttccccctccatcacccccaagacccctcttctccctcttcttagcctgctgtgtgagagaggagccaagaggcaggtgcttgccgacggccgcatcctccttcccaggtgttggaccaagacccgccccgctgcctggcactgcttggaggtgtgcagagcggaagcaagtggagcatccggggcattcctgttgacccatcagccccttctgttctggcggcaggggccttggggctcctggaagccgtgaggtttctgtttaggccttaaccgaaggcaacctctgctccagatggatggtaccagtagcttcttaattccaatactaatttgctttgctgaccaaatacctgcctggtaccagaagacagggaggcagagactgggagccgtgatgtgcccttgggctgagccctagacttggggctctgtacatagctatgaagaaaaacacaaagtgtataaatcttgagtatatatttacatg

SEQ ID NO: 424 - protein, 339 aa, Mus musculus
MWGWKCLLFWAVLVTATLCTARPAPTLPEQDALPSSEDDDDDDDSSSEEKETDNTKPNPVAPYWTSPEKMEKKLHAVPAAKTVKFKCPSSGTPNPTLRWLKNGKEFKPDHRIGGYKVRYATWSIIMDSVVPSDKGNYTCIVENEYGSINHTYQLDVVERSPHRPILQAGLPANKTVGSNVEFMCKVYSDPQPHIQWLKHIEVNGSKIGPDNLPYVQILKHSGINSSDAEVLTLFNVTEAQSGEYVCKVSNYIGEANQSAWLTVWVAKALEERPAVMTSPLYLEIIIYCTGAFLISCMLGSVIIYKMKSGTKKSDFHSQMAVHKLAKSIPLRRQVTESVS

SEQ ID NO: 425 - DNA, 3203 bp, Mus musculus
cggcgcacagcgctcggagcgctcctgcgggtactttggcggggctctccgctgcgggcggcgcggaacgggagccggaaccctggtgcagccgctgcgtgcagaggacccgggctgcgcagggaagcggggccgagacgtccggactggactgagactgtgcttagcgcattgcggcgacctcgcctttcccggccgcgagcgcgcgccgcagctggaaaagcagcggagaccgaggacttttctcaggtcccaggggcgcaccacagccgtgctgcagtcaatgcacgccggagccccaggaggggtgatggaactcgggctgccagaagcctgagacgccgccaccgccgccgctgcgtactggagagcggggggcgcacgatctggggaccccgggcggcggacccgagccctcccccccgccccgcctccggggcaccagcttcggctccattgttcccgcccgggctggaggcgcccggctcggagtgccgccgggagtcgtgcctcggccgcggagccctcgagaccccatcaggatctgaacggagcccggagacgagcggcgggagcgcaagacacagacacccgccgcgccacggcgagctctccagaggcgggaccgcagcgccaagtgagagtcagcttgcgaaggcagaccacgctcacggtggaatatccatggaggtacggagccttgttaccaacctctaaccgcagaactgggatgtggggctggaagtgcctcctcttctgggctgtgctggtcacagccactctctgcactgccaggccagccccaaccttgcccgaacaagctcagccctggggagtccctgtggaagtggagtctctcctggtccaccctggcgacctgctacagcttcgctgtcggcttcgcgatgatgtgcagagcatcaactggctgcgggatggggtgcagctggtggagagcaaccgtacccgcatcacaggggaggaggtggaggtgcgggactccatccccgctgactctggcctctacgcttgcgtgaccagcagcccctctggcagcgataccacctacttctccgtcaatgtctcagatgcactcccatcctcggaagatgatgacgacgacgatgactcctcctcggaggagaaagagacggacaacaccaaaccaaaccgtaggcctgtagctccctactggacatccccagagaaaatggagaagaaactgcatgcggtgcccgctgccaagacggtgaagttcaagtgcccgtcgagtgggacacccaaccccactctgcgctggttgaaaaatggcaaagagtttaagcctgaccaccgaattggaggctacaaggttcgctatgccacctggagcatcataatggattctgtggtgccttctgacaagggcaactacacctgcatcgtggagaatgagtatgggagcatcaaccacacctaccagcttgacgtcgtggaacgatctccgcaccgacccatccttcaggcagggctgcctgccaacaagacagtggccctgggcagcaatgtggagttcatgtgtaaggtgtacagcgatccgcagcctcacattcagtggctgaagcacatcgaggtgaacgggagtaagatcgggccagacaacttgccgtatgtccagatcctgaagactgctggagttaataccaccgacaaggaaatggaggtgcttcatctacggaatgtctcctttgaggatgcgggggagtatacgtgcttggcgggtaactctatcggactctcccatcactctgcatggttgaccgttctggaagccctggaagagagaccagctgtgatgacctcaccgctctacctggagatcattatctactgcaccggggccttcctgatctcctgcatgttgggctctgtcatcatctataagatgaagagcggcaccaagaagagcgacttccatagccagatggctgtgcacaagctggccaagagcatccctctgcgcagacaggtaacagaaagtgtcagctgactccagtgcatccatgaactctggggttctcctggttcggccctcacggctctcctccagcgggacccccatgctggctggagtctccgaatatgagctccctgaggatccccgctgggagctgccacgagacagactggtcttaggcaaaccacttggcgagggctgcttcgggcaggtggtgttggctgaggccatcgggctggataaggacaaacccaaccgtgtgaccaaagtggccgtgaagatgttgaagtccgacgcaacggagaaggacctgtcggatctgatctcggagatggagatgatgaaaatgattgggaagcacaagaatatcatcaaccttctgggagcgtgcacacaggatggtcctctttatgtcattgtggagtacgcctccaaaggcaatctccgggagtatctacaggcccggaggcctcctgggctggagtactgctataaccccagccacaaccccgaggaacagctgtcttccaaagatctggtatcctgtgcctatcaggtggctcggggcatggagtatcttgcctctaagaagtgtatacaccgagacctggctgctaggaacgtcctggtgaccgaggataacgtaatgaagatcgcagactttggcttagctcgagacattcatcatatcgactactacaagaaaaccaccaacggccggctgcctgtgaagtggatggcccctgaggcgttgtttgaccggatctacacacaccagagcgatgtgtggtcttttggagtgctcttgtgggagatcttcactctgggtggctccccataccccggtgtgcctgtggaggaacttttcaagctgctgaaggagggtcatcgaatggacaagcccagtaactgtaccaatgagctgtacatgatgatgcgggactgctggcatgcagtgccctctcagagacctacgttcaagcagttggtggaagacctggaccgcattgtggccttgacctccaaccaggagtatctggacctgtccataccgctggaccagtactcacccagctttcccgacacacggagctccacctgctcctcaggggaggactctgtcttctctcatgagccgttacctgaggagccctgtctgcctcgacaccccacccagcttgccaacagtggactcaaacggcgctga

SEQ ID NO: 426 - protein, 428 aa, Mus musculus
MWGWKCLLFWAVLVTATLCTARPAPTLPEQAQPWGVPVEVESLLVHPGDLLQLRCRLRDDVQSINWLRDGVQLVESNRTRITGEEVEVRDSIPADSGACVTSSPSGSDTTYFSVNVSDALPSSEDDDDDDDSSSEEKETDNTKPNRRPVAPYWTSPEKMEKKLHAVPAAKTVKFKCPSSGTPNPTLRWLKNGKEFKPDHRIGGYKVRYATWSIIMDSVVPSDKGNYTCIVENEYGSINHTYQLDVVERSPHRPILQAGLPANKTVGSNVEFMCKVYSDPQPHIQWLKHIEVNGSKIGPDNLPYVQILKTAGVNTTDKEMEVLHLRNVSFEDAGEYTCLAGNSIGLSHHSAWLTVLEALEERPAVMTSPLYLEIIIYCTGAFLISCMLGSVIIYKMKSGTKKSDFHSQMAVHKLAKSIPLRRQVTESVS

SEQ ID NO: 427 - DNA, 76360 bp, Homo sapiens
attcagtaaaccaccaggcacggtggctcacgcctgtaatcccagcactttgggaggctgaggtgggcggatcacgaagtcaggagatcgagaccatcctggccaacatgatgaaaccctgtctccactaaaaatacaaaaattagctgggtgtggtggtgcatgtctgtaatcccagctactcaggaggctgaggcttgaacctgggagtcagaggttgcaatgagccgagatcgcaccactgcactccagcctggcgacagagcaagactccttgtcaaaaaaaaaaaaaaattcagtaaaccatactgtaaacagatgtgctgtcattcaggcttagttatgccatttactgaacacaagcagagtagatttagcataatttctaacagcaataggatttttgaaatggtaaatgaacactggcttcgacttaaactcaccagctgcattacctcctaacaagagagagtcagcctgtcctttgaagctctgaagccagacattgacttatctgtagctagaaaagtcctagattacatcttcttccaatagaaggctgttttatttacattaaaaaatctatgatcttagctagatcttctggatgacttgctgcagcttctacatcagcacttgctgcttcaccttgcacctttattatatggagatggcttgtttccttaagttgaagcagcctctgctaacttccaacttttcttttgctgcttcctcatcaccctcagccttcacagaattgaagagagttagggcattgctatggattaggctttggcttaagggaatgttatggctggtttgatcttctatccagatcacccaaactttcctccatatcagcaataatgctgttttgcttttttgtcattcatatgttcactggagtagcacttttaattttttttttttccttgatacagagtctcgctctgtcacccaggctggagtgcaatggcgtggtctcggctcactgcaacctcagcctcctgggttcaagtggttctcccgcctcagcctccagagtagctggggctacaggggcgcgccaccacacccagccagtttttgtatttttagtagacacggggtttcactatgttggccaggctggactcgaactactgacctcgtgatccatctgcctcggcctcccaaagtgctgggattacagatgtgagccactgcacacccagcctcacttttaattttttttaaagaacttttggctgggtgtggtggcttacgcctgttatcccagctctttggaggccaaggcaggcagatcacctgaggtcaggagttcaagaccagcctggccaacatggcaaaaccccatctctactaaaaatacaaaaattagttgggtgtggtgacacatgcctgtaatcccagctactctcaggaggctgaggtgggagaatcacttgaacctgggagatggacattgcagtgagccaagatcacgcagctgcacttcagactggggacagaccgagactccgtctcaaaaaaaaaaaaaaaaaaccttttcctctgcattcacaatttggctaatcatttggcacaagaggcctgcgtctgggcctatctcagtctttaacatgccttcctcactaagctcaatcatttctagctttggatttaaagtgagagacatggaattcttcctttcacttgaacactcagaagccattgtaggattattaattgacctaatttcaatattgtggtatctcaaggaataggcaggcccaaggaaagggaggggtgggggacagccagtcggtagagcagttgcaacacatatttatcgattcggttcactgttttatatgggtatgattcatggtgccccaaaacaatgacaataatgaaaagatcactgatcatagatcaccatgacagatataataataatgagaaggtgtgaaattttgcaaaaattaccaaaacgtgtcccaaagacatgaagtgagcacactcagctggaaaaatggcgccaatggccttgctcaattcagggttgccacaaacattccatgcttaaaaatcgcactatctgggaagtacgataaagcaaagcactggccggacgcggtggctcacacctgtaatcccagcactttgggaggccaaggcgggtggatcacgaggtcaggagtttgagaccagcctggccaatatggcgaaatcccgtctctactaaaaatacaaaaaaaaaaaaaaattagccaggcattgtggcacgcacctgtagtcccagctattcaggaggctgaggcagaagaattgcttgaatctgggaggtggagattgcagagccaagatcgcgccactgcactccagcctgggcgacagagcaagactccatctcaaaaaaaaaaaaagcaaagcaccatcaaacaaggtccatctgtgtatttctcagaaaataagctcacatgctcacatgcttggaaacctatcagaaccagacaaatggtgttaggaacagagcagcaaataattggcctctatctagccttagcaagaaacatcctggaagaactaaggggacttaacacccacgcagattactttctagataggcctgagaaatccaccccagctgactcagcaaagagatacctacaggcccccctcatctgctaaccaaaaccctatattggctgccgggcactgtcagggtatgcctggcttctcctgggctaggcaggcctcaaaaaggtgccctgaaagctctctgcactcagtggcatggaggaaaccaggtttcggtgaagacaggcagtcagaggcatctccagcccttccagaacccaaaccattctttagtcatctgagatatcaggagatcagctttcatgttgtccctctttctctttggatgactaagaaggcttttcttttcttttctttttttttgagaaggagtctcactcttgtcacccaggctggagtgcaatggcgcgatgtcggcttgctgcaacctccacctcctgggttcaagtgattctcctgcctcatcctcctgagtagccgggattacaggcacgcgccacccctgtttctactgaaaatacaaaaagttagatgggcgtggtggtgtgtgcctgtaatctcagctactctggaggctgaggcaggagaatcgcttgaacccggaaggcagaggttgcggtgagctgagacggcgccattgcaccccagattgggcaacaagagcgaaactctgcctcaaaaaaaaatcactattattattattattatcattattattatattttgctgattagaaaactagtacaagatcagggccagggtgccttggagcacattggaggaaggccacttcctctgggcagaggcagccgggcagtagcacacaggattccagcccagggcctataaaaaaaactcctctcaaaaaagtcaaacaatgtaaaggtacataaaaaatgggccaggcacagtggctcatacctgtaatcctagaactttgggaggccaaggtgggaaaatcacttgagcccaggagttcaagactagcctgggcaacatagctagactctgtctctacaaaaaattaaaaatttaaaaattggccagccatagtggcatggacctgtagtcccagttacttgggaggctggggcaggaggatcacttgagcccaggagttcaaggctccagggagctgtgatcacatcacttcactccagcctaggcaacagagagaggtggctcaaaaaaatagagcctggctcaaaaaaacaaaactaaaccgaagtataagcctcttacaatcgcattcccaaagaaaaccactattaaaaatttggttaactattttgttttgttttgacagaataataaaattcagttagggggaaatttaacctgaatgggagaacaccatctatttttaaattatcttcctctctgaccctacccagcccaatatcgccaaaggttcttaacaacccaggagaagtcagctgcaactttattagcatatccttggatggaatccgcatcaaagttgaatcctcaagtatctcagcctaaccctgaaactttgatctttgtacctaggcagggcaaagcctaaggaactaggtccttcactcttgggggtggagggcggtcctcagaaatgcaaatttttcactgttctgccactgcctcctctgtcacctctccagaccccagcccttggatgagtggctttaaccaggagagggtttacaagtctgtgtcagaaagaggagagcctttggagaaccctgaagaaacacagaggacagaagaccagcttgtttgcatttagtgttctgaagggagtcagaatcctagaccagcgaccatagctggaaggattcgctgaggtttaatagggccccttagcttccccatatgtgttcttgttgtttttctcttatttcacagtaaaatctataacaaaaagggctgtttatcttggggtacaccaaggaagagggagatgagggtgaaaaatatatccttttctgcagctggtgttggggaacagagaatccagggtggaagtgggggtagagatggtaaatacataagaaagccacaaagaaggctgggtgcagtggctcacacctgtaatccctgcactttcggaggctgaggcaagtgaatggcttgagcccaggagttcaagaccatcctgagcaacataaggagactatcacctccacaaaaaaatacaaaaaccaactgggcatggtggtgcatgcctgtagtcccagctacttgggaagctgaagtgggaggattgcttaagcccaggaggtcgaggctgcagtaagtcaagatcgtgccactgcactccagcctgggggagtgaggaaccctatctaaaaaaaaaaaaaaaaaaaaaaagccacaaagatatgcaggctccagaaggtgtcttccatcaaaggaaagttcctgggctaaaaaataataataacaacaatgactaccatttattgagcatttacaatgttctgggcgctttgccaagtgcattacacacattttctcatttaatcctttcaacagtcctgggaagaacagttaccattgttatcttcatttcaccattgagcaaatgcagtggagctaactagcttgcccaagatcacacagctagcaataagtggcagaatcaggacccatgctcaaaactgtttgaccccagagactaagttcatcccttcagagcaaaataattcgatgcttcagtgactaccaactgtctaccccccacccccacccctcaacacaaactctccaggcttgctttcctcagctatcccagatgagtttgtggattttcacattgccatctttcaagattcaggcatcgcttcccctgagtcatcttccttcctgatctctccttccacagccccctgcagatgcccccgggtggcactacgtgtcatgtttggtctcccccacaagacaagtgaggtcccccaggctgtgcactcatctctttcatcttcggatccactgtgcccggcacagcgcctgacacacaagaagtgctccctgacacccccaggctccgtgaatagatgtggcattcaggccagacagagctgagctgccacacagctcgctccctttctcactccaaattggcagaagagagtgaatgttatttacaaaaacaccaagccaaataagaccctcccttccctgacatgctgaagctgctctgggaacagacaggggtcaccaaatggtggccagatggtgactgactgctgctccctaactccaggggcctggggcaaaaggcttggctgcccacctgctcccaggacctgtgaaccatccactttgtagggaaaaccccagacagttccctcctcccgaatccccttctgcaaccagctctcggagtggagactctgccagctctcaccacatcctggggactcttgaagcctgggctggaagttctgcaaccttgccccatgtcaatggtgcttactttacctgacttgttccataacaaagaattgttaattctgcagtatcgacccagggtagtggggtgatcattcctggtaggcacagctgagccctaaaataacagaacccagatagagcaggggcagaaggaatgtggggagaggggaagaggagctcccgtctgccagggaaaactctgaggacacaagtagctggaggaacagggaagggatttcctacagtgttcccaaacaaagagagctggccgggctttggggagagctccgtttcccttcgtttcattcagcagtggtctcctcctcccacagatgtgggaggcaacaggcccccaaccagttatcaggccctccagcatgagggcctttgtctccccttagacatgtagctggcagggcgaagggccgacaaatcctccctgaccctcccagctctttgttatctcagagggaaggttacatttctgtatgggaggcaaggtgccaggaggcctcgggcagaacagagacaggcagagctgctgtctgacccctgttgcctggagcagctcagggctgccctagggacactctccctccactggcctggggcccttccagaaatgggagggctacatttcagaaagagggcgagtagaggagtgggacagaaaaggagcgaggtgggctggaaggataaaagcagccaactctcaattattcagaaacctgtctgcagtgtgtggacagcccatgcctttgctgagtttctcaccttctctgttcagctgccatcagctctttccctgagaagtggaggagggaccctggcaagttggccacttgctttcattttggcttcttgataaatctatagaggatttttcagcagcaggcccatgtccctcaaccccaaacaagcatttagatcattatctttctgtttaaatcaagaacgcattatttagccttttatttggggttcaagatactcctacaatggttctaaatcataagaaaaaggggcttgatttaaaaccccttgttttgggccaggaatggtggctcacgcctgtaatcccagcactttgggaggccaaggtgggcagattacctgaggtcaggagttcgagaccagcctggccaacatggtgaaaccctgtctctactaaaaatacaaaaattagctgggcatggtggcaggtgtctgtaatcccagctactcgggaggctgaggcaggagaatcgcttgagcccagaaggcagaggtgagctgagtgagctgagatcgtgccattgcactccagcctgggcaaaaagagcaagactccatctcaggaaaaaaaaaaaaaaagaaaacaaaaaaaacccttttttgagaagaattacggagcaaagtagaaaaatagtagctgggtgttaacattaaatgctggatttttttcatggcttgtcttcccaatcatattccctcaaattgtgtttcctcctctggtaacccaggttggttatgcttagcaagtccatgaacaataaatatacatggaaaacctcctgtgtagaattggtcagacacctagataagatccttgccctaaagcagtttagaaaccagttagaaagaaagcagagtaaggaaaaccactaacaaagcacggtatcaactcagtggatagtcagcaagtgagcagggggtccagggactgacaaagctgggatgggcagggaaggcctcttgggggtagggtgtgagtatggccttcttacaagcgtgtgatgtgtagtaattaaaatgcaggaggcctaatgggtgggcagcttacataggagtataaaccaagcttgaccaggagctgaaaggttaaatggtggctcttaggggaaaaccctataaacagtggctgaagttcatttattcaacaaagatatgagttcttgtttctcattttttgttttgtattattttgttttgagacagggtcttactctgtcgcccaggctggagtgtagtggctggatcatagctcactgcagcctcaaactcctgggctcaagccatcctccttcttcagcctccacctccagctaatttttaaaaatattttgtagagacaagggctcactttgtttcccaggctggtcttgaacttctggcttcaagtgatcctcccgcttcggccacccaaagtgctgggattacaggcgtgagctgtaatttagttgtttatttactcatttgttcaacaaatacttattgaatatttgctctttggccagtcaagggatttcatgagtgtctactatgtgaataacactgtgttggccactagtctgtcacctactggtggattagaaaaatagcgcgaggaccattttttcttttcttttctttttttttttgagacggagtcttgctctgttgccaggctggagtgcagtggcacaatctcggctcactgcaacctccgcctcccgggttcaagcgattcctctgccgcagcctccccagtagctgggattacaggcaagcgccaccatgcctggctaatttttttgtattttagtagagacggggtttcaccttgttggcaaggatagtctcgatctcctgacctcgtgatccacccgcctcggcctcccaaagtgctgggattacaggcataagccaccgcacccggccaactcttttcttaaattagccagggaggcgtgggtgggttgggtgaggagttgggtggggggatctcattcagtattcaaacttctacaagtttcggggttgaggtgggtgatggtaagggaacaggccctgccactacctttcatagtgacttccatttgtgtaatatttttggtccactgagagctattattttatttgattcttatgaccatcttgtgaaggagtatcaacagataccccgttttgattttatcagatgcatgatttgtcctacatcaaacttcataaatgatggacagaatggaggaatccttcagaccaagtgctgcctacttcccaccccaatggtggcctcagcctgggctcacatcacacgccccaaggagccttggaaaaaataaaggctcttggctccttcctgggacagcgtgattcctcatgtctgagcaggcccatgaacttgtatttttcagacgttccctaggacccgtgtccatctggattagggaaccactacattataccacttcgcgggaagactcagggggaagcattttagccactttcctgtgttccacagtactggagggtgttctgagtgggctgtgattaatttccaaaccaaccacacgtctcccctcaactcccactgcttactctttgcttcctagacattcactgcaggctggagacttctggaagccaacagcatcgctgtagaatttacagggtccagttcccggtggaccacaaaacctaaattatgtggctggggaaagctgaaatccaagggaagggtttgaggaggggctgaccttataataaaaccggcttgtatttactaagtgttaactatgcgctaggccctcgttgacgcctcaactctatgtgaaaagcactattatcccccatttacagatgggaaaacagagatttagagcgcgaaaatcatttccccaaggcgcacagactccaaagcccacgctaccaggtacaacctcaaggctgcggcgtctcttcacctgccccctagcccccaaaccgctgctatgtctagggcctgacattccggcgccctctgggacgtgctcagatgcaggggcgcaaacgccaaaggagaccaggctgtaggaagagaagggcagagcgccggacagctcggcccgctccccgtcctttggggccgcggctggggaactacaaggcccagcaggcagctgcagggggcggaggcggaggagggaccagcgcgggtgggagtgagagagcgagccctcgcgcctcgccggcgcatagcgctcggagcgctcttgcggccacaggcgcggcgtcctcggcggcgggcggcagctagcgggagccgggacgccggtgcagccgcagcgcgcggaggaacccgggtgtgccgggagctgggcggccacgtccggacgggaccgagacccctcgtagcgcattgcggcgacctcgccttccccggccgcgagcgcgccgctgcttgaaaagccgcggaacccaaggacttttctccggtccgagctcggggcgccccgcagggcgcacggtacccgtgctgcagtcgggcacgccgcggcgccggggcctccgcagggcgatggagcccggtctgcaaggaaagtgaggcgccgccgctgcgttctggaggaggggggcacaaggtctggagaccccgggtggcggacgggagccctccccccgccccgcctccggggcaccagctccggctccattgttcccgcccgggctggaggcgccgagcaccgagcgccgccgggagtcgagcgccggccgcggagctcttgcgaccccgccaggacccgaacagagcccgggggcggcgggccggagccggggacgcgggcacacgcccgctcgcacaagccacggcggactctcccgaggcggaacctccacgccgagcgaggtaagagccgcggcgcccccggatctggggcgggcttggcgtcccgagcggcccccggcgccggagcctcccggctgcgcgctttgcccgccgcagcccagccggggccggcgcctccctccgctcgccgcccgcccctttcacctcctggctccctcccgggcgatccgcgccccttgggtctcccctcccttccctccgtccgcgtctcctgcgccccctccctgcgctcgtcccgccgctcttcccgccgcccaacttttcctccaactcgcgctcgggagctggcgaggcggcggcggctcctcagtgagtcccgggagggacaggcccggggcgaaggcggcgaggcccgcggtttcctggactggggaggagggcgggagtgggcggcgaggtgggatgcgttgtgtgtgttatgtgtgtgtgttgcattccactccatgtctttttggtccccttttggggattcacccccaattcagcaggtagctttgggctcaacgctaaaaatccggggcattcctaagtccttttccacccccgggaaagcctggggtgcgggttggggtcggatggggtgggagatgaactgcggaggacgtggagggctaggttagcttctcttggaataggttttaaggaggtgtcgtcaccaaatggctgaatctgcttgagctgagagcgaaaaacgactcccctttccagaaggggtgatcttatgacttggacggtctctgaaagggtcggaagtttggggaacgggaggacaacccacggtcgttaagccgaggtgtgggatgggggcggaaggaccgttcggtcccaatctggttcctagaggtgggggaagggatgagggtttttgtccggtgtggttcactcggcagcgatgcgtatgcttctctggcccagacccctctgcacctcgcttcccctaccgttatgtttggggttgggagaaaagtgaggctacgacccatgtttgcggaggaattttatggaccttgtagatgggggttcatatagaacacacaccccctatgaggcagccagacacttttttggtggtggtggggggggggtggggtgtgaagcctgtttcttgttctgagcccagaagctatcaacccttttgaaaaacattaccacggtgcctttctcccccagcactcccccacccccaatttccagatgtagcagccgcatctggttccgtttcaccccacacgggtacaccgcagccgcattattaacttccctcttcctcccctccccctcccccaaattaaaactcagattcttcagcctgtcttgaccacctccctccttaacatttctggagacttggagatgcggcgttgagattcgggggagaaaagaaagttcccttggatcccgagttatttaagatctcaccaagttattcgccgccgctggtgggtggcggcggtccgggtgctttctggattgcgcagtaaagaggcatcttgggagatggggccaaggttttagggggtgccactcgcgaacggttcatccgctagactaggggggctctttggctgtgcgtctggccagaactggccttgacgatggaagtttctggaaccaaagcgttgctttctctcccttgtgttatagctggagctgcgggagcgcctgccctgcccggagcccgcggtcccctctcggctgccccgcggtggcgtcacgcgcccctcccggagcaagcccggtgcgcagggccgggggcgtgggcggctgctgccagaggcgctctctgtgtgtttttaaggactgatttgggccgcatcccccggaaactaaagtggggtgttttaccgtttaaataacggctacaggtttgaaagcggggttggattttcgagttgtgtttggtaatagtctttgaggcaggaaagcgccttgtggtccaaagttgccgggagggtggggagagtcggtgtcttacccgcttctttccagcctctttcaaattgaaaacacttctctggtttccttctttgggcggtagttttggaggctgtaatgaaatcgcactttctctagacgtggtaattaaggtgactgtttcctccgcagatgtgccctaccctttgcacctccggaccagcgctttttttggaatactatctagccttgagactgtttagcagaaagtggccattttcctcccttggcccgggctcccggtttcctccctgaggcttgtttaaaagcgaagtagcagggccccgtgggacgcgccttggtctgggtaatcacccccacgcccgggtcatccaccttcctctcggtgaccgaggttcagcagcctctgctattgccggccgtctttgccgatggcctgcctccctaatgacttgtttacatatcctacccccagtgggttaggagaagctccggggctgccccgaccctccgagtgcagggtgtttggggaccgggaggctgctggggcctgactccagctgggagggttatgaactgcatcagtgacgagctgcttgaaatatctgttgcatttactcttagtcatagctgagtgtcagctttttaatgaggttcatccagattgagagccacttggactgcgtacttcactgcctgcttttccaaacatgcctgcagaaatgctcattttcgaggtatttttcccaatgggaattcaggccagagtgggcaccacttgaacaatcttagggtgcttcttttccttggcctctggccatggagggtgttagacagttccattaggtggccctttgatagcaagggaagcaaaggctcaggaagaaatggagaagcgtcccccactccctaggggcagaggattagatacatcggtgcatccctcaggctgggctagctttattcctggtggactccagagggcaagaaaattgaattgaacactgggtaggcagattcaagccttagagaccaaggaaaatccatgggttttgcttttagtggtgtgctctttgttttcagtattgacctgaaacaagactcctaaaatgagagatttgctggtatgaacttgggggtttagcagccggcttctacaaaggcttttttcttgccttcgtttctaaagtgtctttcgtcaaaatggctgttagttacagaacatcctagcaaagtttgagcctgttgctgctggaggaaaaggagttagaattgattcaaatgtcttattctgaaagggcctcacatcacttgatagtttaatttcctcctgggaaatttgtgtcttacatttgtcttccccagagctttgtaaaaggcctgaacgcaccagggactagtgggagcccagatgcagagctttagagaagattctggtgtttccagagaggatgaaatgtcagacttgggctaggatatttgtttttcctcctaaggttgcatctactttaaacagaaattctctcctcgccaccatttatctctcccctgcaatgaaagaaaccatgtttagggccctctcccccatttaatagccctcacatggatgaactatcccaagaatttggtggggttccactcatagtacatcctgtcttcaagagcaaggttttctagattatgtgcagcagttcgtgtttcacttgttgctttttttttttttttttttttgagatagtctcgctctgtcgcccaggctggagtgctgtggcgctatctcaggtcactgcaacctccgccttccggttgaagcgattctcctgccccagcctccctagtagctgggattgcaagcatgcgccaccatgtccggctaattttttgtgtttttaatagagatggtgtttcaccatgttggccaggctgggcttgaactcctgacctcaagcaatccgctggcctcggcctcccaaaatgctgggattacaggtgtgagccattgtgcctgaccacttattgctaattttttatatgtctcttacttccaaggacatttagacactttttttttttaaagagactcaaaaaattagcatttccattggaccaactaaaatttagcaagctgagctgagtaactttctccatatgtttattaagtacttgccccctgccctctcaacatgtgagtagagaatggtcactttggggaagaaataagtcttattctcatctgaagggattaatgttttggtgttacttcctcaattctgaagaaccaagttgtccagaaattttctcagggttctttggactagagtttggctggttaacaaggggtactacctaattgcttttctctgatattctcagcctctttttctggaggagtatctctgtcagtttcttttcatcagcccttttttttccttcattcacttactcattcatccagttaacaaacatgttggcatctcctgtgtacatgctaggtgccgagggtgttagcaaaggttagggaggcacagaccctgttctgaaggagcctgcagtttcgtggggagagaagagaatgaagaacataaataacaatcatataatatgacctaagtgctatgtgagaggggctagtaatgtggtttgcaaatttggaggaatgaaattctccagctagaaggcccaagaaagtcttatggaagaaacagcttcttaaggtggggttcagagaaaagggaagggctggcctgttgcagaacaaggaatggcatgaagaaagtcttgcacagaggcatggatgttgcttcgagctgtggcgccctatagaaatagaacatgagcagctggtcacagtggctcatgcctgtaatcccagcactttgggaggccaaggcaggcggattgcttgagcccatgagatggagatgagcctggacaacatggtgagaccctgtgtctaccaaaaaatacacaaattagatgagtatgctcgtgcttactggtagtcccggctattcaggaggctgaggtgggaggatcacttgagcctaggaggcagaggctgcaataagctgtgattgcaccactgcattccagcctgggggacagaggaagaccctgtttaaaaaaaaaaaaaaaaaaaaagccaggcacagtggctcatgcctgtaatcccagccctttgggaggccaaggcaggtggatcacctgaggtcaggagttcaagaccagcctggccaacatggtgaaaccctatttctactaaaaataaaaaaattagccgggcttggtggctcatgtctgtaatcccagctacttgggaggcaggagaatcgtttgaacccgggaggcggtggttgagccaagattgcgccactgcaactccagcctgagtgacagagcaagactccatctcaaagaaaaaaagaaaggaagaaagaaatataacattataacatgagttatgtatatgttcagattttctagaagccacattggaaattaagttaaaagaaagaaataggtaaaaaaaatttttttttttgagacggagtctcactttgttgccaggctggagtgcagtggcgcaatctcggctcactgcaacctctgcctcccgggttcaagcaattctcctgcctcagcctcctgagtagctgggactacaggcgcgcgccactgcacgcagctaatttttgtacttttagtagagacggggtttcaccatgttggccaggatggtgtcgacctcttgacctcgtgatttgcccacctcagcctcccaaagtgctgggattacaggcgtgagccaccgcgcctggccaatatttgttttttaattaacttgtttgtttagattttatttaatgtaactatatttccaaaatattatcatttgaacatgtaatcaatatagaaattattgatgagatactttacatttttttcataacaagtttttaagatgcggtgtatactttttacttatagcatatccgttagcaccagccacatttcaagtgtgcagtggccactgtgtgggccacaggtctagaatataagacatgaagatggagagtgagaaatgcctttggaaaggttggaagttcctgtccttctgctgccaattaccaaatctcctgagagtgctattaaggagtgactcaaagcactacacaaagagaattataaatatcttaatattatatctgaaatccaaatgcataattctttacatttggttggtactttagagaggagagaatgggcacagtcacccacaccacccatttgagcctcataatcacctgtgatgtggcttcctctaggtgggaaaccgaggcttagaacggttaagtgactatcccagggtggcaagatcataagtggaagggtgtgaattcatactgtctccagcggacaagaataaaaagacccaggctgggtgtggtggctcatgcctgtaatcccagcactttgggaggccactgtaggtggatctcctgagcccaggagttcattaccagcatgggcaacatggtgagaccccatttttattaaatatacagaaaattagcccagcttctcgggaggctgaggtgggaggatcacttgagtctgggggatggaggttgtagtgagttgagatcgtgccactgcactctagcttgggtgacagagcaacactctgtctcagaaagaataaaaagatttggccatgaattcgtcagctagttttccttacataatttttggacaaggagatctgacattcataggtttttctcttagaagtgggagagcttcaaggtcacgtggtccgtccagcccctgctatctcaccagacactgtccaccctgtatgttggatcagtactccagtgagaagacagcaggcactttcacccatgcagcccattcagtcttcataaccacctgtgatggaggcaaggcaagtatttcagccccctctgatgagtgggaaactgagatgtgccccctctctgctccccaccgaggacctctgcatgcaggcatgaatcccaggagcctagctgatattggagagacggggcggggggaaccagctgcagggtcttggaggaagctgctgtgtacacctgcaaggctgcaggttacatctatctgtcaagcagtgaaggaaggaagttgtttctaagggattggaaaaattcattaattagtagaatgagaaactgaggtgaagcaggaggtggcagggtcccagacagcatgttggactagtggcctgtgtcactgtgttttttgcaggcgggtggcatggggtgtatgctgacttcttattccaggagttggtgccaggaggccaggttttcttaacatccttgttttacagatgtcaaacttgagggccagaggggtaggagaggaagagactttttgtaccttttttgggaaagaacaagagggaagctggcagatgaatttgaagtgcattgaccagggagctgagagagggcggtctgcagccagcccacacctgggaggaggcggcaggcttttctggggacagagtggccaagtcgaagcaagcttaaccatctcaacatgacaccactctttcccattggaacctgagaacttgttcagtattctgacacttagcaagggacctgggttttcttggtcaggtgtgcgtttctgggtgacaggcctgcatcaggtgtattttcgggatgtagtaagttgtggaatatgggtttaggggcatcctctggcaagcactgcttctatcccagctctgggaatgtgccccatgcagtgtcctagatggcccatctgtggtctgcttccaagggtctttcttttagttagttagttttgagacagagtctcactccgtcacccaggctggagtgcagtgatgcaatctcggctcactgcaacctccacctcccaaattcaagcaattctcatgcgttagcctcctgagtagctgggattacaggcgtgcaccaccacacccagctaatttttgtatttttagtagacgaggaatttcaccatgttggccagtctggtctcaactccccacctcaggtgatactcccgcctcagcctcccaaagtcccgggattgtaggtatgagccaacatgccctggcacaagggtctatctttgaccaatggaactgcaaatcaagcctcttttgttaccagagttaccttggatttacccttatctacttggtttggataaattgagtttgcatcagatggagtcaggcttgatcaatcccttatttacttcctcccaccctgttctctaatatccaaaaaccttgaggcactattacatgctagctacatttccttgagtaaagtacttaacctctttgagcctcagtttctccattgcataaaaggaataataaaacttatcccccataagtttatagtgaggaatgaattaattcctcactatagttctaaattaattctacttagggcatccttggtacatagtgggtgttcagtattcatttcattttctcttttctgattcctttcgtaaaagtagaaaaatgaaagagaaatgttgacttctcttttgatttgaaatcattaaaacattttagtaagccttgggagggagctagtggtgtggcatgtgtatcccgctggccaagcacatgtgaacgaagccaagaatccaggggcttttctgccagccagcactgactcacttgcgaggggccctgcctggctcgggggaggcagggctgaagtaccacattagggcatgttccggggaagtagattctctgaataacttggatggctccctggagcatttaggacagaagccacctggaaaatagagatggtcacccccacgtagccttgacagtgcccagaaagtcttgtcacttggtaaatgttaacagctatgatccgttctttaagaccctggggagttttaagttttaccccaccagacctgagaagggtaaagggctgcagattctgttcttttaactggggccagtgtgagccatctttgactcagtgcttgcaatagaccttgattctgcagtgggacctcccaggcccccttgccccccgcaacttctggactcatatccgtcagacatcacttgtcaccttccagcatcagggagaactggatccctcctggctccacactcttaggctctttgtaagtagctggtgagggttttcttctctctgcaagggaggctggtagaactatggatgtgattcgtacaattttagagacaaaaagaaagtacccaggaggtcatttatttcagctgcttcattgcataggtcggggagttgagcatggagtccagcagctactaactagttatctctgtacctggcttccatttactggtccttagcttgttccgtgattcttcattgccccttatttctcaccagagggactggttggccctagatggagtggtctttttaaaattttttttttaaattttttgagacagagtctcactctgtcacctaggctgtagtgcagtgctgcgatctcggctcactgcaacctccgcctcctgagttcaagcaattctcctgtctcagcctcctgagtagctgggattacaggtgtgtaccactatgcccagctaatttttgtatttttagtagagatgggatttcaccatattggccaggttggtcttgaactcctgacctcaaatgatctgcccaccttagcctcccgaagtgctgggattgcaggtgtgagccaccgcacctggcctgggcagagtgaagtcttatgctggggagccatcagcatgctcaaacctcctgcaattgtagcacactttgtaaaactgtttcccacaaaagggcagaactatttgggactttcatgagaccattcactttgtagcacatactactttgaagtttataccttggaaaacctcatgatggtattcccaggcttgcacgtaatctgcactcaaaacatagctgtagaattgaactaaagcatccctctgtccaattaagacctataacctctctttttgagacagaatctcgctctgtcacccaggttggagtgcagtggtgcaatctcagctcactgcatccttcgcctcctggattcaagcgattctcttgccttagcctccgaagtaactgggactacaggtgcgcgccaccacgcctgggtaatttttgtatttttagtagagacggggtttcgccatggccaggctggtctcaaactcctggcctcaagtgatcctcccgcctcagcctcccaaagtgctgggattacagggtgcaccaccacacccagccaggacctatgatctaattcattgttggggtagcttcacaattttcttctggacgccttagtaagtccacactttaagcagccaccacatggcatactttaccttctgtttttcctttcccctcccctacctagaccctcctaacttttggggtttttttcctttcctcagggtcagtttgaaaaggaggatcgagctcactgtggagtatccatggagatgtggagccttgtcaccaacctctaactgcagaactgggatgtggagctggaagtgcctcctcttctgggctgtgctggtcacagccacactctgcaccgctaggccgtccccgaccttgcctgaacaaggtaaggtgctggctgggggcagcctggactcctgggccttgggaacaggatgggctgggagggaggtgatatggttgcaggtgatgtggtcaacagggaaggctccttcccaagtggagcaaagaactcccttcctgtaggagaaactctcaagatacctgggttggttctggtctggttataaacataactgacttcatcagaggttggggtcatgaaggctggtgacatccatttacctgagatgacatgtttgtggggggtaatttatgcttttctctttctgaggaaagaatatctgatgaggaccctagtgtcacactttaacataggtgatgtataaaatgcagctggtggtgcaatggggagagaatgaccttagaatttgcgtgtagaacttgggtcagactacaggggatgttgtaggaggtgagagcttgctaaagacctctgacttccagaaaattgtttcaaggccacatcttcgccaggcatagtgggtcacacatgtaacctcagcactctgggaggctaaggcaagaggatcacttgaggccaggagttcaagatcagcctaggcaatatagcgagaccccatctctacaaaaaaaaaggaaattaactgggtgtgatggtgcacgctgctagtcccagctacttgctactcaggaggctgagacaggaagattgcatgatcctaagagttgaggctgcagtgaattatgattgcactactgcgctccagcctgggtgaaaaaaaggcacatcttctataagggtcagcagtcatggcttcacgcctgcattttcctatccttaactgtgtctcacaggttctgtttgggggcctgccaagcgatttgctttggataggtactgtttgaggggttttgaagtgattgagacccaggaagcataaaggggcatggagacctatggcgtgttggaaattcagagccatcatcggtaacaggaaggacttaccccaccattcttgggatctgtgtgagctgtggaaaggcctcttgggagattataggtacagaataccggtggctttcgcgggactttgaaaactaatgtatgagcatttctgctgccagaggatagtgtggttcgtgactcagtggctggtcacacagagaaggttgacacacagtgggtgaaaggttggaggtgcgcgtgatggggtggctgtgtgcaaaaggctgccactcagctggtcagggactcgtttgaatgatgagtgatgggtgagaatatgtgtcctctggatggagttggggatgaacagggaaagttgtgtgagactttatagaaggtgcagtggctagagcaggcatattcatgttgctgtcagtaacagaaccgaaggcaaggtctgagctggagcacggtggggacccaaagtgggagagactgtgtctgcccacagggagtttatggtcaggagggatgggcaagtacagggataagtaacacaagacagactgtgtttaaaccacccagtgaagttacaaccagaggtggtgggaatgcagaggaagaggggagcagagagcacctgagatgggcttgagttcagaaggggaaaaatgaagggccctccaggttgaacagcatgagtgttcagagacagcatgtatatggtttatggagaacggtttgcctggtgagtaggtagctctgggaaacaacacttggaaaaattggattgagttagcatatggaaggcttaatgccctgctaagaaaactatacttagggccgggcacggtggctcacgcctgtaatcccagcactttgggaggctgaggcgggtggatcacaaggtcaggagttcgagaccatcctgcctaacacggtgaaaccccatctctattaaaaatacaaaaaaattagccgggcgtagtggcaggcgcctgtagtcccagctactccagctccagtctccagctgaggcaggagaatggcgtgaacccgggaggcagagcatgcagtgagctgagatcgcgccactgcactccagcctgggcaacagagtgagactccgtctcaaaaaagaaaaagaaaactatacttaggccaggcgtggattatgctggtaatctcaacattttgggaagccgaggcaggaggattgcttgagccaagaagtttgagaccagcctgggcaacatgatgagaccctgtgtctacaaaaaatagaaaaattagccaggtgtggtggcacatgcttgtagtcccaactattagggaggctgaggtgggaggatcacttgaacctgggaggtagaggttgcagtgagccatgatcacaccgcttcacttcagcctgggtgacagagtgaaactctgtctaaaaaaaaaaaaaaaaaaaaagcaagaaaagaaaactagacttaaatgggtagatgctgggaaacttgaaaagtttttagcaagtagtgacactatcagctttcagaaagttaatttggcagctcagtgtggatggctgggaggaaagagtgaggtgcacctgtgtttgcatcctgctctgccacttgatagctgcattatttacttcaacaaactactcaaacaccatacgtcacagtttgctcatctgtaaaacagggataaataataaagggttaagtggggtaatccagatgaagcacttccatgtaaggtgttaatagttgctattgctgccactgctgctgccagaaggatgaggtcgcaggttattttgagtgtctggctagaggaagtgcaggtactgaccaggatggggactgggagatgatagaggaaggaaaaagtagtaaagacactacagcaatagcatctgtgggtttaagtaggttgggtgtcaactgtgggcaactggagactgagatgagagtgtaaagggagtgagtcagagtgggaggtttgaggggagtttagatttgaatccgccaattgtagacagcgataaaggagtggaagagtagcaaggagctagttgaggtttgagaatgtgaatttataatggagcctaaagtactttcttttttttgcagcccaagaagggagaagtggatctcgggcctggctgcttgtgagccagcccgacgggatgagtataaggaactttagggccagggtgggggtgctagtagaggagggggcttcacggaagctgctggggcagggtggaggctggaacctgggggctgaagatcttgatgaggacaaagtaccggccctgtgaacagaagaaagggagtaagagaggtggatggggctcttaggagccatgtacccaggaagactgacattaaatgaccattttttaaaaatcaacttaattttcaaaggcacattggctcccacctataatcccagtactgtgggaggcagaggcaggaggatcacttgagcccaggagtttaagatcagctgggtttgtttgtttgtttgttggttggttttaagagacagagtttcactctgttgcccaggctggaatgcagtggcatgatcttggcttactgcaacctctgcctcccaggttcaagcgattctcctgcctcagcctcctaagtagctggaattacaggtgctcaccactatgcctggctaatttttatatttttagtagagatgggtttcaccaggttggccttgaactcctgacctcaagtgatctgcccacctcggcttcccaaagtgctgggactataggtgtgagccaccacacctggccaaaccaacttaatttaggtataacagtttgggctattgtaataagactgctgtgaaccttcatgtgcaagcctgggtgggcacacattttccttggactgccctggttttgattttggctccacaccttactgactgttggctcttggggaagttcctctttgtgcccttttataaaatatattgataatgaatgtgtgctcataaggtcattgtgaatatcaaataagcatgtctgcagagctcataggacattgcctggtccgtaggccatgagcagtcaatggccgttgtgggtccctttccctgggcctccaggggagacggcacatggcgaggagcatgttgtttcatgggacacagcaacggaaagcccctgcacttggagaacaagccccaggtctctgtttggtggagtaagcccccgtctcagtgtgagtgtggtgctttcacatagcctgtctctcatgagctttgtgacagaacagagaactgctgtgcccaggacattctaaggggagatctggcttcatgctttgtaagctgtaaggaaccttgtaagtgtaaagtatattgcatagtcttgggcctgctgattattaaataataatgctgatattttttaattaattaattaatttatttgagacggagtctcactctgtcgcgaggctggagtgcagtggcgtgatcttggctcactgcaacctccacctcctgggttcaagcgattcttctgcctcagcctcccaagtagctgggattacaggcgcgtgccaccacgcccagctagtttttttgtatatttagtagagacggggtttcaccatgttggccaggatggtctcggtctcctgacctcatgatctgcccacctcggcctcccaaagtgctgggattacaggtgttagccaccatgcctggccaatgctgctgttgtcctaaaaaaaaaatcatagggcgagcacagtggctcacacctgtaatcccagcactataggaggccgatgcaggaggattgcacgagcccgggagttccagaccagcctgggcaacatagcaagaccccatctctaaaaattttaaaaattagctgggtaacgtggcacacatcggcagtcctagctattcaggaggctgagatgggagaattgcttgagagttgcttgagcccaggagttgaggctacagtgagctataatcaagccactgcactccagcctgggtgtcagaaggagaccctgtctttaaaaaaaagaagaaacacattataatctatgtattaagggctttgtccaaaaggtgagagcaaaccacctaaaaccctgttcacactgagttttccccatttaaaaggccttgctgtgattttaagtgtgtgtgtgtgtgtgtgtgtgtgtgtgtgtgtgtgtgtgtgtgtctgtgtgtctgtgtgtctgtcgggagcccctccccactgagcgcagtaccaacgcccctcagtctgcaagtgctcctgagggattggggagggcctggagtttctggctgtccttggaaagttgatttaataagggttccaggaaaaccagcctccctcccctctccctctccttcccctcctttggtttgggatcttacagagcctcagcttgtttcagatcaggctttgagagtggtgagggagttgtttggaaagactgaagccggtttcagatgataagccccaacattctgagcttgcagagggtgcatttgtctgtcttttgcaataagtcaagtcttggtgggcaaagccagtgagtgagtacaacactgcttgcaaggccactgctggtagttggggtgggggtcctgcccccttttcagcagtactgtgggttaaacaccccagtgctcagaaaacctgcagctcagaagtgatttaatgggctgagttttacagctcctcccacccacccagatttgaaggagtctggtggcttgttagaggggggagaggttgcacttaatggaaaaaccacacatttccattctggcctcaagccccctggatgccctgtgtgcaccacaaagcggggctttgtctctgtgttttgcagaaacctgcacctatgggggagaggctgtgcgtggtgccagagccattgcctagcctcagatcatagggcccttgcaggtcctccatccctgggcgtctccagctgcctttggcccaaaggggtgtgcgtttcagcctggctgcagggagagtctcaaataggtactacaggtttggtagtgggacaccctctgttccactatcagacctgtagtctagcatctacactggactgtggtcctgtgtcccaaggctgccttgggacacaggcaagaccctcccctactcccaccccatctccagcatgatttcttatgatgaaaagaacttgtttgcttctcattcaacctggatggtaagaggagtttcttcatcccctgccagaaggcgaatggaattccatggagcaaaaggtgatgtcagatgaccctcttgagaacaagggtggaggatttaggcctctagaaatctgcaaggtgctaagctcataacaggtttccccagaggatcagctctgtcccacttcccctggagaagtggctccagtgcctggaaggggtgtttgcaagtgttcagagctggacagggaggacccagccctcggcctgtgagagaatgtgaggacgctcacgtggccctcttgaccaagctggggcaagcgcagcaaagccactccgaggctgtgttcttggctccggcttctgcattgctacaccattagcttcactgattttccactctggctctgccaggcccgctccctgaagtcagggaggaggaatttctcagggaagaacaaatggctgtccagagatcttgctgccagtgggggaagggagggatcccaaacaaagactctgtcagggtttccatcacctggttcctgtgactacctggagtcgggtcagcaggaactggagagacagcatcagggattctttgggagcctgtggccccagcacggaggggtgtttgctcctggccaggcagaagcagtgagtgatggcttgtgtctgggcggtgatgaatggccctgggagaagtgagtcctggggagtcattatccgggagggcgaggtctggggtcagagagcccgaccagcagctggccctattttcacaatgcctcgttcctccggggccactgggggctccagctcaccctgtagacaccacctttgcctctttcttccttccctgaggcttggaaatgagacaactgtttccctgttgaccggggaagtccagctgctctcattctcctgggctcctgaacggggcggcccaggccttcctcctgggcctggctctttcaccaacttgcaggcaggcaatcccttctccccacccaccatactccccagccccactgcaccctaaataattaagctgaaagctaactgccctacctggatctgaagggcctgggctaaatcccaaactgtttcctcctaggagaagcctgctggagtctgggccacttctgaccttggggtttgctctgacttacagctggtggcagccaagtagcagggccaattgccctaacccctcctccccggtagtgggcctgttgcctcttagcattgccagtgtggcaccaagagacattgaacttctaccctcagagttccctcccttctcctgtttcttggctcacaacagttcttgcctttccacttgccaaacaggtatctactgccttcatgtaaagcatttgtgccctgcaaactaggggctgtggggtgagggctccgtgtagctggtttcaggcactgagaaagatccaccctggcagagcttgaaactccacgccctctcctcgttcacatgctgtggcgtggctgagcctcccgggatgggttgtgtaaaaggtggggtgggggctgtgccatttgtgttcccaggccctggacatggagacacagggagcctgaagtgggtgagagggtcaaggagttccgcaaagagtagacttagtggttacgaggttgggcagagaaagaggtcagaaacagcaacacggaggtttctaggagttaaccaacagtgaacattgaattcagagcttagcccttcctcacttttctctaggatcaaaaactagcttctggctaatggtccattcattgactgattttttttcactcattcatttattcattcatctagtcaagcaagtctcttcctttttccgtaaatacaatgtatactttatacattgttttatcctagtcccttagctggaaatatctgttcctgtccttttcttccttttcactttttataattcctgctcaaatcttagtttaaggtttagcttgggtttagattaaagcttaacttaagggccacctcccttttgaagccttcccctatctccaaattaattaccccattttttctctttttcttttttctgtgttttttttttctcctgagacctagtctcgctctgttgcccaggctagagtgcagtggagtgatcatggctcactgcagcctcgacctcctgggatcaagcgatcctctggcctcagcctcctaaagtgttaggattacaggcatgagccaccatgcccttttgagatgtagtctcgcttagtcatccaggctggagtgcagtggcgcgatctcggctcactgcaacctctgcctcccaggtgctagcgattcttctgcctcaccctcccgagaagctgggattacaggcacccaccaccatgcccagctaatttttgtattttttgtagagacaggttttcgccatgttggccagtctggtcttgagctcctgacttcaagtgatccacccgcctcagcctcccaaagtgctgggattacaggcgtgagccaccacacctggcctctttttaactttcattctaacacttactttactctgcctcacattatgtggagtttttaatagatgtctgtttactccactagagcaaagttctctatagtcagcaagtatatctttatcactcttttaaaaacattagtgtttaggctgggcgcggtggctcactcctgtaatcccagcactggccagcctggcgaaaccctgtctctactaaaaatacaaaaattggccaggtgtggtggcacgcacctataatcccatctactcaggtggctgaagcaggagaatcacttgaacccgcgaggcggaagttgcagtgagccgagatcgcaccacttcacttcagcctgggcaaaagagcgaaactccgtctcaaaaaaaaaaaaaaaaaaattggtgttttgttagataatctgggttcatctttcaaaattcagaaaatacagacctgtaaagaggaaaaggaagactcctataattccatcattcaaaagcaatcactgttaactgaatttattgttttagacttttttcttgcatttatgtaaacctgacttttcagaattaggatttatactgtatacgatgttttgtgactgatatcagcatttagagccatacagagaatgtttttcattatgcttaagaactacataatgttccattgtgtgggtgtacaaagttgatccagttctctacatttgggcatttaggttattttcaatagtttgcattcaatagaacatattcttacaaataaaatctgtccatgtatccaaggatagttccatttgttttaagttttgattttatcactattacatcactataccaaatatcccccaaaagattataccagtaaatgtcttttaaaatataataataaataccagccgggtgcagttgctcacacctataatcccagcactttgggaggccgaggcaggcagatcacttaaggtcaggagtttgagaccagccttggtaacatggcaaaacccttctctactaaaaatacaaaaattagccggtcatgatggcggccacctgtagtcccagctactcaggaggctgaggcaggagaatagcttgaacccaggaggtggaggttgcagtgagctgagattgcaccactgcactccatcctgggcgacagagcaacgctctgtctcaaaagtaataataataaatatcatctccacactctgcatgcttgacattttcccatttttacaatgattccataggcataggttttatgaccataatcagatgagtaaactgaggtttgaggggttaagtaacctatcttaagtttatatagtgggtgaggggtggaactaggatttaaactcaggtggttctgctatagtatttttttcccattgtattacactatttttctatatcaaattgggtttccccacaaaatctaggtggaccaacttctgaatgtaaacattgctggctcagtcccctttgtctcacaggagtcaggcatcccctccctttgtcaggggtgtgtgtgtgtgtgtgtgtgtgtgtgtgtgtgtgtgtgtgtgtgtgtgtgtgtttgcttgcagtaatatctcctgtggcattctgtagagaggttacacatcagtcacaggtctgtgaactgccttaatgaacaaggttccctagcctagaataatcaatggaacaaaatccccatggacgctgccatttccactgttgccaaagacctacatggagaaggttcccaaggtgtcagatccgacacctgagttttctttataggtcacagttagcctagaatgtgtggtatgggtattgcctggacgcataaactagattgcttctaatatggatgtggtccaacaatctctgatgaatggaagtaaacatatcaaaagcttcagaggctgggacattaacatttttttgaggctactagtgttttttataaataatgaagaagggccaggcgcagtggctcacacctgtaatcccagcactttgggaggccgaggtgggcagatagagtgagctcagaagacccgcttgggcaacatggcataaaccccatctctacaaaaaatacaaaaaattacctgggcgtggtggtgggcgcctgtaatcccagctactcgggaggctaaggtaggaggatcacctaggcctggtgtggtgggtcacacctgtaatcctagcacttttgggggccaaggtgggctgattgcctgagctcaggagttcgagaccagcctgggcaacacggtgaaaccccgtttctactaaaatacaaaaaactagccgggtgtggtggcgggcgcctgtaatcccaagtactcgggaggctgaggcgggagaatcgcttgaaccagggagtcagaggttgcaatgagccgagattgtgccactgcactgcagcctggctacatagcaagacttcctctttaaaaaaaaaaaaaaaaaaaaaaaggtgggagagggctgagtcagtttgccttggaggcatgggggaggagaaggatgtgaacagggaagtgatctaagagcttccctaggaaggaaggacacccttttcctggaatgctctcctgctctgccacagctttcagtcaattatcactgcctttagaatgcttatcagcactccagcccttcagaagtgtccttctcctcctctggtgtcaaactccagagtttacttttggaattaaggtttattttccttaggttttaggaagtagcttttgaaccttagaagagtcagtttcctttactaactactgaatgaagttaggcattcaaaacttgggtagtcatgatttgaagtgtcacttgcggccaggcacagtggctcacctgtaatcccagcattttgggaggttgaggcgggcagatcacctgaagtcaggagttcaagcccagcctggccaacatagtgtctctactaaaaatattaaaaaaaaaaaaaaataaccgggcgtgatggcaggcgcctgtaatcccagctactctggaggctgagacaggagaagcacttgaatccaggaggcggaggttgcagtgagccaagattgcaccattgcactccagcctgggcaacagagtgagactccgttccccaaaaaatgaaatgtcaatttcattgagactgtatgaatgcctgacatgcacttgaaagtgatgtttattttataattttagcccttcttcactaccccaaactcccagtgcatttaaaaaatttattggcctagccattctcatggggtaatatatcatgaccatcaaaagatgacactaaagtgaatcctccatgtatagctgggctttctgccagccttagattctggagaagcaccccaggccagggagaacgggtgaagaggagaagcatttattgaaggtgctggtagccggagccctgagaccaacacagaatcgttttttctgaaggacaactcaaggacagttgagggctcttcacttccctcacatcagagggagctttgtgctcacgatgggcacggaaagggatgccagtaagcgatgcccctctatcatctcacaagacccaggtgaaacaggacattggttagggctgggacagggtcagtcagccttctcattttacagtggaggaagctgaggcttgagaggggaggtgacttgcctgaggtcacacagtaagtgatcagctgtcatctgagtgatttcttcaggtactctctctggctggacccagccagtgacaactacctgtggctcaagctgagtttgggactaaatggttttacaaggacctcaaagtatactctctctcttctagtaggacatggggaatactgactttgctgagagtaagggctcttttcccaggattgttctagatccccagatcactggaaccctgagcatagatactaggctttagcttcctggctaccacagagccacacactctcaggtagaaaaatccctaaactggctgggcatggtggctcatgccagtaatcccagcacttttggaggcccaggcaggtggatcacctgacgtcaggagttcaagaccagcctggccaacatggtaaaaccctgtctctacaaaaaaaaaaaaaaaatttagccacgcgtggtggcaagtgcctatactcccagctgcttggggggctgaggtggggggatcacttgagccagggaggtggaggctgcagtgagctgaaatcatggcactgttctttagcctgggctacagaatgagaccctgtctcaaagaaaaaaaaaaaaaaacccgaaccatgtttttaatttcttaaaactgagagtactaaatgctcaacgttcatgttgtgtgcataaaagtgagactgaaggatgaatgtgtggggtatggatagatgggatgtgaatgaagcagtctctgggtccaagctctcctggaaattcgtggaacagaccagtggtcccagatttttagatttcataggccagtaaaatttccctccagatttttggaaccaacaaaggatcatcaacttttttgccaagtaagaacgtttttaataaactaatgctgcctgctaccattaccacctgattcttttttttttttttttttttttttttgagacagtttcattcttgttgcccaggctggggtgcaatggtgcgatctcagctcactgcaacctccacctcctgagttcacgcagttctcctgcctcagcctcctgagtaggtgggattacaggcattcgccaccacacctggctcattttgtatttttagtagacacggggtttctccatgttggtcaggctggtctcgaactcctgacctcatgtgatccgcccacctcagcttcccaaagtgctgggtttacaggcgtgagccaccgagcccagcgccatctaattcttttgttgtggtaaaatatatgtaacataaaattaaccattttaactatttttatttttttaagttaaattgattatgtaatgtttttgagacagggtcacactttgtcacccaggctggagtgcagtgttgctatctcagctcactgcagcctcgacctcccgggctcaagagatcctcccacctcagcctcccaagtagctgggaccacaggtgcacgctaccatgcctggctaattttgtttttcttttttttttttttttgtagagatgaggtctcactttgttgctcaggctgatctctaacccctggactcaaacaatcctctcacctcagcctcccgaagtattggagttaagagatgtgagccactgtgcccggccaatttttaaatttgtaattgatgcataatggttatgtataatcgtcgggtacggtatgatgttttgatccacgcacacattatgtaacgaccaaatcatggtaattgctgtattgtatccatcactttaaatatttatcatttctttgtggtgcattttcaccaattttaagtgcacagttttgtagcataaaatttattcacgctgtgtagccatcaccaccatccatttcaccttccctgacaccttacctgttcaacgctaactcccccttctcccctcttccagccccttggtaaccactattctacagcttttcattttcaaaggatgttttattgtctttagtctcatcgtgtgaaaccttaagagaatttctttacggtggagaaaaagtaactttatgaagcccattcctttctctactctggagaggctggtgacccagccccaccattgcaggaatgagacgggattgcggggatatggcaggcacttggggtgctgagagtccaggtgaactgtgagctcaagcacccatgtcgggcttgggggaccagaagacacatcctgaaacagctgaagcctctactaattcatcagcaagtttagggagcggcaacttttccctgcccagctgctggcgtttccttccccatacaatttctgctgagtttgggggaggggaggttgttcgagaggccccagctgggagaggtggggggagggcgatacattcttttccttaaggaacctgaccgaactttaaggtcagagctcagtggagagtgggagctgcagggttacctctttgccgttgattcatctctccaccctcccccactcttaatgatctttccattacagaacccagaccaggaagtgcatgacaggtcgcagctgcagacacatggctgggaggcctgggctccgggccagtggtgggagagtctgagctcccctccagcagtgggacccctgcacacacacacacacacacacacacacacacaccactttaacaacttggtggaagatgttctttcttatgcactgtcacaggtgatgacgagttggactttgctttgagtttaggatgtgatttatattataataaaggcaggagaagacactccccctgccccggtccaacctgagtgtttagatccccccaacttacagtccacctaagtggtccttaccagatcctgggagctttctattatcgtgcagatgccccaacttcttttcccaaaataggacccacccaatatggccttagaagcttcccagggtatccggggcagttgctagtcacagtcttaatgtctccgaaatagtatgttttcctctctatgtttctattaaaatgtcagccccaaaacatgtttctgggtggaggtctaggtgcaacagcacagcctttgcaaacacagatagacttgggttcaagtcataatagatgagttgagcctctcatttttcagtcttcattggggatggctctttccatttgcaagttgttcaggaaatgttaattgaccctaaactgtgtcctagggggcagttgtcacacaggagtttctgtcttcaccaccagctgtgtccttggcttccttccctgaatctgccaaggctggattctggtgctaaatgtgaaatggtgacacaaacttctaggaactgtgagcttggacggccctcctccatagccgcagggcatctacctttgctcttcttggatgagtgaatgaacttccctctttccagagcaatgctttcttcctgtttagataggagggagagaagcaaagtgtattgggaataggttgagcgaaagagtgtagtaagagttttctgtacagctctgtccttaatgtatcagtaaacaatagggtgagaacttttgctggggagagaggaaggagggaaatttcttttcagacaactcttgggtgcattcctttgttaatcacttaattacagcccttctcccagtgaggtagtgaactccccattgtgagaggtagggaggaggtgggggacactggtgctgattggagaaaggtggcaaaatccctaggggaaaaaagtacagatttgaaggaggcatcagatgaatccgtgcatagaagcttgagccccaaactcagttctcaggctgcgttatcctttacgacacccagagtccctctgtcttttaagatccacacacaactctccaggccaatagctcttggcgcctgcgattcccaagtgggattctacacgtgtcttgctgcccagctcggggggatctgtttttggggggtctcggggcgggtgcagggtcctggctgtggctttggctagtgcaggcggctcggcactaaattacagtgacgaggtgggacgcacaaaaggccgaaatctttttttaataaaaacaaaacaaaactctgggccccaagcccctgggctgctgaatggccatggcttcctgtcaggattagccgggctgcctgggcctgtgtgctcggcctttctcctcaggaaatacctttagtaagccccggtggggtccccatggcaacgcacggggggacctgctggcagaggccattcagtctgccattgtcccccggcccctttgttgtgagctttattgccggccctctggcaaacacagcagtttgcaccgttttgtcaggctgaatgtggagtttttacattttaatgggctcttctggcagtggcccatttgcatgcaaaatgtcccctcttactcttttcactttcttcaatttaaaaaaaaaaaaaaagcccttctccaaatcccctgggtcggggggctggtggacgccattggccctgggtgtcaggccctgctaattgatttggtgctcccggctctctttccacacatacctgtgccccccatttttgcagctctccttctatttggggactccgagagttgagagaaacacatttttggggctctctccacccaaacccttgtaggatggcagctgtgacccgggatttcggtgagatgcttctgcactctggccgggtcctgccagccgaaggtaagttttcagttccatttcaaagccaaaatacgtaataaaaaaacctctgcagagggcccccggagccccgctgcgctgttctgtgctccttttaagttgctttcaaagccaccccgagttcctcccccacccacaattgccccctcatttatctctggggagtttataccaagactgtaaacattcctggaccaccagtttcccccatgttgctgaggagtttagcctttctctcctaattttcttaactcagaaatcaaaaagatggaatagggatgatagaaattgctaccctgagacatcatgctcatggaggatgcctggattttgttgggggccagttatccaagccctaagccctttggagtgtagaacgtagagtaggtaatacaaatacctactgtcagcccagcaccccagcaacatgagtaagtgcaagacacaggcatgaacattttcagctctagggaaaggcacattcatgttggggagaggtggagaatgcagtttggccagtctcagaagagtgagttttaaggcctaggaaagtgatggagatgattgcttgttggagagagagaaggagaaaggcatttaggggaagaaaaggaaaatgaaaggagcagtgaggatattggctccactggggaggtggaactggggtagtggccgaaccaggggtgggagaggacgtggttgagaggctccagaccagctggggctgtcatggagtgttgggggtctggagcagtcaggacttgaaagccgggacccttgtgagccctgtgcagtcctgaggatgtggcccaagggggagggcggaccagctcttttgcctcgtgttcttaatcttctcagtgggtcatcaggggtcatcagctgtaagctgtaatcaacggtgaggggctcgagaagagaaggtgtcaggtgactgctggggattgagctgaggacaggagaggcagggtgctgtctcctgtggcccaggcagagcggcacagacctggagtgggccacccctcatcaccccatgtgctgcgacagtgctggctggactgaaccctggaagagtacctggacacagtggaggggccaggacccagcagatgcagcctctagagcttgtccctgttttgtgactttgggagccatttttccatgtttaaatgggaaggaacacaagtcacctggtcacaaggaagcaggccctatgaaatattaagtgcaatgccaaaacagggcattgttactggtcttgagtctgccacaatcacaatgaacacctcccccattttctcacctgccacatttggacagccgagcctgctggactcgcaggggcaggagagtgcattttataattaaaagcactcaactgtaaggtaatgattgatatgagctatgggcttgaggaaatgagggaaggaggggaggataaggccaaagcaaccaacttcagaatctcacgggaggaggtaggatgcagggggtgccattagacagaatcaaagggctgaaccagaagggcttcctcacctggggaagtcaagacactgtgaagattgaggctgccttgcacagcggtaaagctggactctggatgtatgatgtatgtggattctggagaaccaggctacctgtgtttgaatcccagctctgccacttaacaacctagctgggccatcttggactaatcccaaatctttctgtgccccagtttccccctctgaagataataattcctttttttttttttttttgagacggagtctgggtctgtcacccaggctggagtgcagtggtgtgatttcggttcactgcaacctctgcctcctaggttcaagtgattctcctgcctcagcctcctcagtagctgggattacaggcgtgcatcaccacgcctggctaattttttgtatttttagtagaaatagggtttcaccatgttggccaggctggtctcaaactcctgatctcaggtgatccacccacttcggcctcccaaagtgctaggattacaggcattagccactgcactgggcccgaagataataattctaactcttaaatacttcacaagattctaagttaacacatgctgagaactatgctggtatgtagtaagcctccgcatccataggatagaaatcatagtaggatcaacctcataagtttcctatgaggatgaaatgggagggtctgtgttaaaagctttgtgcagcctatgggatatagtgagcgtgctggaaatattggccagtagtagtattgctgtttactcagatgtttatggatccctagataatatatgggaaggcacatggtaaattacaaagtgctatgcaaatgtgttgttattcttcactgggttcctgttaagttgtggggtttggggatggataacttccagaccagagtggctgctgtgggaccgggctggtgaagcggtatttcaaaatacattttcaggtgtgtttgtccatgtggcatgaatgccctgcattcatagtctctgcagagaggtgtgttccctgggatatctttggtggctctgttctatccctcaacttacaaattgaaatcattatttgttactgttttctcccatgaaccttctgttcctggccagctgtacagcctggcctcatctcccactgcccctcagaccagggtacagccatgcctgtaagcacttcattctcttctgttccccccagacatttcacttctcatctaaatcctctcttttcccttccccgtcattttgtccaacctctgctctcactgctgatacttttctttatgtttcatgacgtcagagcctgtgctagacctgcctgtacttggtcctgacattctccatttgtctcatgttgcagtataaaatcttaatccatattaaggtgctgtgcaaatctgagcacccctgttagggcaagacatatgccttctgggcctttgtttcacccatttctccttgcacagtgacaagggctcccagagtcacctaatggtagctatgttgatgaaagttccctgactcctccttggatttttgagaactggggtctcatcttgtcataagaatagcaaggtttgtatgggtttgggtctctgatggttcccatgactggtggaagacacagatttagaatcaagaattgggaggccgaggtgggtggatcacttaagttcaggagttcaagaccagcctggccaacatggcaaaactccatctctactaaaaatacaaaattagccgggcgtggtggcgcttgtctatagtcccagctactcgggactgaggcacgagaatcacttgaacctgggaggcggaagttgcagtgagccaagatcccagaactgccttctaaatgactgtgggagatttttgtccagtcctgctagaagcaaaatgctgtacctgttggcttgttggaagtacaagcctgcagtatttggggggaaagtaggaagggaagagggattcagtagggcctcattatcattaatcgtgttcctgaacttgaaagcaccatgggaaaatcccctcccacccctgcctctgtcctttctagctgcttccttgaggattatcaaaaagtgtgggtctccggtgggctcctaattccttcttaggggatagagacaccttagagaagcagggtaggtttgatgtatgaatccttgtcactcgcactaaaaggagcactggttgcagcctgcacaaattcccaaggtccacccgccagctgctttgacccaggaacctgcgtggtaatgagatcagcagcctgagttctcgaacgatgttcaaggcaaaccctaaccctgaccttcccactcctgttgatgagaacggtgactccattctattggcatcaaagcataaggccccttttttttcacaatgcactttttttgttgttgttgagacagtgtctctgttgcccaggctggagtgcagtggcaagattatagctcctgcagccttgagttcctgggctcaagggatcctccctcctctgcctcccaagtgcctggggactacaggcatgcaccactatgcctggctaatttttttatttttcgcagagacagggtctcactatgttgccagggctggttttgaactcctggcctcaagcagtcctcccaccttggcctcccaaagggctgggattacaggcatgagccactgcacccagtccgcaatgcactgttaacacatggcacctagagcctgtaatagtgaacagccagtctttttcagcctcaggctaggtcaccagggaatccagataccagatgccctccagcctccattccccacctcatctctcaggaaacagatgcacaaagcaagtgttttggtgctgcttccctcacagcatccccatgtgcattttgaggacaacctttgtatctgattccaattaatcaggttctccaggagttggaatgttggtttcaagtgactgaacaataaagtggctttcttcatctttcttggccagtccaataaaagtgtcaggtagcttttctcttgctaatggacacctaacgacaccctggcctgttggtcttgaccagagaaaggccagctcagggcagctggagctgaagaggcaaggacctttctaatgaggacataagtgagggacactggaaagaccaaaagagaatggaaagtactgacatggtagttgcagggtgctagtgagcagtcatgcccccaaatcagccaccttacatagaactccccaagttcagggccactggatggggttgtgacgcagtcaagcagggcccagaaagcatacaagcagttggtttcatctcctgtaagaaagtggcatcatccctgctttgtaaacggagaacctgacacacaccaagagcactcctagccgtggaaaaaagccgctagaacccgaggttagtctgatttttggttcctctgaaaattagcttttgctggatgctagattcagttctggacttactgagtagtctctgggtttttgacattgttaggcactgtgggaaaattataacaggtacgtctgcgctgagttgcttgctaattcctaggagagacttggacattttggacaattaagaagcaatacaggccaggcacggtggctcacgtctgtaatcccagcactttgggaggctgaggcgggtggctcatctgaggtcaggagttcgagaccagcctgaccagcatggtgaaaccccatctctactaaaaatacaaaattagccaggcgtggtggcacatgcctgtaataatcccagctactcgggaggctgaggcaggagaattgcttgaactggggaggcaaaggttgcagtgatccgagatcacgccattgcactccagcctgggcaacaagagtgaaattctgtctcaaaaaaacaaacaaacaaaaagaagcaatacagctctttgagaaagatgcagtcataagtggtgcagagttgcagtctgcccattcctgctcctcactcatcgctgttccgaacaagtcagccaggaagccgcactgcaccaaggcttttaaagataccagaaaacacctgtgaagctggaggtgaccattcaccaaattcgaatccctctaatgatccgcagcgtaaaatccctggagaaggtgtgtgctgacttgattcagaggaggaaaggaaaagaatgtctaagtgaagggaccagtttgaatgcctgccaagactttgagaatcactataagaaaatctccttgtggtgaaggttcagagacatgggatcgtttccagatgagaatccacaagctacccactgacttgcacagtccttctgagattgttaagcagttgacttccatcagtgttgagccaggaattgaggtggaagtcaccattgcagatgctcaaagtcaactattttaataaactgattagcggttgttataaaaaaaaaaaaaaaaagcagcagcaatatgggttgagcgcagcggctcacacctgtaatcccaacactttgggaggtcaaggtgggtgggttgcttgagtccaggagttcaagaccagcctgggcaacatttgaaattttaacttattttttaaaaaagaaagaaacattatacccaatatctgtcaattgatgactgcaatgtggtatgtctacacaattgaatattattaggtcattaaaaggaacaaagtgctgattctatgctataacatggaggaagtttgaacacatgctaagtgaaagaagccagtcacaaaagatcacatattgtatgattccattgatatgaaatatctagaatagccaaatccatagacagaaagcagattagtggttgcttagactggggataggggatggaggagtgactactatgggtcaggcattttttgaggggcgagggatggtaaaaatgttctaaagtgagattgtggtgaatgattgcacaactctgaatatacaaaaaccattaaatggatgaatattacagcatgtgaattacctgtctgctgtttaaataaaatagaaacaatacaaaatggaatgtaattgagtgtgaatttgtgtgattcaggcggtaactgttttacagaaaattagagatgagacattgatataaacaaggcttcctagtttcttgttttgttttaagacagggtctggctgggtgcggtggctcacacctgtaatcccagcacttgctaactgaagatgcaaggaccgaggcgggcagatcacttaaggtctggagttcaaggacagcctggctaacatggtgaaaccccatctctactaaaatgcaaaaataagccagccattgtggcatatgcctgtagtcccagctgctccagaggctgaagtgggaaaatggcttgaacctgggaggcagaagttgcagcaagccaagattgtgccactgcactccagactgggcaacaaagcaactctgtcttaaaaaaaaaaaagggtctttgtcatcccgtccagtggcatgatcatagctcaccgtagcctccaactcctgggctcaagcaatcctgtctcagcccactgagtagctgggactacaggcatgtgccaccaagtctggctagtttttaaatttttttgtagagacgaggtctcactatgttgcctaggctggtcttgaactcctgggctcaaatgagcctcctgcctcagcctccccaagtgctgggattgcaggcataagccactgcacccagcccctggacgttttggatggtggactttgagtagtttggggtaggaggactctggagtggcgctgacagtcctcaggaaggagtaagctttgccatgccagggaggatgcagccgtgctgaaagcatcccaactggggaggggggggggcgcggtggggagggacagcccctggtagagagaatggggctgggtggagagagtggaagccaattgcagggagtcttgaaggtgaggcagggatgtggattttactctgtacacagggtagattttgatcaggaaaataatgtcaagcacatgacagcttggaagcaggagtctgagctgcagccccagggaggccatttaaaagattatcccggctgggcgccatggctcatgccagcactttgggaggccgaggcaggcagatcacgaggtcaggagctttagaccagcctgaccaacattccccttctctactaaaaatacaaaaattagctgggcatggtggcgcatgcctgtaatcccagcaactcaggaggctgaggcaggagaatcacttgaacccgggaggcagaggttgcagtgagccgagatcgcagcacttcactccagcctgggcgaaagagcaaaactccatctcaaaaaaaaaaaaaaaaaaaatttatcccgagatggttccggtaaagggataggacagagcatacctgagccacgtttggaagggaaccggggtctaaacttgcatcaggaggaaagcgagctggttcttgaggcttttacagatcacgtatagtggagttttgtttgcacgttctggttgggacgggcaggaagttacggatccaagctggtatcagctagagcgggtctcaccagggccagtgttcctttgctgcattctcttggggggaaataaatgcctgggggttctctttgctacatttttgtctttgggagctgcttttttctctgggatcggctgcaataggccttgtgatgccagagggtaagaattcaagtttactcttgaccaatgggttgcacagatcacaagctgcaaaatatttaatcaccgaggtcatttgagggaaatgagatttgcatcaatagaagtgtctgctctgttcccttaagagttgagtctaaactgcttttctccttaccttcgtttggcaaaaccacagaccattaaaaatggaaagaataactttttctaaggcccacaaaagcttatttttaatcagttgtgtggtctactcacctttgtggtgttccccttgaccggactcacaaaaataaacgtgtgcaagcctagtggtttctgagcccttttaaagcagtacccctgtttctgacaactcttatttaagataaagcccatgggtcaatgcaggactgggtctgcaaccttggcccccccaagagaaaccactgtcagtccctgtcagttgctgatcatgatgcgcgggacacccattttcatttttaaggtttctagcggaagcctgttgagcacttgaggaagaccgtgtttcaaataagggggagtgaaagagaaaagggagagtagaaaggaaggcagtgaagagccagagtgactgcacgtgtggtatttattgagcaagcatttcttgagcaactcctgggcgccaggcatcgtagtaggtgctggggatttaaaggtaccgatgacacatcaccgcactcaggttcagaaagaggactgcccttcagtgtgacaggtgccaggagggggagggcacctaacccagactgggagtcagcaccgccctggaggagaagtcaccagctaggctgagacagaagagtgagtagtgagagctggacagaaaaaaatcaggggccctgtggccactggggcagccgtgagccacagcaggggctgagggagaacatgctgtttcagagccttatgcatcggggagcggcagtcgctccactgagtctcttagggtgaacaaatggtgagaaaagtcctctccaaggctgtgggcgggatgtgggtggtaggtgagaggtggaagatgccaggagtacatttgaacatcctaaaaggaaatagaaagttcatttcccctcgtgagtgcagaggggtgtgctcaggagatgggtaacagcccaggatggtgaactcaggtgtgtccgggccacgggccttcttgaacgcgtgcgggaagaggcactggtcaggggagggacaggtgctcttggtggtatcagatcttgtgaggtgcagacaccccggtgggtccagtgctcccacccagggacagagaaggatggggcacggggagggagagtggatggtggggggcctgagggtgtgcccagtcagagggctgaggagaaaggacctttgtgtgcgacagctcctgctgccagagcaagtgtgggttttatggcagctgtggcctcccgtcctaatatagtcaacagctccaaatcccctgccctgacacctgttagcgagaggttccctgagctgacctctccttgggctgcccccccagcatgtgcatctgacgcgtcgagggccagacccccaccctctccgaatcacacgcatcctggtcagcccccagttgacaaattgccttctctcgacttgggcaggggctgctggggttttgaggggcggggtttgttcagctgttgctagggaagggtgaggctgagctatcccaaaggaaatggggtgttcctctggcaagtggcaatcttggcaaagaactgagcatctggggagggggcaactccggacacaaagaagtcctggggagggccgacctttccccttaggatgggggaaatgaaatgtgatccgcttaatgctgctacagctgcttcctaactttgcctctttcttcctttgacttttggaggagtggggtggaaaagagatgggggttcccaggcagccagctgttttccccactgacccatgctccaattcccactgccctggctcagtagcctccagtaagtgatgcccaggatggtgcggctccgtgtggccagcgtaattccctttgtctctcccctcctcccctctccctgtcttcctctctcgccccttggcttcccttcccggccccgtggtggctgcagcccagccctggggagcccctgtggaagtggagtccttcctggtccaccccggtgacctgctgcagcttcgctgtcggctgcgggacgatgtgcagagcatcaactggctgcgggacggggtgcagctggcggaaagcaaccgcacccgcatcacaggggaggaggtggaggtgcaggactccgtgcccgcagactccggcctctatgcttgcgtaaccagcagcccctcgggcagtgacaccacctacttctccgtcaatgtttcaggttggtagccaagccctgcccttgcccctccctagacccaccccctccagccctctctgccagtttcagaggaaggtgaacctcctccccctccgtgatctgcccccactctgcttcagaaactgctgcccactaacattgctccctgcctgccgcgtggcttggctctcagagaggtgactaggtggggtgggccccagggccggagatctggggcttccaggacacacctcggaggtgattgccagggctcttgggatgttaagaccctgtgatttttttccaccacagcttgcccagatctccaggaggctaagtggtgctcggccagcttccactccatcactcccttgccatttggacttggtactcggcttagtgattagaggccctgaacaggtggtggtatccctgctctgctggagaggaacccaggtgcaccgcaagggagctgtgcgagggcagccagggagccctggagctctgtgaacttgggaacttgccactcttagaatgtgactttcacaaaactaggagttgaggaagtggagctgaaattttctttatgccatttatgcacctcagggtgtggacttggcagcagatccccaaaggtgataggaaggactggagaaagatctggcatgaaccctgatgggtgaccacatgtgtatcaagcgtgttcttacaagaaataaatacttattggggagaggtgttggcagctgctggggtggtgggtgccctatctgctctgattaaggagggcagcccccaaaccttagtagacacatgctagaaaaattctgactgtggggtgtttagcccatcctttggaaatagcatctagccacagtgtgtctagacctgcctgggtttccctatagtcagccgtccaaagaagaatacaggttgcctggctccagcacacccaggtggcaccacaagttgagaaagcgcctttgaatgtaggacggaattaagttaaataggaacagctgaccctgatggaaccacccagtgtgaaggcttccaggcagtgggggcagtgcttcggggaaggaagcaaacacgcacaggaactgttcttaaacagtttccatcccaccaagagatcatcactaagggagcagtgggactgggatccccatggggagggtgtccgtgttcatctggaactgcactagccttggtgaaatctaggggtccctaggaggaacctcagtgccccttcttcttcccatagatgctctcccctcctcggaggatgatgatgatgatgatgactcctcttcagaggagaaagaaacagataacaccaaaccaaaccgtatgcgtgagacactgtttcctatcttactgccctttgggtctgggcattgggtttaagaggggaggggaaggctgaaaggggaggaagaggagggcacatggggtcacggtgcctgttctgctaagtgccaggcactgctcacaggtgttgggcagatgggcaagacacctccaggtcctggcctgggccctgctcctgagcctgaccagctgctcctctccaccctgcctgtctctcttggctttccccgggcagccgtagctccatattggacatccccagaaaagatggaaaagaaattgcatgcagtgccggctgccaagacagtgaagttcaaatgcccttccagtgggaccccaaaccccacactgcgctggttgaaaaatggcaaagaattcaaacctgaccacagaattggaggctacaaggtacgtgtgtgtgcatgcgaaagttagagtaatgggaacaggggaggccgagttaggaagtcctgattacatgcttttcatttttttaagtaatactttccacctatacaggttattcattaaaatttttaaatacaaaaaaatgcaaataaagtttaaacatttcttcagtcttctttctgtaatatggtttttacatagttgatcacatcatgtatgtaatttccttgccttgtcatttgttaacatgagtcttttcctgatatatttcaagcatgaatatttgaaacataatttttcatgactgtataagattccattattttaaaatcccataatttggctgggcatggtggctcacgcctaaaatcctatcactttgggaggccgaggtgggcggattgcctgagctcaggagttcgagaccagcctgggcaacatggcgaaacctcctctgtactaaaaatacaaaaaattagccatgtgtggtggcaggctcctgtaatcccagctactggggaggctgaagcaggagattgcttgaacccaggagacagaggttgcagtgagctgagatcacgtcatttcactctagcctgggtgacagagtgagactctgtctccaaaaaacaacagaaaaagtcctataatttaatgaactattttgtgatattaggtattttctggtttttcaccataataaataatgttgcagtgaatctctgtcagcatttttttaagcgtgcttccttaggacagattgttacaagtgaaattactaacttaaagggtgtaagcattttttttttttttttagacggagtctcactctgtcacccaggctggagtgcagtggtgccatcttggctcactgcaagctccacctcccaggttcatgccattctcctgcctcagcctcccgagtacctgggatgtgcagccaccattcccagctaatttttgtatttttagtagagacggggtttccccatgttggccaggctggtcttgaactcatgacctcaagtgatctgtccgcctgggcctcccaaagagctgggattacaggcttgagccaccgcacccagccagaaatattttaaattaattcaccatgcactcactacatgcaagacaccatgctttaaatgctgcaagatagcgttcctgcccataaaaattttgcagtctgataggaggcaaatgtccatgagcagctaccgtaaaaagtagactgtgatcagtgctttggtaggcagagaggaaagggtgagcacagttctgaccagagactggactggaggagatggtttttgaaatgagctgtcaaggacagtgggggctggattcttagtgtaataggagaggtgcacagttgggaacattcttggtgtatttgggagtgtttgcagaaggcacatctgtccggatcacgaatgatcttgaacgtcacagtggagacttctggagtctttacaccccatctgccagcttgcagagtgtgaacgggctggtaggggggcaatccacgccttgtcctagccaaccctgcagcctggggccctgtgccaccaggctctgatatggagggcaggtgccacggggtgccgacattgtcatggggcctgcattttcctctggaccctcaatgtatccctttggcatttcccctcaggtccgttatgccacctggagcatcataatggactctgtggtgccctctgacaagggcaactacacctgcattgtggagaatgagtacggcagcatcaaccacacataccagctggatgtcgtgggtaagagggcagaggcagcaggaggaatgagtttagtgggaagagccaggcttggagaacacagccggggtgtccaggtttcttaggggcagagtcaggatagcgattggcacttcttggctttgtcaccttgagcaggtcacttctcccttttgagcctcacttttcttatctgtaaaatagagttaagatcagacagtaacacggtcaaagctggttgtcactgtgaaattgaaggtgctgttcagagtctgtcctgaaggaggcgttgttggagaggtgttaaatgtagcgtaataggagctgtcgcttaatgctagcaagatgccaggctccttaaatacctgccctgtaatgctcatggcacacctgcaaggtgggcagtattagtctagccctgcacaggagcacaggcgcataggctcagagaggtcagacaccttgctaatgcagaactgcacacctgtgccaacttcagggcatcacaggagactctgggaagaacattgagcctcttggagctattaccgcaaccttttccttctaggagttctgaaactcactccctagagatcattgggtacagaatctctcagccagtgttcttcttgattatgatgatatggtctaagaaggagattgtggccaggagcagtggcttatgagctccaggtggcatgatgggattactcacgcctgtgatcccatcactttaggaggccaaggctggaggattgcttgaggccaggagtgtgagaccagcctgggcaacacagtgagaccctgtctctataaaaaaatttaaaaattagcctagtgcagtgtcatgtacttgtagtaccagctgagttaactgaggctactgaggtgggaagatcacttgagcccaggaattcgaagctgcagtgagctatgatgacacccttgtgctccagcatgggtgacagagtgagaccctgcctttaaaaaaaaaaaaggtaaaaaggagattctgatccaagaggttggggtaagatctgagattccgcgtttctaacaagctcctaggggatgctggtagcactgctcgtggaccacactttgaatagcaggagtcaaagtgactctggttttttaaggaggagcaggttgtgctgaggtctgggggtgcaactgaattagaaggttctccattaaagcatgagcgacttactgtgactgtaaatatgatgactgccttggggaggaggatcctgatggcttagggcctgaagagagggtgtccctttccccagctctgttttgagaggcttgggctcagcagaagtgctgggaggtttacaacccatcactgggaaagccaagtggggcgcaggtgagcccacccctctttagccatggcaaggtccccatgacaagtgcctcctctcccatcttccacagagcggtcccctcaccggcccatcctgcaagcagggttgcccgccaacaaaacagtggccctgggtagcaacgtggagttcatgtgtaaggtgtacagtgacccgcagccgcacatccagtggctaaagcacatcgaggtgaatgggagcaagattggcccagacaacctgccttatgtccagatcttgaaggtaatcatggcaccagtcttcgtgggccagtctactgggaaggagaccactgtctcgggggctcaagttcctgtgggcaggctcagttgcccccgaatgggatcattcctcacgcttcaggcacacacactccatctcagtagggatctagccacatcccccaggactagtaacagaggtcacaaagtggaggtgagctgggaacagagggctgcagggatgggtggtgctggtctgtaataagctttgagagcaacgtcactggggctttggggtcagctacacaaggaaggcatttggacccctgccttttcattgcccgaaaccagagcctttccaccaagcgtttcccagtcttagccctgtgtcctgagttacgtacgatctttctggcaaatggggtgcatgataagagcatctcttacgaagagttggaaaaacaaatgccatatataaattctaagccatatgaggacgaggagtaatggcattttcttcctttttcctctcactcccagacattcattgtccctgaatgctccattaatccagggaaggtaattgcctaaatctccagtggatctcgcaacaggaaggaaccagaagctgggaaagttgtttacctctttgtcccagagttagacctcatcctcccctagcttagctgtctcagagatatactggccctcccttctcttctctttgctgctggtgctaaaactgctctgtaggtcattggccactgtctccactcacaacccctgctccagtcctggagggagtgggttaaacacaaatagaacattccatttgaagcagtgattctttttttttttttttttttttaatcaaatgctttggacttttgaagtccacttgttctgtacttgtaaaagggaaagaaggccgggcgcagtggctcacgcctgtaatcccagcactttagatcacttgaggtcaggagtttgagaccagcccggccaacatggtgaaaccccatctctactaaaaatacaaaaattagctgtgcatagtggttggcacctgtagtcccagctactcaggaggctgaggcaagctaactgcttgaacccagaaggcagaggttgcagtgagctgagatcacgccactgcactccagcctgggtgacagagtgagtgagactctgcgttaaaaaaaaaaaaaaaaaaaaaaactaaaagggaaaggtaataaatctcacttaacatctcccttcgctccctgggcctgcctgaaagttacacgggagcaacgtgcgtggccacatctcagctttgcccaactgactggtgtgtcgttggtttgttccagcattcggggattaatagctcggatgcggaggtgctgaccctgttcaatgtgacagaggcccagagcggggagtatgtgtgtaaggtttccaattatattggtgaagctaaccagtctgcgtggctcactgtcaccagacctgtggcaaaaggtaatggggagatggatgggaccctgtgctggggatttgatgtaggccccaagctgctggggcaggcggggaagccagtactggactgtccttgccaccctactgtatttctagtgcccagagccatggaaaaatacccggcctgggaggctggtttggtttggtattgtgttggtgtctgtgggttccctctctgccttctgtgtgttccttggctttgtgtggatccatgtgaggactcacggggacacggttttgctgtgttacaaatggtacttcagactgaagttgtgagtgagtggtgattaagagaaggggccataggccaggcacagtggctcacgcctgtcatcccagcactttgggaggctgaggtgggaggatcgcttgaagccaggagtttgagaccagcctgggcaacatagcaagaccccatctctacaaattaaataaattagccaagtatggtggcgtgtgcctgtagtcccagctagtctgaaggctgaggcaggaggattgcctgagcttaggtcgaggctgcagtgagctatgtttatgccactgcaccccagcctgggttgacagaatggtaccccatctcttaaaaaagagagagaaggggttaggcattcccttgcatactcgcatctgctggctgtgtatgcacatgtgcgtgtgtgtatgcgtgtgcatgtgtgtgtctgcagcccccgccatccctcctgtgttcaccttctggctatctttacctgaaaccaaacagcccctgcccgccggccccatttctccatgccgctcaccgcccgcatgctcggatgggccagtggctgccagcatctggtgaagggtcgtaaccagccatcgtcttctcaggtctgccggagttcttccctcagggtctcaccctcttcctctaacaggttttgctgcctggtggttttcgtttgttccttgttgcaaagaagatgtcagggagcatttcttcctctagtcccccttctttctgtctccttcccttgctctgcgtctcttagaggtctcatgtcctgtgcttgtccattttgcttccgttgtctcttctagactgctggagttaataccaccgacaaagagatggaggtgcttcacttaagaaatgtctcctttgaggacgcaggggagtatacgtgcttggcgggtaactctatcggactctcccatcactctgcatggttgaccgttctggaaggtacacactgtaacttctcctctcgatgtcctgccctcgccacgggcacggggggagcatgcatttccaggcttggggagacacagaggcaggagagctggaagaatgggctcctgcctgcctggtgccacatcctgccccagctttgagggctgaatcctctcagctcagagaagagcttccctagttttgcaggcgcacggaggcctcccacccgtacacctgcctctgctctccccctggccattgcaatgcatgcccgggatctgggtttaccctgcagcccgactcctccagggcaggctccttccgtccttgggtccagcagcctcccccctccgctgggtactgagcatctgaaaagtctcagatagggccctacacctcttctcccttctcaagtgctcagcccaggggtggggcttgctgcttgcaaagagcagcccaccctcctgtactgccatcctattgcctttgaagaaggaggtcagcctggacaggtgaactgagttgccttcagaaaggcctgtctcaggcagccgcagcaggcttcacgatgtccatgtatcctgtttgcctgctgccgtctctcctctcccaagaggggaggtctgcgtgttgagccagggaggaaggagcctgcagcctgctcagggtggtggctggtgactgcggggccagggcttgctgctgtctctcggaatgtcctgcatgtgggtctggctgttcctgctggcactgccctcttctctctcccctcctttcccactctgccctgcttgcccgtcagggtctccggatgcccctgctggaggcagagaagcgttctgtttttatcatcgtccctgtcttggtcctgtccgtgctccccatgtgctcccaatcagttgtcttcgttcctcaacatcagggaaagaaaaaacagcaacacttctccctgtcatcagctctgctgtctccttgtcaggccttgggacgttctctgggctcagtctagggtcgtgcctcatgcctcatgcctctctgggaaggttcccaggggcgccgcctccatggttggctggtgggttttaaaggggaaggttgggaggaggcctgtggaaggaggagggccgtccacacccgtggggcaaagcgtgttccatgaaaccagtgctgtgcgtgctgggatgaaagcctcccagcctctcgtgctgaagggaaaggtggaccgaactggcttagctgctgtggcaatggggtggggggtgagtcctaatcagaaggtgggagaagagaataacaaaatggaactccgccccctgccgccacatttccttaagttttaggagttggggcctatgagtagaatttgaaagaactaccaaaaaagcttatttttggaaattaagtcagctttgcctgtggtttggctaggaataaatatttacctgtgtgcccctacagagatgacacagacccaaagtgggacattgagcaaggcacaggctggttcccctcctgtcctctgtcctcattctgtgagtgccaccatcaccaggtactgtggcctgcagaaataaacgaggcaccaaccctgccctcagggaccccgtgtcttcttagggacagaggactcagaaacatctgtgtccccgcatgttaagtgcatgcacacagtgctgaggctttgcagagaagggccatggctccctgaggagaccaagaaaggcacatagaagtgacttctcagctggcccttgcaggatccctgggtgcctgtacctctccagtccagctgagcaaggaggctcaggaattaatgaagatggggcttgtgtagcacgatggttctaggccatcccttttccatggctcaagtccattgaaggcagcctccaaaatcagggggttgcctgatcctcctagtgccacaatcccagtcctagctagaacttgccatggttcttctccctaaaagttcccaggggacaggagacaggtgttgcttttctaatggagcgggacctcgcatggacggggccctccaagcctgctaacaccctgttcgcactgactcagccctggaagagaggccggcagtgatgacctcgcccctgtacctggagatcatcatctattgcacaggggccttcctcatctcctgcatggtggggtcggtcatcgtctacaagatgaagagtggtaccaagaagagtgacttccacagccagatggctgtgcacaagctggccaagagcatccctctgcgcagacaggtaacagaaagtagatgggggatttgcacactcagcaccacctctctctctgggcctctaatgccctgccctctccattgtccctaatttatagctttgggccttattttctggcttctgggcaaggcacagtggaatatcatgaactaagtgctctagagtctgtttcaagctagtgtagcccgtgaatttcctgcaccctccatatcacactgcaagtcctccggactcctgggacatggattgggaggaagtcctatttggacagaatgtgcagccaatagcatgaatttgaactgtccccaagggctgcttagaagtgcagagatgcagggtagagaagagaactgtttgtattagtccattttcacactgctgagaaagacatacccaagaccgggcaatttacaaaagaaagaggtttaatggactcacagttccacgtggctggggaggcctcacaattgcagaaggcaaaaggcacgtctcacatggcggcagacgagaagagagcttgtacagggaaactcccctttataaaatcatcagatctcgtgagatttattcactatcacaagaacagcacagggaagacctgcccccatgagtcaatgacctcctaccaggtccctcccataacacgtgggaattcaagatgagatttgggtggggacacagccaaaccatctcagccataccatacccttgtcccctgtgtgcccacccttccccacgggaggaaatggtacagatggcacaggtgtgtgcaagaatgaccgttccctcagaagcctgtgctcattctggaaggtgctttgggagttaggaatccataagctaaggcaaagtatttgcaaagagtcaggagaacagagttgttactgcaatgatcagttataaaatgtcaagctggaagaggtgcatttggtctgcttattttaaaggtgagtgaagtccagaaaggccagcttgtggcagaaataggtcagtcctagaagttgggcctcctggcctaccatggtctttggaccactctgtgttgaggaaagaacatcagatacacagacatgtgcctctgccattgttgggaagccctgactaagaatgggaaggagtcaccccgtcccccctccttgctctagggtgaccccactcttccttgcaggtgtctgctgactccagtgcatccatgaactctggggttcttctggttcggccatcacggctctcctccagtgggactcccatgctagcaggggtctctgagtatgagcttcccgaagaccctcgctgggagctgcctcgggacaggtaataatactttgactcccaactttttgaaggcattccttgcttgctattctagtggtggaaggtgtgtatactaacaccttctgggcggtgaaggttcatgaaatgcctgcagaaacattcattccactttctgctcgcagttgggtgaaatacagagaggtggagatggggtgcctctcaaggtttgaacttcaccagccccaacttatgccactctctgtttcccccgaaagactggtcttaggcaaacccctgggagagggctgctttgggcaggtggtgttggcagaggctatcgggctggacaaggacaaacccaaccgtgtgaccaaagtggctgtgaagatgttgaagtgtaagtgatgcttctgtccttgcaaagaaaatcttgtcccattccaagcaaacagcaggcctcgggcccagcagaacagcttctctggtgcctttgctgcccacacctgctccgctgcctgcttggggttacctgggagtggagggggtgttctgcaccttgagattgttctatgacgtcactctgttccttggcgtcaacctgggctgtggtcaggtgtttatcctggatccatcgcttgcaggctttcctcaccacatccctgcccactcactaccacctattgcaacaacggctcccatgagagggaagagaaaacaagtttggatgaagtggggaggagagaatcaagtcccagggaaaagcagcccctcgacacataccccactcccttagcctttatcctgccctcctcccttcccaagtaaatgagtctcaacgtgttctttaaagcggacgcaacagagaaagacttgtcagacctgatctcagaaatggagatgatgaagatgatcgggaagcataagaatatcatcaacctgctgggggcctgcacgcaggatggtgggtgccggccagactggctttccctgcccagcggggagaagatctgagctggggtatcagtcccaaggcctctctcagccacagctagggaagggggttaagagaggctgctttggcagaggtttaaaatgtgttatctcgggatctgggctccgctcattggtgttcattcaggaatacagatacctagattcacacacgtggtgtgttaacagaggcagctgagtaattatggtctaagagcgctcaggctgggtgcagtggctcatgcctgtaatcccagcaatttgggaggccgaggcaggaagatcacttgagatcaggagttcgagaccagtctggtcaaaatggtgaaaccccatctctactaaaaaatacaaaagttagccaggcatggtcacgcatgcctataatcccagctactcaggaggctgacgcataagacttgcttgaacccgggaggtggaggttgcagtgagccaagatcacgccattgtactccagcttgggagatactcccgctgtctcaaaaataaaataaataaataggccaggcacagtggctcacgcctgtaatcccagcaccttgggagggtgaggcgggtggatcacttgaggtcaggagttggagaccagcctggccaacaggtgaaaccccatctctactaaaaatacaaaaagtagccgggcgtggtggcgcatgcctgtaattccagctactcgggaggctgtggcaggagaatcgtttgaacacgggaggcggaggttgcggttagccgagatcgcgccattgcactccagcttgggcaacgagcaaaactccatctcaaaaaaaaaaaaaaaaaaaaaaaaaattagccaggcattgttcatgcctgtaatcccagctgcttgggaggctgaggcaggagaatcacttgaatccagaaggcagaggttgcagtgagccgaaattgcgccactgcactccagcctgggcaacagagtgagactccatctcaaaataaacagacaaactggggctcttaccccaatgttgctcgggaattttctggactatgctgggagtaattatttctctgattttttttgggtagtagaatggatttcccaggtcccctaagaggaggcaggagatgggaggttggccggggtgtgctgctgggggtggggtttctttgaggtgaagccaaacctgctcacctgctgctggccccatggcctcttctcctgtgcctgcaggtcccttgtatgtcatcgtggagtatgcctccaagggcaacctgcgggagtacctgcaggcccggaggcccccagggctggaatactgctacaaccccagccacaacccagaggagcagctctcctccaaggacctggtgtcctgcgcctaccaggtggcccgaggcatggagtatctggcctccaagaaggtgtggaacctgaaggctcccctgggtaatgccagggtgggaacagagcccccctagtcttccagcctgtgacttatcatcttgtggtggcgttgtggatgcactgagcactggccctgtgtgccctgtgtgttgtcttaggctctctgggaactgcagagtcaggagcaccagtgtagccaggtggccttggggtcagactgatgcagggtccgatctgtgcactgccactttctgcgtagcctcaggcagctacttagcatcttaaaattcttcaaatacaaaataataataatatcagctgggtgcagtggccaaggcgggaggattgcttgagctcaggagtgtgagaccaggttgggcaatatattgaaaccccgtctttaaaaaaaaaaaaaaaattaaaaaattagctgggtgtggtagtgcgtgccgatagtcccagctactcgggaggctgaggtgggaggctagcttgagcccaagagtttgaggctgcactgagccatgatcacaccactgcaccccagccggggcgacagagcaaggccctgtctcaaaagaaaataaagtataacaatacctgttgtagaattgttatgaagataaaatgaaactgtctgtgagtgttgagtgcagtgtttggtgtgtaagggctggcctggtttgagcccagccccatgtggacttgctgtgctgggaggcaggacctaggagcatgcatcgctgcagacgcagcagaggcataaggggccagtctttggggaaggaagggaggagcgcttgctgtgatgagaagcctggagctggcagagaatgttagaagagggaaagcaaaggttcggggggcagagcagtgtggcagaagttctatgagacaagtcggctagttgcatgggtggcggccgcccagagccttccagctccctcacctccccgcctcccgctctcccttcctccttcctcagtgcatacaccgagacctggcagccaggaatgtcctggtgacagaggacaatgtgatgaagatagcagactttggcctcgcacgggacattcaccacatcgactactataaaaagacaaccaacgtgagtgccgacaaggccgccctgtgctggtggtttcatctgagaagcaaggagtggggtgggatgagaacccaccccccagtcccttcccacctgtgccctcatggccctgcctggggccactccaacctcccctgtgctgctttcagggccgactgcctgtgaagtggatggcacccgaggcattatttgaccggatctacacccaccagagtgatgtgtgagtttgtaatagcaattgccagggaggtgtgggatagagagcttctagcactgtagagtcctgctttctccctggactgaggagtcctctttctgccccagagagaaaaacaaaacattgtctgtggccattccctctgctccagatgttgaaaggctgatctgttctccatgctgtctcctggcactgccctgggtagaggatttgtgctgggggaggggaggcggagaagctctaacaccctgtggctctccgcccatttgcaggtggtctttcggggtgctcctgtgggagatcttcactctgggcggctccccataccccggtgtgcctgtggaggaacttttcaagctgctgaaggagggtcaccgcatggacaagcccagtaactgcaccaacgagctgtaagcccgaggagatgtcggaggccctgagccaggccttggggcaagagtgggcttgaggggcagggggctagactagagagtatccatctccaggagacgtccctgaccttacagtcctgccgcaggtacatgatgatgcgggactgctggcatgcagtgccctcacagagacccaccttcaagcagctggtggaagacctggaccgcatcgtggccttgacctccaaccaggtaaggctgcccgtgccagagccagagctcaggccgtccccactgcgtgcacgcacctccctgagcagggaggaggggcccggcccatcgctgcttcctctcgcccatcacaggagtacctggacctgtccatgcccctggaccagtactcccccagctttcccgacacccggagctctacgtgctcctcaggggaggattccgtcttctctcatgagccgctgcccgaggagccctgcctgccccgacacccagcccagcttgccaatggcggactcaaacgccgctgactgccacccacacgccctccccagactccaccgtcagctgtaaccctcacccacagcccctgctgggcccaccacctgtccgtccctgtcccctttcctgctggcaggagccggctgcctaccaggggccttcctgtgtggcctgccttcaccccactcagctcacctctccctccacctcctctccacctgctggtgagaggtgcaaagaggcagatctttgctgccagccacttcatcccctcccagatgttggaccaacacccctccctgccaccaggcactgcctggagggcagggagtgggagccaatgaacaggcatgcaagtgagagcttcctgagctttctcctgtcggtttggtctgttttgccttcacccataagcccctcgcactctggtggcaggtgccttgtcctcagggctacagcagtagggaggtcagtgcttcgtgcctcgattgaaggtgacctctgccccagataggtggtgccagtggcttattaattccgatactagtttgctttgctgaccaaatgcctggtaccagaggatggtgaggcgaaggccaggttgggggcagtgttgtggccctggggcccagccccaaactgggggctctgtatatagctatgaagaaaacacaaagtgtataaatctgagtatatatttacatgtctttttaaaagggtcgttaccagagatttacccatcgggtaagatgctcctggtggctgggaggcatcagttgctatatattaaaaacaaaaaagaaaaaaaaggaaaatgtttttaaaaaggtcatatattttttgctacttttgctgttttatttttttaaattatgttctaaacctattttcagtttaggtccctcaataaaaattgctgctgcttcatttatctatgggctgtatgaaaagggtgggaatgtccactggaaagaagggacacccacgggccctggggctaggtctgtcccgagggcaccgcatgctcccggcgcaggttccttgtaacctcttcttcctaggtcctgcacccagacctcacgacgcacctcctgcctctccgctgcttttggaaagtcagaaaaagaagatgtctgcttcgagggcaggaaccccatccatgcagtagaggcgctgggcagagagtcaaggcccagcagccatcgaccatggatggtttcctccaaggaaaccggtggggttgggctggggagggggcacctacctaggaatagccacggggtagagctacagtgattaagaggaaagcaagggcgcggttgctcacgcctgtaatcccagcactttgggacaccgaggtgggcagatcacttcaggtcaggagtttgagaccagcctggccaacttagtgaaaccccatctctactaaaaatgcaaaaattatccaggcatggtggcacacgcctgtaatcccagctccacaggaggctgaggcagaatcccttgaagctgggaggcggaggttgcagtgagccgagattgcgccattgcactccagcctgggcaacagagaaaacaaaaaggaaaacaaatgatgaaggtctgcagaaactgaaacccagacatgtgtctgccccctctatgtgggcatggttttgccagtgcttctaagtgcaggagaacatgtcacctgaggctagttttgcattcaggtccctggcttcgtttcttgttggtatgcctccccagatcgtccttcctgtatccatgtgaccagactgtatttgttgggactgtcgcagatcttggcttcttacagttcttcctgtccaaactccatcctgtccctcaggaacggggggaaaattctccgaatgtttttggttttttggctgcttggaatttacttctgccacctgctggtcatcactgtcctcactaagtggattctggctcccccgtacctcatggctcaaactaccactcctcagtcgctatattaaagcttatattttgctggattactgctaaatacaaaagaaagttcaatatgttttcatttctgtagggaaaatgggattgctgctttaaatttctgagctagggattttttggcagctgcagtgttggcgactattgtaaaattctctttgtttctctctgtaaatagcacctgctaacattacaatttgtatttatgtttaaagaaggcatcatttggtgaacagaactaggaaatgaatttttagctcttaaaagcatttgctttgagaccgcacaggagtgtctttccttgtaaaacagtgatgataatttctgccttggccctaccttgaagcaatgttgtgtgaagggatgaagaatctaaaagtcttcataagtccttgggagaggtgctagaaaaatataaggcactatcataattacagtgatgtccttgctgttactactcaaatcacccacaaatttccccaaagactgcgctagctgtcaaataaaagacagtgaaattgacctgagagaaaatgaaatggccgttttacttagaggaccaaattgggtctcctgaggaaaggaatccagtttatctaatgaagatgttgtgccatgaaggcactgagtctgtctggtttcctgagggttaaaagattagggctgggatcaccacagcattaatcaatactgcctttccgtctcttctaattgccataggctggagatcatcggtcccttggccctgctaatgtaatgtattgatctcaggtaagtaagattgagcatcaaatgaggcaagaaatctgtctcattgttaatgaggttgctgtgcttattcgccaccactgggtggagccagcgagctgaagtttcagttggcattaggtgaagcaccagtccgctctcaagtcacattggtccaactactacctgctagtgtgtgctggtggtgagtgggaaatctttagcctagatttggcattacagaaaaactgggcagcactgatgtggctcgttttgggatgattttagaattagacatgacacaggtgcaaggccctaagtgtcagtggccaccacctctctattgtagcagaattgtgtgtaagacccaggacacatctagcatcactgtagttgggtttttagagaatgcctaaagtggccaggcatggtggcgcatgtctgtaatcccagcactttgggaggctgaggcaggcagatcacctgaggtcgggagttcaagaccagcctggccaacatggtgaaaccccatctctacaaaaatacaaaaattagccaggcgtggtggtgcatgcctttaatcccagctactccagagactgcggcaggagaatcgcttgaacccaggaggcagacgttgcagtgacaagatcgtgccactgcactccagcctgggtgacagcaagactgtctcaaaagaaaaaaaaaaaaaaaaaaaaaaatctaaagtcatacccaatgagatcattagtggcaggtagagccaaggcatctgcatctatagagaagggagcagagaggagaaagctctgaaacagctggcacagccttccattccctccactgaggagagccagggaagaaggtggtcagtaagaacccaactgctaagacttggtctgggcgggttccttctaggtggaccgtcaacagtattcaggaccatttccaccatactgccctacatgcaggtcttcgcgtgcagaagggatctatttcataaacatgctaactagaggtgtaactttcattaccccgggaggctcaaagagttggtggttaacgatttaccagaacaccactagctggggctagatgtaaggatcactgaacccaacagccaagcaccctaaatgatgagaacaacaaaacatccttgacttctctgagctgctagcagaagagtgggaggagaggtctatcaagtggcccgggtcccttgaccaggtcactgctcattcccaccctgctcggagggaaagccagaaggaactgtaggacagcccagcagtacctatgactcattcagctaaaacagaattgagcaagtttagctaatccctttcccacatttaacacctgaaatgtggactaattaaaatacccgtcatttttgaaatgggaaagtgtattgtgaatcacctcgataggcaggatccatgattgctgtatgtgcacagtagggattcatcattcccaaagaactgggcttcattagtgggacatggtggggcttctctgatggagcacaaatttagaaagcattgtagaatgcatattcttgctgtgaagtgctggtgacattcctcatttaggtgatcccagacaggacagtggagttttacttgttttaactgactgctgtctaaccacagcaagtaaagaaatctaattttatcacctacaggctgaaatacctttggccttctaaccactccccaggggaagaaagcccttggtcagctgcatggcagtctatctattatttcatattattaatactgaaaacaccaagcataaatatcctaatgtaatacttgttgctgggtagcacagggattatatcagactttcacaatccctatgactaatagtcttatttgtgaaagacaaactggccagaaacacacacacccaacacaaacatggttaaggcttaaacccttaattatgcttcctagcaaaatggtggctaatgaaagccatatgtgctagaagagtggctgcctcgcagattgcggctgcctcacagattgctgcagcctctgcaggcccaagatggaggtgtcggaagcagccaaatctttctgattgccagtctgtttctccaggaagcttcattatatccagaaagatcttactggggagtatatccatcccatctcataaggtactttgtttccagggtgctgatcctactggtggatcattcagaaagttaatcaggtgctcctaaaatggtttttggaacttccaagttcttactcagaattccaagccataggagacaggtatctaaggtgccaagctgattccattgtgcaaaaaatttcctctctgaagggacgtacacatgaaactaaaaaaacaacatgatggggggtgggctttatacaaagttgagtggggtgacaatggtacagaggaaatgggactttgcaattatatttttctaagtggtctgaacttggtctcactacccacatcacctggaatggttaccaggcctcaaaggactgccccacgggctaaacagctgatccgctctctgaagccagacagtcttatctgggaggtcctttacagatgccactgttgagggccggaagctgaagagagtgagctccatcctcaagtagtcctttatgctccttttgaactagccttgctgttctgggccgtcatttgtgatttggcctggagtgtctaggcgtaaaaaacaaggactgtaggcattagtcacagacgtgtaagttcttaaggagtgaatgctatttttgttttcttaatcaaaatagtgaccacaaagtcaaatctgagattataatttaccttggtaataaaagataaaggagatttacaaaaaacaaggtatgtgtgtgccttgggatgcttttctgggcttaccccatctgtgtcttcatagattctctgtcctgccagccatgtctttggtccacaggagccacttcccacttcaactctcccacaacctccccactgtttactctcttcatgccctgtgctcttgccccaaatcccttcacccaattgggaaaactggatgatagataagtagtttcttatttacatgcatttctctggaaattaaagttgctttccagctagtatttcctcacgtcggaagcatgtgtaaaataacacatggaaactatttccacctggcacataagaaaaaaagggtctgcctatattgtaactgacttctacactttgcatgttttagtctgacccacaatttttttttttggatagttgaagtaaaaaacgtggttacaagatgactaaagtttggcctacaatttcctgtttggacaacaggaagaattgtgcagtgttttgcaacaggactaattctagattctcactgcccttaaagataactagagggaaagggtcttctctttctttttcatttattaaagatacttacaggttcttcagaagaagtgatgggtcctttaggtaatgaaataggtgttgatggtgttatgggtgatgatgtaactggtggcggctgtataaagtcttcatccttaaacatcagaactgagagttgggttactgatttaaaagaaaatgtgtattaatctacagtccactaccttgactaccaggaacttgtcacaactacctcatatcctggcacaggattcaaaaggcaaaatctggaacctaattacgtgtagccaaatattaagcttcctcttagatcaaacagtacaataaatattccttattaaggaacattattgtattgaatttcaatttcattaaggggattaaaacaggagaaaatgacccattgctattttcattttttaatctaattaaccaaatggaaagtaactgtctaaccttagttcccttcagttgaggtgcaagatccaccatgttctctttagattcagtgaaagtaggtaattccacaagaatatcagtctttggagcctggggagataaacattttatgtatcataagctttctgctcttcctaaaacccagaaacttttacagtagtcaatgccttttttagcactatttgctttccactaaatccctaacttcctcctctagctacaccctttatgagtaacctatgaaatatgcccctgatgtagcaacttagtattatttctctttgagttttgagtactttatatacaaaagttgcactctgatagattctagcatttaaaataatcattagcaatccactgatggcactggtcctgctgttggcctcaaaagccatttctcaattatttgtttttctttttttcttttttttggagatggagtctcactctgtcaccaaggctggagtgcagtggctcgatctcggctcactgcaacctccacctcatgggttcaagcaattctccctgcctcagcctcctgagtagctgggattacaggcgtctactaccatgcccggctactaatttttgtatttttagtagagacggtgtttcaccatgttggccaagctggtcttgaactcctgacctcgggtgatccacccacctcagcctcccaaagtgctggattacaggcatgagccactgctactggcctcagttattttctaatagcattgatgtaacttggtctatgttgcatctttttcatttttagtatctaataataaatgataaaattgcctgatttactaaaatggtaagctcctataacgcaaggaagatggggagaggagtggtattaaaatagataacgataagaatgggagtggtgatagaatagctagctaacctatctttaggaattagatttgaaaaacatatatcactgtgctttggaagtaatttgtggactttggagggataaggctacatacatccaaaattacagtatatttgatgtctctattcttcacagaacctagcatgctacttgttctcattttgtatatatacatggagaatagaagtttaaaaacatgggtgggaaaaagccaataacttgcttaggagcttatcattttgtccttaattccgttctcacccactccagaaagcaacatctggataaagagcttatggccctctagaataattctgagaacccagatttagctgagacagtgagctcctccaagatttccttgcccctgacagcaatctaagaatgacgattaactttggtctgtctcacatgagtggatccaagagttggatagaataagaacccactagcctgccttttagaacatggtctatactctgaaactgctcctagtctccctagagtttttcctggacaaatcccaaaaccagattactctagaaatatgaaaagggaaagcaagatggtgtttcctgaagttgggttttcatattggacttcaaataattttccttggcttgtccaaggagtcaacagcataattaagatgtaaaacgactggccctcacttagtacttggactagtcccctaaaccacagtgtagcatattctacaagaatctttcctttcttactcatgccgggttctgagtcagacaggaagccaccagctagagaagcgggaggccctttctgatgggcccagagcaagatgctgtagtgactgggccaatcttatgctcttccctacaacaccaggaagaaaaatgattaaggaaatgagttgaaagacattctagataagccattcaatgcttaaagactaataggaatctggacaaatgaaatagaacaggaaccattcagtctaaaaggagaaagcagcagaaacacccacacccacacacaccagtctgctaatgaagatagttaagaaaaaggaataaactgctcctattagtaaaattctcaatcaagctgggctcaaaggcagtagcagccttaaggctggaggtaaaactgagtggcttcagttttctgttttgttttgtttgagacggagtctagttctattgcccaggctgcagtgcaatggcgtgatctcgtctcactgcacctccgtctcccaggttcaagcaattctgcctcagcctcccaagtagctgggattacaggcgcccgccaccacgcccagctaatttttgtatgtttagtagagatgagatttcaccatgttggtcaggctagtttcaaactcctgacctcaggtgatccacctacctcggcctcccaaagtgctgggattacaggcgtaagccactgtgcctggccttcctttgttttgtttgtttgtggttggttggttggtttttttagaaatttttaaaacacataaagccagttgggtcaaattctaaaaggccaaaagaaatgcctgctctaactgcaagagtacaccaagtgtttgtggagaggcctcagttggatggacgtcgagggtccccattaacccaggtactcacctccccactgagtggtatctcaatcggcttgggcttcacatctatcaggtagaaggtgcgggacaggagcaaaagggaaggagggacgttctccttcaggtggaggtcctgccactggagaacgggaggggaacaacacgtgagaatcagaacaccagagccagagtgatccgcggtcatctaccctccctggctgacagcttcccaccgcccccgccctttccgccaagccgctcaggtgatgagtcacggcagaacacggacaagagcccagccctggcttctgcactgagggggcaccctacagcctccctcactatggtggaatcactctcagagagggagaattcaattaaactctcaacccaactgtggatcaaagtagtcaagtatcttctgttggacaaagtgtagataatgtgaaagaataaatcacagcctgggcaacacagggtgactctgtctctacaaaaaaattttctaattatctgggtatggtggtacatgcctgtggtcccagctaggaaggctgaggtgggaggatcgcttgagcccgggagtttgaggctgcagtggcctgtgttagtgccactgcactccagcctgggcgacagagtgagactctgtcttcttaagatcagtaatatatgcacaaaagataaaattcaaaaggtaccataaaaagtattcacaaagcttctgcagtgacagtgtcatagccaacgttcaagaaatacatgattttaaggatctttctctacaatgtgctgtcttccaaccagagctggtcccacacatgagaggaaaaagtaacctaacatggtttccaagccacaccatggctggtaacctaagatcatctgtgcattcttcatggcatttcttacaatgatgagaatgaaatgtaataggagttactcctttgttttaaagcattgatgctcttacttgaagtccaaatatgctatctgaggaaaaatattaaacatgggttaccacagtgtgtgctggtttggggcactaattgaaaagcagccccaggtgggccaccaggcaaagtggggacctccagacagattcacacagatgacaggccttgaactgaaatttttgccaggacccgttacactacgtgaagtaggtcaaaattctaaggtggtcccaagacaccttgtccctgcaatacccacaccctctcctagttattcaacagtattctggctgctgtgtgaagggattctacaggtgtaactgaagtcccaagtcggttgaccttaagatagggagattctttggatgggcctcaccaatcacatgagaccttaaatctggggctagaggtcaaacacgggggaaattggagatttcaagcatgaggaagctctggcatatgagaagttctctcttgcagatgaaggaggccaagaggcaaggaatacaggtggccactagatgctgagagtagcccggggctcacagccagctgggaaacaaagacctcagtccgacagctgcaaggaactaagttcagccaacaaactgaatgaacttggaagcaggtcgtttcccacagcctccaaaggagcacagcgtgcacttctgacctaccaactgtgagctaatataccagtgttgttttaagccactaagttcatggtcatttcttaggcagcaatacaaaactgatagagatcccaatcaaagtgaaaaatcaacctagtccttcagcatcccactgctcaatgaaataaggcaaattaagtaagacggttcacttgcaaaggagaaatcacataaggaggtctgcatattgtaggagagagttctagggaagaggaccccagaggggcgctgctacttgcctccgtgagctgttgtcgcagttgttcctccgtgagacccagtgatctcatccctcgggccctacaggcagcctgtagttctgatacactcaatgctgtcaccccttccttggcaattatctgaaagaaatgtaagggatggagttggaacttttgattccaattttacgtaaaccctaaattccagcaaatcagtggaaacagaatcagaggcttggatgctttgtcccctgcactggctgctactgcaaaggcgacgtagggaggtggcagttgaaataatgggaatcctgccaacaggtattagcaattagcaatatcagggctatttacacaactccttcccaacattctgtcatcagagtaattat

SEQ ID NO: 428 - DNA, 351 bp, Homo sapiens
ccggggacgcgggcacacgcccgctcgcacaagccacggcggactctcccgaggcggaacctccacgccgagcggtcagtttgaaaaggaggatcgagctcactgtggagtatccatggagatgtggagccttgtcaccaacctctaactgcagaactgggatgtggagctggaagtgcctcctcttctgggctgtgctggtcacagccacactctgcaccgctaggccgtccccgaccttgcctgaacaagactgctggagttaataccaccgacaaagagatggaggtgcttcacttaagaaatgtctcctttgaggacgcaggggagtatacgtgcttggcgggtaac

SEQ ID NO: 429 - protein, 89 aa, Homo sapiens
KGGSSSLWSIHGDVEPCHQPLTAELGCGAGSASSSGLCWSQPHSAPLGRPRPCLNKTAGVNTTDKEMEVLHLRNVSFEDAGEYTCLAGN

SEQ ID NO: 430 - DNA, 726 bp, Homo sapiens
cccctcgtagcgcattgcggcgacctcgccttccccggccgcgagccgccggccgcggagctcttgcgaccccgccaggacccgaacagagcccgggggcggcgggccggagccggggacgcgggcacacgcccgctcgcacaagccacggcggactctcccgaggcggaacctccacgccgagcgagggtcagtttgaaaaggaggatcgagctcactgtggagtatccatggagatgtggagccttgtcaccaacctctaactgcagaactgggatgtggagctggaagtgcctcctcttctgggctgtgctggtcacagccacactctgcaccgctaggccgtccccgaccttgcctgaacaagcccagccctggggagcccctgtggaagtggagtccttcctggtccaccccggtgacctgctgcagcttcgctgtcggctgcgggacgatgtgcagagcatcaactggctgcgggacggggtgcagctggcggaaagcaaccgcacccgcatcacaggggaggaggtggaggtgcaggactccgtgcccgcagactccggcctctatgcttgcgtaaccagcagcccctcgggcagtgacaccacctacttctccgtcaatgtttcagcttgcccagatctccaggaggctaagtggtgctcggccagcttccactccatcactcccttgccatttggacttggtactcggcttagtgat

SEQ ID NO: 431 - protein, 148 aa, Homo sapiens
MWSWKCLLFWAVLVTATLCTARPSPTLPEQAQPWGAPVEVESFLVHPGDLLQLRCRLRDDVQSINWLRDGVQLAESNRTRITGEEVEVQDSVPADSGACVTSSPSGSDTTYFSVNVSACPDLQEAKWCSASFHSITPLPFGLGTRLSD

SEQ ID NO: 432 - DNA, 3722 bp, Homo sapiens
cccctcgtagcgcattgcggcgacctcgccttccccggccgcgagccgccggccgcggagctcttgcgaccccgccaggacccgaacagagcccgggggcggcgggccggagccggggacgcgggcacacgcccgctcgcacaagccacggcggactctcccgaggcggaacctccacgccgagcgagggtcagtttgaaaaggaggatcgagctcactgtggagtatccatggagatgtggagccttgtcaccaacctctaactgcagaactgggatgtggagctggaagtgcctcctcttctgggctgtgctggtcacagccacactctgcaccgctaggccgtccccgaccttgcctgaacaagcccagccctggggagcccctgtggaagtggagtccttcctggtccaccccggtgacctgctgcagcttcgctgtcggctgcgggacgatgtgcagagcatcaactggctgcgggacggggtgcagctggcggaaagcaaccgcacccgcatcacaggggaggaggtggaggtgcaggactccgtgcccgcagactccggcctctatgcttgcgtaaccagcagcccctcgggcagtgacaccacctacttctccgtcaatgtttcagatgctctcccctcctcggaggatgatgatgatgatgatgactcctcttcagaggagaaagaaacagataacaccaaaccaaaccgtatgcccgtagctccatattggacatccccagaaaagatggaaaagaaattgcatgcagtgccggctgccaagacagtgaagttcaaatgcccttccagtgggaccccaaaccccacactgcgctggttgaaaaatggcaaagaattcaaacctgaccacagaattggaggctacaaggtccgttatgccacctggagcatcataatggactctgtggtgccctctgacaagggcaactacacctgcattgtggagaatgagtacggcagcatcaaccacacataccagctggatgtcgtggagcggtcccctcaccggcccatcctgcaagcagggttgcccgccaacaaaacagtggccctgggtagcaacgtggagttcatgtgtaaggtgtacagtgacccgcagccgcacatccagtggctaaagcacatcgaggtgaatgggagcaagattggcccagacaacctgccttatgtccagatcttgaagactgctggagttaataccaccgacaaagagatggaggtgcttcacttaagaaatgtctcctttgaggacgcaggggagtatacgtgcttggcgggtaactctatcggactctcccatcactctgcatggttgaccgttctggaagccctggaagagaggccggcagtgatgacctcgcccctgtacctggagatcatcatctattgcacaggggccttcctcatctcctgcatggtggggtcggtcatcgtctacaagatgaagagtggtaccaagaagagtgacttccacagccagatggctgtgcacaagctggccaagagcatccctctgcgcagacaggtgtctgctgactccagtgcatccatgaactctggggttcttctggttcggccatcacggctctcctccagtgggactcccatgctagcaggggtctctgagtatgagcttcccgaagaccctcgctgggagctgcctcgggacagactggtcttaggcaaacccctgggagagggctgctttgggcaggtggtgttggcagaggctatcgggctggacaaggacaaacccaaccgtgtgaccaaagtggctgtgaagatgttgaagtcggacgcaacagagaaagacttgtcagacctgatctcagaaatggagatgatgaagatgatcgggaagcataagaatatcatcaacctgctgggggcctgcacgcaggatggtcccttgtatgtcatcgtggagtatgcctccaagggcaacctgcgggagtacctgcaggcccggaggcccccagggctggaatactgctacaaccccagccacaacccagaggagcagctctcctccaaggacctggtgtcctgcgcctaccaggtggcccgaggcatggagtatctggcctccaagaagtgcatacaccgagacctggcagccaggaatgtcctggtgacagaggacaatgtgatgaagatagcagactttggcctcgcacgggacattcaccacatcgactactataaaaagacaaccaacggccgactgcctgtgaagtggatggcacccgaggcattatttgaccggatctacacccaccagagtgatgtgtggtctttcggggtgctcctgtgggagatcttcactctgggcggctccccataccccggtgtgcctgtggaggaacttttcaagctgctgaaggagggtcaccgcatggacaagcccagtaactgcaccaacgagctgtacatgatgatgcgggactgctggcatgcagtgccctcacagagacccaccttcaagcagctggtggaagacctggaccgcatcgtggccttgacctccaaccaggagtacctggacctgtccatgcccctggaccagtactcccccagctttcccgacacccggagctctacgtgctcctcaggggaggattccgtcttctctcatgagccgctgcccgaggagccctgcctgccccgacacccagcccagcttgccaatggcggactcaaacgccgctgactgccacccacacgcccctcgcactctggtggcaggtgccttgtcctcagggctacagcagtagggaggtcagtgcttcgtgcctcgattgaaggtgacctctgccccagataggtggtgccagtggcttattaattccgatactagtttgctttgctgaccaaatgcctggtaccagaggatggtgaggcgaaggccaggttgggggcagtgttgtggccctggggcccagccccaaactgggggctctgtatatagctatgaagaaaacacaaagtgtataaatctgagtatatatttacatgtctttttaaaagggtcgttaccagagatttacccatcgggtaagatgctcctggtggctgggaggcatcagttgctatatattaaaaacaaaaaagaaaaaaaaggaaaatgtttttaaaaaggtcatatattttttgctacttttgctgttttatttttttaaattatgttctaaacctattttcagtttaggtccctcaataaaaattgctgctgcttcatttatctatgggctgtatgaaaagggtgggaatgtccactggaaagaagggacacccacgggccctggggctaggtctgtcccgagggcaccgcatgctcccggcgcaggttccttgtaacctcttcttcctaggtcctgcacccagacctcacgacgcacctcctgcctctccgctgcttttggaaagtcagaaaaagaagatgtctgcttcgagggcaggaaccccatccatgcagtagaggcgctgggcagagagtcaaggcccagcagccatcgaccatggatggtttcctccaaggaaaccggtggggttgggctggggagggggcacctacctaggaatagccacggggtagagctacagtgattaagaggaaagcaagggcgcggttgctcacgcctgtaatcccagcactttgggacaccgaggtgggcagatcacttcaggtcagga

SEQ ID NO: 433 - protein, 812 aa, Homo sapiens
MWSWKCLLFWAVLVTATLCTARPSPTLPEQAQPWGAPVEVESFLVHPGDLLQLRCRLRDDVQSINWLRDGVQLAESNRTRITGEEVEVQDSVPADSGACVTSSPSGSDTTYFSVNVSDALPSSEDDDDDDDSSSEEKETDNTKPNRMPVAPYWTSPEKMEKKLHAVPAAKTVKFKCPSSGTPNPTLRWLKNGKEFKPDHRIGGYKVRYATWSIIMDSVVPSDKGNYTCIVENEYGSINHTYQLDVVERSPHRPILQAGLPANKTVGSNVEFMCKVYSDPQPHIQWLKHIEVNGSKIGPDNLPYVQILKTAGVNTTDKEMEVLHLRNVSFEDAGEYTCLAGNSIGLSHHSAWLTVLEALEERPAVMTSPLYLEIIIYCTGAFLISCMVGSVIVYKMKSGTKKSDFHSQMAVHKLAKSIPLRRQVSADSSASMNSGVLLVRPSRLSSSGTPMLAGVSEYELPEDPRWELPRDRLVLGKPLGEGCFGQVVLAEAIGLDKDKPNRVTKVAVKMLKSDATEKDLSDLISEMEMMKMIGKHKNIINLLGACTQDGPLYVIVEYASKGNLREYLQARRPPGLEYCYNPSHNPEEQLSSKDLVSCAYQVRMEYLASKKCIHRDLAARNVLVTEDNVMKIADFGLARDIHHIDYYKKTTNGRLPVKWMAPEALFDRIYTHQSDVWSFGVLLWEIFTLGGSPYPGVPVEELFKLLKEGHRMDKPSNCTNELYMMMRDCWHAVPSQRPTFKQLVEDLDRIVTSNQEYLDLSMPLDQYSPSFPDTRSSTCSSGEDSVFSHEPLPEEPCLPRHPAQLANGGLKRR

SEQ ID NO: 434 - DNA, 3611 bp, Homo sapiens
cccctcgtagcgcattgcggcgacctcgccttccccggccgcgagccgccggccgcggagctcttgcgaccccgccaggacccgaacagagcccgggggcggcgggccggagccggggacgcgggcacacgcccgctcgcacaagccacggcggactctcccgaggcggaacctccacgccgagcgagggtcagtttgaaaaggaggatcgagctcactgtggagtatccatggagatgtggagccttgtcaccaacctctaactgcagaactgggatgtggagctggaagtgcctcctcttctgggctgtgctggtcacagccacactctgcaccgctaggccgtccccgaccttgcctgaacaagcccagccctggggagcccctgtggaagtggagtccttcctggtccaccccggtgacctgctgcagcttcgctgtcggctgcgggacgatgtgcagagcatcaactggctgcgggacggggtgcagctggcggaaagcaaccgcacccgcatcacaggggaggaggtggaggtgcaggactccgtgcccgcagactccggcctctatgcttgcgtaaccagcagcccctcgggcagtgacaccacctacttctccgtcaatgtttcagatgctctcccctcctcggaggatgatgatgatgatgatgactcctcttcagaggagaaagaaacagataacaccaaaccaaaccgtatgcccgtagctccatattggacatccccagaaaagatggaaaagaaattgcatgcagtgccggctgccaagacagtgaagttcaaatgcccttccagtgggaccccaaaccccacactgcgctggttgaaaaatggcaaagaattcaaacctgaccacagaattggaggctacaaggtccgttatgccacctggagcatcataatggactctgtggtgccctctgacaagggcaactacacctgcattgtggagaatgagtacggcagcatcaaccacacataccagctggatgtcgtggagcggtcccctcaccggcccatcctgcaagcagggttgcccgccaacaaaacagtggccctgggtagcaacgtggagttcatgtgtaaggtgtacagtgacccgcagccgcacatccagtggctaaagcacatcgaggtgaatgggagcaagattggcccagacaacctgccttatgtccagatcttgaagactgctggagttaataccaccgacaaagagatggaggtgcttcacttaagaaatgtctcctttgaggacgcaggggagtatacgtgcttggcgggtaactctatcggactctcccatcactctgcatggttgaccgttctggaagccctggaagagaggccggcagtgatgacctcgcccctgtacctggagatcatcatctattgcacaggggccttcctcatctcctgcatggtggggtcggtcatcgtctacaagatgaagagtggtaccaagaagagtgacttccacagccagatggctgtgcacaagctggccaagagcatccctctgcgcagacaggtgtctgctgactccagtgcatccatgaactctggggttcttctggttcggccatcacggctctcctccagtgggactcccatgctagcaggggtctctgagtatgagcttcccgaagaccctcgctgggagctgcctcgggacagactggtcttaggcaaacccctgggagagggctgctttgggcaggtggtgttggcagaggctatcgggctggacaaggacaaacccaaccgtgtgaccaaagtggctgtgaagatgttgaagtcggacgcaacagagaaagacttgtcagacctgatctcagaaatggagatgatgaagatgatcgggaagcataagaatatcatcaacctgctgggggcctgcacgcaggatggtcccttgtatgtcatcgtggagtatgcctccaagggcaacctgcgggagtacctgcaggcccggaggcccccagggctggaatactgctacaaccccagccacaacccagaggagcagctctcctccaaggacctggtgtcctgcgcctaccaggtggcccgaggcatggagtatctggcctccaagaagtgcatacaccgagacctggcagccaggaatgtcctggtgacagaggacaatgtgatgaagatagcagactttggcctcgcacgggacattcaccacatcgactactataaaaagacaaccaacggccgactgcctgtgaagtggatggcacccgaggcattatttgaccggatctacacccaccagagtgatgtgtggtctttcggggtgctcctgtgggagatcttcactctgggcggctccccataccccggtgtgcctgtggaggaacttttcaagctgctgaaggaggacctggaccgcatcgtggccttgacctccaaccaggagtacctggacctgtccatgcccctggaccagtactcccccagctttcccgacacccggagctctacgtgctcctcaggggaggattccgtcttctctcatgagccgctgcccgaggagccctgcctgccccgacacccagcccagcttgccaatggcggactcaaacgccgctgactgccacccacacgcccctcgcactctggtggcaggtgccttgtcctcagggctacagcagtagggaggtcagtgcttcgtgcctcgattgaaggtgacctctgccccagataggtggtgccagtggcttattaattccgatactagtttgctttgctgaccaaatgcctggtaccagaggatggtgaggcgaaggccaggttgggggcagtgttgtggccctggggcccagccccaaactgggggctctgtatatagctatgaagaaaacacaaagtgtataaatctgagtatatatttacatgtctttttaaaagggtcgttaccagagatttacccatcgggtaagatgctcctggtggctgggaggcatcagttgctatatattaaaaacaaaaaagaaaaaaaaggaaaatgtttttaaaaaggtcatatattttttgctacttttgctgttttatttttttaaattatgttctaaacctattttcagtttaggtccctcaataaaaattgctgctgcttcatttatctatgggctgtatgaaaagggtgggaatgtccactggaaagaagggacacccacgggccctggggctaggtctgtcccgagggcaccgcatgctcccggcgcaggttccttgtaacctcttcttcctaggtcctgcacccagacctcacgacgcacctcctgcctctccgctgcttttggaaagtcagaaaaagaagatgtctgcttcgagggcaggaaccccatccatgcagtagaggcgctgggcagagagtcaaggcccagcagccatcgaccatggatggtttcctccaaggaaaccggtggggttgggctggggagggggcacctacctaggaatagccacggggtagagctacagtgattaagaggaaagcaagggcgcggttgctcacgcctgtaatcccagcactttgggacaccgaggtgggcagatcacttcaggtcagga

SEQ ID NO: 435 - protein, 775 aa, Homo sapiens
MWSWKCLLFWAVLVTATLCTARPSPTLPEQAQPWGAPVEVESFLVHPGDLLQLRCRLRDDVQSINWLRDGVQLAESNRTRITGEEVEVQDSVPADSGACVTSSPSGSDTTYFSVNVSDALPSSEDDDDDDDSSSEEKETDNTKPNRMPVAPYWTSPEKMEKKLHAVPAAKTVKFKCPSSGTPNPTLRWLKNGKEFKPDHRIGGYKVRYATWSIIMDSVVPSDKGNYTCIVENEYGSINHTYQLDVVERSPHRPILQAGLPANKTVGSNVEFMCKVYSDPQPHIQWLKHIEVNGSKIGPDNLPYVQILKTAGVNTTDKEMEVLHLRNVSFEDAGEYTCLAGNSIGLSHHSAWLTVLEALEERPAVMTSPLYLEIIIYCTGAFLISCMVGSVIVYKMKSGTKKSDFHSQMAVHKLAKSIPLRRQVSADSSASMNSGVLLVRPSRLSSSGTPMLAGVSEYELPEDPRWELPRDRLVLGKPLGEGCFGQVVLAEAIGLDKDKPNRVTKVAVKMLKSDATEKDLSDLISEMEMMKMIGKHKNIINLLGACTQDGPLYVIVEYASKGNLREYLQARRPPGLEYCYNPSHNPEEQLSSKDLVSCAYQVRMEYLASKKCIHRDLAARNVLVTEDNVMKIADFGLARDIHHIDYYKKTTNGRLPVKWMAPEALFDRIYTHQSDVWSFGVLLWEIFTLGGSPYPGVPVEELFKLLKEDLDRIVTSNQEYLDLSMPLDQYSPSFPDTRSSTCSSGEDSVFSHEPLPEEPCLPRHPAQLANGGLKRR

SEQ ID NO: 436 - DNA, 3459 bp, Homo sapiens
cccctcgtagcgcattgcggcgacctcgccttccccggccgcgagccgccggccgcggagctcttgcgaccccgccaggacccgaacagagcccgggggcggcgggccggagccggggacgcgggcacacgcccgctcgcacaagccacggcggactctcccgaggcggaacctccacgccgagcgagggtcagtttgaaaaggaggatcgagctcactgtggagtatccatggagatgtggagccttgtcaccaacctctaactgcagaactgggatgtggagctggaagtgcctcctcttctgggctgtgctggtcacagccacactctgcaccgctaggccgtccccgaccttgcctgaacaagatgctctcccctcctcggaggatgatgatgatgatgatgactcctcttcagaggagaaagaaacagataacaccaaaccaaaccccgtagctccatattggacatccccagaaaagatggaaaagaaattgcatgcagtgccggctgccaagacagtgaagttcaaatgcccttccagtgggaccccaaaccccacactgcgctggttgaaaaatggcaaagaattcaaacctgaccacagaattggaggctacaaggtccgttatgccacctggagcatcataatggactctgtggtgccctctgacaagggcaactacacctgcattgtggagaatgagtacggcagcatcaaccacacataccagctggatgtcgtggagcggtcccctcaccggcccatcctgcaagcagggttgcccgccaacaaaacagtggccctgggtagcaacgtggagttcatgtgtaaggtgtacagtgacccgcagccgcacatccagtggctaaagcacatcgaggtgaatgggagcaagattggcccagacaacctgccttatgtccagatcttgaagactgctggagttaataccaccgacaaagagatggaggtgcttcacttaagaaatgtctcctttgaggacgcaggggagtatacgtgcttggcgggtaactctatcggactctcccatcactctgcatggttgaccgttctggaagccctggaagagaggccggcagtgatgacctcgcccctgtacctggagatcatcatctattgcacaggggccttcctcatctcctgcatggtggggtcggtcatcgtctacaagatgaagagtggtaccaagaagagtgacttccacagccagatggctgtgcacaagctggccaagagcatccctctgcgcagacaggtaacagaaagtgtctgctgactccagtgcatccatgaactctggggttcttctggttcggccatcacggctctcctccagtgggactcccatgctagcaggggtctctgagtatgagcttcccgaagaccctcgctgggagctgcctcgggacagactggtcttaggcaaacccctgggagagggctgctttgggcaggtggtgttggcagaggctatcgggctggacaaggacaaacccaaccgtgtgaccaaagtggctgtgaagatgttgaagtcggacgcaacagagaaagacttgtcagacctgatctcagaaatggagatgatgaagatgatcgggaagcataagaatatcatcaacctgctgggggcctgcacgcaggatggtcccttgtatgtcatcgtggagtatgcctccaagggcaacctgcgggagtacctgcaggcccggaggcccccagggctggaatactgctacaaccccagccacaacccagaggagcagctctcctccaaggacctggtgtcctgcgcctaccaggtggcccgaggcatggagtatctggcctccaagaagtgcatacaccgagacctggcagccaggaatgtcctggtgacagaggacaatgtgatgaagatagcagactttggcctcgcacgggacattcaccacatcgactactataaaaagacaaccaacggccgactgcctgtgaagtggatggcacccgaggcattatttgaccggatctacacccaccagagtgatgtgtggtctttcggggtgctcctgtgggagatcttcactctgggcggctccccataccccggtgtgcctgtggaggaacttttcaagctgctgaaggagggtcaccgcatggacaagcccagtaactgcaccaacgagctgtacatgatgatgcgggactgctggcatgcagtgccctcacagagacccaccttcaagcagctggtggaagacctggaccgcatcgtggccttgacctccaaccaggagtacctggacctgtccatgcccctggaccagtactcccccagctttcccgacacccggagctctacgtgctcctcaggggaggattccgtcttctctcatgagccgctgcccgaggagccctgcctgccccgacacccagcccagcttgccaatggcggactcaaacgccgctgactgccacccacacgcccctcgcactctggtggcaggtgccttgtcctcagggctacagcagtagggaggtcagtgcttcgtgcctcgattgaaggtgacctctgccccagataggtggtgccagtggcttattaattccgatactagtttgctttgctgaccaaatgcctggtaccagaggatggtgaggcgaaggccaggttgggggcagtgttgtggccctggggcccagccccaaactgggggctctgtatatagctatgaagaaaacacaaagtgtataaatctgagtatatatttacatgtctttttaaaagggtcgttaccagagatttacccatcgggtaagatgctcctggtggctgggaggcatcagttgctatatattaaaaacaaaaaagaaaaaaaaggaaaatgtttttaaaaaggtcatatattttttgctacttttgctgttttatttttttaaattatgttctaaacctattttcagtttaggtccctcaataaaaattgctgctgcttcatttatctatgggctgtatgaaaagggtgggaatgtccactggaaagaagggacacccacgggccctggggctaggtctgtcccgagggcaccgcatgctcccggcgcaggttccttgtaacctcttcttcctaggtcctgcacccagacctcacgacgcacctcctgcctctccgctgcttttggaaagtcagaaaaagaagatgtctgcttcgagggcaggaaccccatccatgcagtagaggcgctgggcagagagtcaaggcccagcagccatcgaccatggatggtttcctccaaggaaaccggtggggttgggctggggagggggcacctacctaggaatagccacggggtagagctacagtgattaagaggaaagcaagggcgcggttgctcacgcctgtaatcccagcactttgggacaccgaggtgggcagatcacttcaggtcagga

SEQ ID NO: 437 - protein, 382 aa, Homo sapiens
MNSGVLLVRPSRLSSSGTPMLAGVSEYELPEDPRWELPRDRLVLGKPLGEGCFGQVVLAEAIGLDKDKPNRVTKVAVKMLKSDATEKDLSDLISEMEMMKMIGKHKNIINLLGACTQDGPLYVIVEYASKGNLREYLQARRPPGLEYCYNPSHNPEEQLSSKDLVSCAYQVRMEYLASKKCIHRDLAARNVLVTEDNVMKIADFGLARDIHHIDYYKKTTNGRLPVKWMAPEALFDRIYTHQSDVWSFGVLLWEIFTLGGSPYPGVPVEELFKLLKEGHRMDKPSNCTNELYMMMRDCWHAVPSQRPTFKQLVEDLDRIVTSNQEYLDLSMPLDQYSPSFPDTRSSTCSSGEDSVFSHEPLPEEPCLPRHPAQLANGGLKRR

SEQ ID NO: 438 - DNA, 3449 bp, Homo sapiens
cccctcgtagcgcattgcggcgacctcgccttccccggccgcgagccgccggccgcggagctcttgcgaccccgccaggacccgaacagagcccgggggcggcgggccggagccggggacgcgggcacacgcccgctcgcacaagccacggcggactctcccgaggcggaacctccacgccgagcgagggtcagtttgaaaaggaggatcgagctcactgtggagtatccatggagatgtggagccttgtcaccaacctctaactgcagaactgggatgtggagctggaagtgcctcctcttctgggctgtgctggtcacagccacactctgcaccgctaggccgtccccgaccttgcctgaacaagatgctctcccctcctcggaggatgatgatgatgatgatgactcctcttcagaggagaaagaaacagataacaccaaaccaaaccccgtagctccatattggacatccccagaaaagatggaaaagaaattgcatgcagtgccggctgccaagacagtgaagttcaaatgcccttccagtgggaccccaaaccccacactgcgctggttgaaaaatggcaaagaattcaaacctgaccacagaattggaggctacaaggtccgttatgccacctggagcatcataatggactctgtggtgccctctgacaagggcaactacacctgcattgtggagaatgagtacggcagcatcaaccacacataccagctggatgtcgtggagcggtcccctcaccggcccatcctgcaagcagggttgcccgccaacaaaacagtggccctgggtagcaacgtggagttcatgtgtaaggtgtacagtgacccgcagccgcacatccagtggctaaagcacatcgaggtgaatgggagcaagattggcccagacaacctgccttatgtccagatcttgaagactgctggagttaataccaccgacaaagagatggaggtgcttcacttaagaaatgtctcctttgaggacgcaggggagtatacgtgcttggcgggtaactctatcggactctcccatcactctgcatggttgaccgttctggaagccctggaagagaggccggcagtgatgacctcgcccctgtacctggagatcatcatctattgcacaggggccttcctcatctcctgcatggtggggtcggtcatcgtctacaagatgaagagtggtaccaagaagagtgacttccacagccagatggctgtgcacaagctggccaagagcatccctctgcgcagacaggtgtctgctgactccagtgcatccatgaactctggggttcttctggttcggccatcacggctctcctccagtgggactcccatgctagcaggggtctctgagtatgagcttcccgaagaccctcgctgggagctgcctcgggacagactggtcttaggcaaacccctgggagagggctgctttgggcaggtggtgttggcagaggctatcgggctggacaaggacaaacccaaccgtgtgaccaaagtggctgtgaagatgttgaagtcggacgcaacagagaaagacttgtcagacctgatctcagaaatggagatgatgaagatgatcgggaagcataagaatatcatcaacctgctgggggcctgcacgcaggatggtcccttgtatgtcatcgtggagtatgcctccaagggcaacctgcgggagtacctgcaggcccggaggcccccagggctggaatactgctacaaccccagccacaacccagaggagcagctctcctccaaggacctggtgtcctgcgcctaccaggtggcccgaggcatggagtatctggcctccaagaagtgcatacaccgagacctggcagccaggaatgtcctggtgacagaggacaatgtgatgaagatagcagactttggcctcgcacgggacattcaccacatcgactactataaaaagacaaccaacggccgactgcctgtgaagtggatggcacccgaggcattatttgaccggatctacacccaccagagtgatgtgtggtctttcggggtgctcctgtgggagatcttcactctgggcggctccccataccccggtgtgcctgtggaggaacttttcaagctgctgaaggagggtcaccgcatggacaagcccagtaactgcaccaacgagctgtacatgatgatgcgggactgctggcatgcagtgccctcacagagacccaccttcaagcagctggtggaagacctggaccgcatcgtggccttgacctccaaccaggagtacctggacctgtccatgcccctggaccagtactcccccagctttcccgacacccggagctctacgtgctcctcaggggaggattccgtcttctctcatgagccgctgcccgaggagccctgcctgccccgacacccagcccagcttgccaatggcggactcaaacgccgctgactgccacccacacgcccctcgcactctggtggcaggtgccttgtcctcagggctacagcagtagggaggtcagtgcttcgtgcctcgattgaaggtgacctctgccccagataggtggtgccagtggcttattaattccgatactagtttgctttgctgaccaaatgcctggtaccagaggatggtgaggcgaaggccaggttgggggcagtgttgtggccctggggcccagccccaaactgggggctctgtatatagctatgaagaaaacacaaagtgtataaatctgagtatatatttacatgtctttttaaaagggtcgttaccagagatttacccatcgggtaagatgctcctggtggctgggaggcatcagttgctatatattaaaaacaaaaaagaaaaaaaaggaaaatgtttttaaaaaggtcatatattttttgctacttttgctgttttatttttttaaattatgttctaaacctattttcagtttaggtccctcaataaaaattgctgctgcttcatttatctatgggctgtatgaaaagggtgggaatgtccactggaaagaagggacacccacgggccctggggctaggtctgtcccgagggcaccgcatgctcccggcgcaggttccttgtaacctcttcttcctaggtcctgcacccagacctcacgacgcacctcctgcctctccgctgcttttggaaagtcagaaaaagaagatgtctgcttcgagggcaggaaccccatccatgcagtagaggcgctgggcagagagtcaaggcccagcagccatcgaccatggatggtttcctccaaggaaaccggtggggttgggctggggagggggcacctacctaggaatagccacggggtagagctacagtgattaagaggaaagcaagggcgcggttgctcacgcctgtaatcccagcactttgggacaccgaggtgggcagatcacttcaggtcagga

SEQ ID NO: 439 - protein, 723 aa, Homo sapiens
MWSWKCLLFWAVLVTATLCTARPSPTLPEQDALPSSEDDDDDDDSSSEEKETDNTKPNPVAPYWTSPEKMEKKLHAVPAAKTVKFKCPSSGTPNPTLRWLKNGKEFKPDHRIGGYKVRYATWSIIMDSVVPSDKGNYTCIVENEYGSINHTYQLDVVERSPHRPILQAGLPANKTVGSNVEFMCKVYSDPQPHIQWLKHIEVNGSKIGPDNLPYVQILKTAGVNTTDKEMEVLHLRNVSFEDAGEYTCLAGNSIGLSHHSAWLTVLEALEERPAVMTSPLYLEIIIYCTGAFLISCMVGSVIVYKMKSGTKKSDFHSQMAVHKLAKSIPLRRQVSADSSASMNSGVLLVRPSRLSSSGTPMLAGVSEYELPEDPRWELPRDRLVLGKPLGEGCFGQVVLAEAIGLDKDKPNRVTKVAVKMLKSDATEKDLSDLISEMEMMKMIGKHKNIINLLGACTQDGPLYVIVEYASKGNLREYLQARRPPGLEYCYNPSHNPEEQLSSKDLVSCAYQVRMEYLASKKCIHRDLAARNVLVTEDNVMKIADFGLARDIHHIDYYKKTTNGRLPVKWMAPEALFDRIYTHQSDVWSFGVLLWEIFTLGGSPYPGVPVEELFKLLKEGHRMDKPSNCTNELYMMMRDCWHAVPSQRPTFKQLVEDLDRIVTSNQEYLDLSMPLDQYSPSFPDTRSSTCSSGEDSVFSHEPLPEEPCLPRHPAQLANGGLKRR

SEQ ID NO: 440 - DNA, 1182 bp, Homo sapiens
cccctcgtagcgcattgcggcgacctcgccttccccggccgcgagccgccggccgcggagctcttgcgaccccgccaggacccgaacagagcccgggggcggcgggccggagccggggacgcgggcacacgcccgctcgcacaagccacggcggactctcccgaggcggaacctccacgccgagcgagggtcagtttgaaaaggaggatcgagctcactgtggagtatccatggagatgtggagccttgtcaccaacctctaactgcagaactgggatgtggagctggaagtgcctcctcttctgggctgtgctggtcacagccacactctgcaccgctaggccgtccccgaccttgcctgaacaagatgctctcccctcctcggaggatgatgatgatgatgatgactcctcttcagaggagaaagaaacagataacaccaaaccaaaccgtatgcccgtagctccatattggacatccccagaaaagatggaaaagaaattgcatgcagtgccggctgccaagacagtgaagttcaaatgcccttccagtgggaccccaaaccccacactgcgctggttgaaaaatggcaaagaattcaaacctgaccacagaattggaggctacaaggtccgttatgccacctggagcatcataatggactctgtggtgccctctgacaagggcaactacacctgcattgtggagaatgagtacggcagcatcaaccacacataccagctggatgtcgtggagcggtcccctcaccggcccatcctgcaagcagggttgcccgccaacaaaacagtggccctgggtagcaacgtggagttcatgtgtaaggtgtacagtgacccgcagccgcacatccagtggctaaagcacatcgaggtgaatgggagcaagattggcccagacaacctgccttatgtccagatcttgaaggtaatcatggcaccagtcttcgtgggccagtctactgggaaggagaccactgtctcgggggctcaagttcctgtgggcaggctcagttgcccccgaatgggatcattcctcacgcttcaggcacacacactccatctcagtagggatctagccacatcccccaggactagtaacagaggtcacaaagtggaggtgagctgggaacagagggctgcagggatgggtggtgctggtctg

SEQ ID NO: 441 - protein, 300 aa, Homo sapiens
MWSWKCLLFWAVLVTATLCTARPSPTLPEQDALPSSEDDDDDDDSSSEEKETDNTKPNRMPVAPYWTSPEKMEKKLHAVPAAKTVKFKCPSSGTPNPTLRWLKNGKEFKPDHRIGGYKVRYATWSIIMDSVVPSDKGNYTCIVENEYGSINHTYQLDVVERSPHRPILQAGLPANKTVGSNVEFMCKVYSDPQPHIQWLKHIEVNGSKIGPDNLPYVQILKVIMAPVFVGQSTGKETTVSGAQVPVGRLSCPRMGSFLTLQAHTLHLSRDLATSPRTSNRGHKVEVSWEQRAAGMGGAGL

SEQ ID NO: 442 - DNA, 3747 bp, Homo sapiens
cccctcgtagcgcattgcggcgacctcgccttccccggccgcgagccgccggccgcggagctcttgcgaccccgccaggacccgaacagagcccgggggcggcgggccggagccggggacgcgggcacacgcccgctcgcacaagccacggcggactctcccgaggcggaacctccacgccgagcgagggtcagtttgaaaaggaggatcgagctcactgtggagtatccatggagatgtggagccttgtcaccaacctctaactgcagaactgggatgtggagctggaagtgcctcctcttctgggctgtgctggtcacagccacactctgcaccgctaggccgtccccgaccttgcctgaacaagcccagccctggggagcccctgtggaagtggagtccttcctggtccaccccggtgacctgctgcagcttcgctgtcggctgcgggacgatgtgcagagcatcaactggctgcgggacggggtgcagctggcggaaagcaaccgcacccgcatcacaggggaggaggtggaggtgcaggactccgtgcccgcagactccggcctctatgcttgcgtaaccagcagcccctcgggcagtgacaccacctacttctccgtcaatgtttcagatgctctcccctcctcggaggatgatgatgatgatgatgactcctcttcagaggagaaagaaacagataacaccaaaccaaaccgtatgcccgtagctccatattggacatccccagaaaagatggaaaagaaattgcatgcagtgccggctgccaagacagtgaagttcaaatgcccttccagtgggaccccaaaccccacactgcgctggttgaaaaatggcaaagaattcaaacctgaccacagaattggaggctacaaggtccgttatgccacctggagcatcataatggactctgtggtgccctctgacaagggcaactacacctgcattgtggagaatgagtacggcagcatcaaccacacataccagctggatgtcgtggagcggtcccctcaccggcccatcctgcaagcagggttgcccgccaacaaaacagtggccctgggtagcaacgtggagttcatgtgtaaggtgtacagtgacccgcagccgcacatccagtggctaaagcacatcgaggtgaatgggagcaagattggcccagacaacctgccttatgtccagatcttgaagactgctggagttaataccaccgacaaagagatggaggtgcttcacttaagaaatgtctcctttgaggacgcaggggagtatacgtgcttggcgggtaactctatcggactctcccatcactctgcatggttgaccgttctggaagccctggaagagaggccggcagtgatgacctcgcccctgtacctggagatcatcatctattgcacaggggccttcctcatctcctgcatggtggggtcggtcatcgtctacaagatgaagagtggtaccaagaagagtgacttccacagccagatggctgtgcacaagctggccaagagcatccctctgcgcagacaggtgtctgctgactccagtgcatccatgaactctggggttcttctggttcggccatcacggctctcctccagtgggactcccatgctagcaggggtctctgagtatgagcttcccgaagaccctcgctgggagctgcctcgggacagactggtcttaggcaaacccctgggagagggctgctttgggcaggtggtgttggcagaggctatcgggctggacaaggacaaacccaaccgtgtgaccaaagtggctgtgaagatgttgaagtcggacgcaacagagaaagacttgtcagacctgatctcagaaatggagatgatgaagatgatcgggaagcataagaatatcatcaacctgctgggggcctgcacgcaggatggtcccttgtatgtcatcgtggagtatgcctccaagggcaacctgcgggagtacctgcaggcccggaggcccccagggctggaatactgctacaaccccagccacaacccagaggagcagctctcctccaaggacctggtgtcctgcgcctaccaggtggcccgaggcatggagtatctggcctccaagaaggtgtggaacctgaaggctcccctggtgcatacaccgagacctggcagccaggaatgtcctggtgacagaggacaatgtgatgaagatagcagactttggcctcgcacgggacattcaccacatcgactactataaaaagacaaccaacggccgactgcctgtgaagtggatggcacccgaggcattatttgaccggatctacacccaccagagtgatgtgtggtctttcggggtgctcctgtgggagatcttcactctgggcggctccccataccccggtgtgcctgtggaggaacttttcaagctgctgaaggagggtcaccgcatggacaagcccagtaactgcaccaacgagctgtacatgatgatgcgggactgctggcatgcagtgccctcacagagacccaccttcaagcagctggtggaagacctggaccgcatcgtggccttgacctccaaccaggagtacctggacctgtccatgcccctggaccagtactcccccagctttcccgacacccggagctctacgtgctcctcaggggaggattccgtcttctctcatgagccgctgcccgaggagccctgcctgccccgacacccagcccagcttgccaatggcggactcaaacgccgctgactgccacccacacgcccctcgcactctggtggcaggtgccttgtcctcagggctacagcagtagggaggtcagtgcttcgtgcctcgattgaaggtgacctctgccccagataggtggtgccagtggcttattaattccgatactagtttgctttgctgaccaaatgcctggtaccagaggatggtgaggcgaaggccaggttgggggcagtgttgtggccctggggcccagccccaaactgggggctctgtatatagctatgaagaaaacacaaagtgtataaatctgagtatatatttacatgtctttttaaaagggtcgttaccagagatttacccatcgggtaagatgctcctggtggctgggaggcatcagttgctatatattaaaaacaaaaaagaaaaaaaaggaaaatgtttttaaaaaggtcatatattttttgctacttttgctgttttatttttttaaattatgttctaaacctattttcagtttaggtccctcaataaaaattgctgctgcttcatttatctatgggctgtatgaaaagggtgggaatgtccactggaaagaagggacacccacgggccctggggctaggtctgtcccgagggcaccgcatgctcccggcgcaggttccttgtaacctcttcttcctaggtcctgcacccagacctcacgacgcacctcctgcctctccgctgcttttggaaagtcagaaaaagaagatgtctgcttcgagggcaggaaccccatccatgcagtagaggcgctgggcagagagtcaaggcccagcagccatcgaccatggatggtttcctccaaggaaaccggtggggttgggctggggagggggcacctacctaggaatagccacggggtagagctacagtgattaagaggaaagcaagggcgcggttgctcacgcctgtaatcccagcactttgggacaccgaggtgggcagatcacttcaggtcagga

SEQ ID NO: 443 - protein, 654 aa, Homo sapiens
MWSWKCLLFWAVLVTATLCTARPSPTLPEQAQPWGAPVEVESFLVHPGDLLQLRCRLRDDVQSINWLRDGVQLAESNRTRITGEEVEVQDSVPADSGACVTSSPSGSDTTYFSVNVSDALPSSEDDDDDDDSSSEEKETDNTKPNRMPVAPYWTSPEKMEKKLHAVPAAKTVKFKCPSSGTPNPTLRWLKNGKEFKPDHRIGGYKVRYATWSIIMDSVVPSDKGNYTCIVENEYGSINHTYQLDVVERSPHRPILQAGLPANKTVGSNVEFMCKVYSDPQPHIQWLKHIEVNGSKIGPDNLPYVQILKTAGVNTTDKEMEVLHLRNVSFEDAGEYTCLAGNSIGLSHHSAWLTVLEALEERPAVMTSPLYLEIIIYCTGAFLISCMVGSVIVYKMKSGTKKSDFHSQMAVHKLAKSIPLRRQVSADSSASMNSGVLLVRPSRLSSSGTPMLAGVSEYELPEDPRWELPRDRLVLGKPLGEGCFGQVVLAEAIGLDKDKPNRVTKVAVKMLKSDATEKDLSDLISEMEMMKMIGKHKNIINLLGACTQDGPLYVIVEYASKGNLREYLQARRPPGLEYCYNPSHNPEEQLSSKDLVSCAYQVRMEYLASKKVWNLKAPLVHTPRPGSQECPGDRGQCDEDSRLWPRTGHSPHRLL

SEQ ID NO: 444 - DNA, 4452 bp, Homo sapiens
gctcggagcgctcttgcggccacaggcgcggcgtcctcggcggcgggcggcagctagcgggagccgggacgccggtgcagccgcagcgcgcggaggaacccgggtgtgccgggagctgggcggccacgtccggacgggaccgagacccctcgtagcgcattgcggcgacctcgccttccccggccgcgagcgcgccgctgcttgaaaagccgcggaacccaaggacttttctccggtccgagctcggggcgccccgcagggcgcacggtacccgtgctgcagtcgggcacgccgcggcgccggggcctccgcagggcgatggagcccggtctgcaaggaaagtgaggcgccgccgctgcgttctggaggaggggggcacaaggtctggagaccccgggtggcggacgggagccctccccccgccccgcctccggggcaccagctccggctccattgttcccgcccgggctggaggcgccgagcaccgagcgccgccgggagtcgagcgccggccgcggagctcttgcgaccccgccaggacccgaacagagcccgggggcggcgggccggagccggggacgcgggcacacgcccgctcgcacaagccacggcggactctcccgaggcggaacctccacgccgagcgagggtcagtttgaaaaggaggatcgagctcactgtggagtatccatggagatgtggagccttgtcaccaacctctaactgcagaactgggatgtggagctggaagtgcctcctcttctgggctgtgctggtcacagccacactctgcaccgctaggccgtccccgaccttgcctgaacaagcccagccctggggagcccctgtggaagtggagtccttcctggtccaccccggtgacctgctgcagcttcgctgtcggctgcgggacgatgtgcagagcatcaactggctgcgggacggggtgcagctggcggaaagcaaccgcacccgcatcacaggggaggaggtggaggtgcaggactccgtgcccgcagactccggcctctatgcttgcgtaaccagcagcccctcgggcagtgacaccacctacttctccgtcaatgtttcagatgctctcccctcctcggaggatgatgatgatgatgatgactcctcttcagaggagaaagaaacagataacaccaaaccaaaccgtatgcccgtagctccatattggacatccccagaaaagatggaaaagaaattgcatgcagtgccggctgccaagacagtgaagttcaaatgcccttccagtgggaccccaaaccccacactgcgctggttgaaaaatggcaaagaattcaaacctgaccacagaattggaggctacaaggtccgttatgccacctggagcatcataatggactctgtggtgccctctgacaagggcaactacacctgcattgtggagaatgagtacggcagcatcaaccacacataccagctggatgtcgtggagcggtcccctcaccggcccatcctgcaagcagggttgcccgccaacaaaacagtggccctgggtagcaacgtggagttcatgtgtaaggtgtacagtgacccgcagccgcacatccagtggctaaagcacatcgaggtgaatgggagcaagattggcccagacaacctgccttatgtccagatcttgaagactgctggagttaataccaccgacaaagagatggaggtgcttcacttaagaaatgtctcctttgaggacgcaggggagtatacgtgcttggcgggtaactctatcggactctcccatcactctgcatggttgaccgttctggaagccctggaagagaggccggcagtgatgacctcgcccctgtacctggagatcatcatctattgcacaggggccttcctcatctcctgcatggtggggtcggtcatcgtctacaagatgaagagtggtaccaagaagagtgacttccacagccagatggctgtgcacaagctggccaagagcatccctctgcgcagacaggtaacagaaagtgtctgctgactccagtgcatccatgaactctggggttcttctggttcggccatcacggctctcctccagtgggactcccatgctagcaggggtctctgagtatgagcttcccgaagaccctcgctgggagctgcctcgggacagactggtcttaggcaaacccctgggagagggctgctttgggcaggtggtgttggcagaggctatcgggctggacaaggacaaacccaaccgtgtgaccaaagtggctgtgaagatgttgaagtcggacgcaacagagaaagacttgtcagacctgatctcagaaatggagatgatgaagatgatcgggaagcataagaatatcatcaacctgctgggggcctgcacgcaggatggtcccttgtatgtcatcgtggagtatgcctccaagggcaacctgcgggagtacctgcaggcccggaggcccccagggctggaatactgctacaaccccagccacaacccagaggagcagctctcctccaaggacctggtgtcctgcgcctaccaggtggcccgaggcatggagtatctggcctccaagaagtgcatacaccgagacctggcagccaggaatgtcctggtgacagaggacaatgtgatgaagatagcagactttggcctcgcacgggacattcaccacatcgactactataaaaagacaaccaacggccgactgcctgtgaagtggatggcacccgaggcattatttgaccggatctacacccaccagagtgatgtgtggtctttcggggtgctcctgtgggagatcttcactctgggcggctccccataccccggtgtgcctgtggaggaacttttcaagcagctggtggaagacctggaccgcatcgtggccttgacctccaaccaggagtacctggacctgtccatgcccctggaccagtactcccccagctttcccgacacccggagctctacgtgctcctcaggggaggattccgtcttctctcatgagccgctgcccgaggagccctgcctgccccgacacccagcccagcttgccaatggcggactcaaacgccgctgactgccacccacacgccctccccagactccaccgtcagctgtaaccctcacccacagcccctgctgggcccaccacctgtccgtccctgtcccctttcctgctggcaggagccggctgcctaccaggggccttcctgtgtggcctgccttcaccccactcagctcacctctccctccacctcctctccacctgctggtgagaggtgcaaagaggcagatctttgctgccagccacttcatcccctcccagatgttggaccaacacccctccctgccaccaggcactgcctggagggcagggagtgggagccaatgaacaggcatgcaagtgagagcttcctgagctttctcctgtcggtttggtctgttttgccttcacccataagcccctcgcactctggtggcaggtgccttgtcctcagggctacagcagtagggaggtcagtgcttcgtgcctcgattgaaggtgacctctgccccagataggtggtgccagtggcttattaattccgatactagtttgctttgctgaccaaatgcctggtaccagaggatggtgaggcgaaggccaggttgggggcagtgttgtggccctggggcccagccccaaactgggggctctgtatatagctatgaagaaaacacaaagtgtataaatctgagtatatatttacatgtctttttaaaagggtcgttaccagagatttacccatcgggtaagatgctcctggtggctgggaggcatcagttgctatatattaaaaacaaaaaagaaaaaaaaggaaaatgtttttaaaaaggtcatatattttttgctacttttgctgttttatttttttaaattatgttctaaacctattttcagtttaggtccctcaataaaaattgctgctgcttcatttatctatgggctgtatgaaaagggtgggaatgtccactggaaagaagggacacccacgggccctggggctaggtctgtcccgagggcaccgcatgctcccggcgcaggttccttgtaacctcttcttcctaggtcctgcacccagacctcacgacgcacctcctgcctctccgctgcttttggaaagtcagaaaaagaagatgtctgcttcgagggcaggaaccccatccatgcagtagaggcgctgggcagagagtcaaggcccagcagccatcgaccatggatggtttcctccaaggaaaccggtggggttgggctggggagggggcacctacctaggaatagccacggggtagagctacagtgattaagaggaaagcaagggcgcggttgctcacgcctgtaatcccagcactttgggacaccgaggtgggcagatcacttcaggtcagga

SEQ ID NO: 445 - protein, 428 aa, Homo sapiens
MWSWKCLLFWAVLVTATLCTARPSPTLPEQAQPWGAPVEVESFLVHPGDLLQLRCRLRDDVQSINWLRDGVQLAESNRTRITGEEVEVQDSVPADSGACVTSSPSGSDTTYFSVNVSDALPSSEDDDDDDDSSSEEKETDNTKPNRMPVAPYWTSPEKMEKKLHAVPAAKTVKFKCPSSGTPNPTLRWLKNGKEFKPDHRIGGYKVRYATWSIIMDSVVPSDKGNYTCIVENEYGSINHTYQLDVVERSPHRPILQAGLPANKTVGSNVEFMCKVYSDPQPHIQWLKHIEVNGSKIGPDNLPYVQILKTAGVNTTDKEMEVLHLRNVSFEDAGEYTCLAGNSIGLSHHSAWLTVLEALEERPAVMTSPLYLEIIIYCTGAFLISCMVGSVIVYKMKSGTKKSDFHSQMAVHKLAKSIPLRRQVTESVC

SEQ ID NO: 446 - DNA, 235962 bp, Mus musculus
  misc_feature (1)...(235962): n = A,T,C or G
aatatagaccaaaccaccataaagaaaacatccaaaggactttcttctatatagatcttagaacaatgatactggaaaaggcttagaggtgaggtcactccatccttcttcctgccctcaacgacaacactttaaatcttcccataggtcggtgctgcacttcaattaacaaatcccctagcaatgacaggcctttggaaagcatggccttcttaagtcgcccccatcgtaaatcacactggcctcacagagcttcctctaagataaaggtgcctctgtgtgccacttttatttgtgtcctcctaattaaaatgacaagatgtgtgaggagtgccgggagtccaagaaattgatccctctatagacagactctcaatccccttgcctcctctcatcaaacagataccctctttgaaaaaaacaaaacaaaacacaggaactataagtgtttctgtcaccttttgttgccttcattcactcatccacactggagcctgggtgcaggcatcttcaactatagtaaaaatagtgtctaatgtcatgccactgtcctgttcagagaacctgagacatcaacaagaaaaaagataatttggtccttttaagttgattgggaaaggattttattttttaacttttattattttattataatgttgattattattttagtatggggatctatggatgttcccaccaaagataacccttaccgaactactgaacacctttgtggaaatccagctatgattggttccaggaagtgctctatcagggatagcagcaggcatagagctgtgttattttcaactagcttttagaatcccaaattcagctgggcgtggtggtgcacacctttaatcccagcacttgggaggcagaggcaggtagatttctgagtttaaggccatcctggtctacagagtgagttccaggacagccagggctacacagagaaaccctgtctctaaaaacaaacaaagaaacaaacaaaaccccaactcctagaggtttatactgattttgctctatgcagtgtttataagaaacccttgtctcacaatgatggaagatgaccaggacatatttatgttttatggaccacgtgaactgaggactcctgtagtgcctgtgtgtgcccatgtaatcacacatgtcatcaacgcaccaaggtttattctcatacccaaactctattctcgacccttccctctctagttagaaaatttgggttattcttgtaactggctttggcaggattactattgtttaaaaataaacttgaaaaaaaaaaagaagtttctcacatcctcaataacttgtaacaatcaatctacttgctagggaccatccctgccattgctgaattattcatgagtgatgattaacctgtgctgccctttccttctccctggagattcctgcagttactataggaacaagcacggggaacaatgcaggcattacattacgtcactcaagaccacactgtattaaaaaaagctcagctcaggagtggatttgttcattttccaggtgactaatgcacttctcaggaagtaagcaagtgaatgattttttttttttttcaagacagggtttctctgtgtagccctgactgtcctggaactcagtctgtagaccaggctggccttgaactcagaaatctgcctgcctctgcctcccgagtgctgggattaaaggcgtgcgccaccagtgcctggccagcaagtgaatgattttaagctaaatacttttcaataattatttcatagtatcttccatggaaaatgaaagcaattggatcaatgttgtattgccatgaagttttgtttaaaaaaatgaaaacaaacaaacaaacaaacaaacaaacaaaaacaagcaacctacagtggcatgtataaatgtaggatttcttaaagttttatttctatttatgtgtgtctgcatgtgtgtctacatgtgtctaggtgtctacatagaccagaagaggccatttagattacttaaatttggagtttcagatggttgaaggccttgcaatctgaatgctggaatttgaacccgggtcctttagaggagcaggaagaggtctcagctgctaggctatctctccagccctataaatgtagttttaaagcaatgcaataatcctaagaaagacaatgagttgacttttaaaggtttaaaggtatcatcccagtcacaaatattgtatttaataactcaactctttgttaattctaatatttgatttaaactgatgtgaaactgggctagaaaagcaccaaaatcatactgaagcgattgaaggtggtagcaattctcctcgggctgccagagtgttctcagtagctccaagccatcttttgatctcaatcatttttggttttgcgacttccacatagatgcagctctccaggtcaatgtgtctgacagtcagaactatcacataaggactgcagcctccaagctacctgagcagctcctgttacagcaagagctttagcggatggtctccaccctggcacatctgctcccttatcttctttaccagcttttctctaaagaaaacacagctggaccaactgaacacgatttccttaggttccacatgcttggcttcgggcatctttcccaggtggaagcatattgtttgcctaacagcctgatagaacaccgtctgtcacgtgttgtcatggctgtctatgcaatgtaccttcattatagcgccacaacaaatttaagccaaagaaggccgtaaaatttacctttttgataacttcccttataactgaaggctttctgtataagcaacaagtatctgttatgactgtaaggaaatggaatttttacaatgctcataggactatctagtaagccttgggctatgaaatagcaattgtcaaaatgtactgatgtgccaggcgtggtgacacactcctttaatcctagcactcaggaggcagaggcagaggaaccctgtctcgaaaaaccaaaaaagaaaaaaaaaaaaaagaaaaaaaaagaaagaaaagaaaagaaaagtactgatgcgcccattaagtaacttccaagactgtggagaaagggattattatagtctgtatactttttagtgaaatatacagtaaaccttgattctagtagtaaattttaagaattcttttttttttttctgtgcagaaagtgaatgtctcaagggaaaatgccttgaaaattgatatttgaggttcccatgaaattaccatcttgccatgtgataagctgagtggttatacaagcacccatatttgtctgatctttagtatcttaagctgaaactgatgtgctcagagaaggtttaacgggtcctggagaacaagtcccacagaaaacagagctcgacaaactagcatagagaagacaaagaacttggaaccgagtcctcatggaaaacaaaagaaatggtcagaaatcggctctcacgtttttaaattaatagaagatgctaactctattaacactcagttatgaaactaaaagatttaggattgtgagaaaaaaaatgctttcttagcaaatagagccacagtagaaatcacagggaacattttgattcagtagacccacagtagaaacagatgtttgagcatgagatgtttgagcatcctttgcagttcccatgcaccaatatttactttcatgtacatccttgatgaccgtaggatttttcatttgtacaagattaagataaaaggtggaggcagaactaagaatttagaatgtaaaaggagatggactggtgtcccagaaaaaaaaaaaattgtaccaagatcttggaaaagttatagatcagagaaagaaaaagtcattcagattatcatcactacacccagggaagagagacagagtggattgagccatctgaaagaaaggctgtggtgtttaaaccatgaaaagaatgggggagcagaggtgggactgggaacagaggttaagaaacccaaagttattgatttatttgtaatgcaccgaccactcggaaggagcaacacatggagtgtctagtgtcttcagcaaagcaaaatacatttgtctgtacttggctaaagcaagagaataaagaaaaaggccagtgagtgtaacaaacaccattaggaacttggacaggcctagtagctttatttgaatgaattaaaaatgggtttgagggcattcttgggtgttttaagcaacatatttcacattccagtcctttccccagtatttagcagctcctagaacaaaccctctttattcaaggactcagctgccagcaccccatgaaaaatccactccatcctgtttaaggtctcctgtttggtcagacagcttttggaggtatttggatttaagttaatcatgtgttctatcttctcaggtggccttggtatttgcttcccggatccaccctgccttgtcttctgacagagttgacctttgccttacactcctatctctgggtcagctatcttcttccctcagagtccacaaggaataattccattctggaaacttccttcataagtatggggatcacacactcctacttgcacctaatgttttcttacagtaaaatgcgaaccaccatgaattctgtattttattgttggtttacttgtctgcttgttttactttaaagaacctgaacccaagggaaggtggaggagactgagagatgaactatatctatttattaatatatggccccatagcaacattgtatatgtagtgaatagcccttacataccagaaattaaatgtgctaagctttttcatatctcttaagtgctaagatcctctttctgctatgtaaaaacataacagaaaaatgagaaaggatcataaatcaggatggcaactccaagaactcaggcttttcctggtcatttgtatggctttctctaaaagtgagcctttggaggaaagaaatttccccttatattaaatttgtagctttgagacggtagctgctacaaaagggcaactatagatttttagtaagtacattgtagagtaaggagtagacaggagacctgatagtcaaagctggaatttcatggtggtggagtgtttgggaaagaggagcttattctgaatgtcatgcattgtacaatgatttcatctttgctgaagaaactctgcatgcagcaaggtaacagaataaatgataatgtccaagaatgagtgagcgattgcttttcacattgatcccagagacctctgaagcagatggtctgtcttgtctattgatttgaggaaaagctgagccactgagccggatgtaaaagtccccaactcctccttagaggtcagccagaccttgggaggattgtctagttttccttttctaataaaagttgattaagagtcatggacctaggtttgaattagaataataattactttcttgaacaataagaacactattaaaaggaaaaatgttgttaaaagaggaactttttattaaggcactactggagagacttttacatgagacagatctgctgagtcagggatgtctaggaaaagcataatcaagaaataggttttttttagatgttagagagtctgaattgtcctctgtacagaaaaataccaaccaatcttatcgttgtgtaaatgtaccaaatagtttccattgtcaaacttccctcttatctccctgccagtggttaaattgtcaaaggctggatcattgtgtaacatgtatctgttactatttatgagaaagctagtgggtgtttttcatagcattcaatgcagacagcagcattttatatccttctttcgtatggtggtttgaatgagactgtctcccatgggcccacatatttgaacacttgctccttagttactgtcactgtttggagagatttaggaggtgtagccgtgttggagagaatatcagaagcaggtgttgagagtttgaagactcatgtcttctctctacttgtaagtccaaggtgtgagctctgggcttgctgctcctagcctgccatggttcctttcctgatggtgatcaacatttatctcctggcaccataagcacaaacaaatcctcccttctataagttgtctttgttgtggtttagcaacagtagaaagcaaatgaatacagtggtatttaaaaatatatgacagctgggtgtggtggcacacgcctttaatcccagcactctggaggcagaggcaggcagatttctgagtttgaggccagcctggtctacaaagtgagttccaggacagccagggctatacagagaaaccctgtctcgaaaaaccaagatagatagatagatagatagatagatagatagatagatagatagatatagatatatctatctatatatgtataaaacaatcaattttaaaagttatagcttatactcataagatgtcatgtattttaagcatgcagtcctagaatgcacacaaataaggtgtcaatcagatctttgtcataaatggtcccctgagctttcatattaatggtacccccactgaaccttgggcaactcctaattagtttctattaaatataactttggcttttgaaataatatcatttggaatcacttactatttagtctttttttaaattatatcttgttacttgaaaaatactgttaaacaaatgaatagacgtacacaggttttgagaaaatactggcaagatacagagccttgaatttagatttattgattcttaaatgaaattggctacttagtaacaaatggtcagccctgaaaacctccacacacaagaaccattacaagaagagcacgaggactccatggcagggtttgtagcaatagcatgaagcatccccacttggctggctccatcttcagtaatgttttctcttttaccgaacaaaacaagacaaagttttgccttttcaaccttcttgctcctctttctctctcattattctggtcacttcccaagaatttgagatgtgaaccaaaggcctaatcataaaatattccattttttaaaaaacatcttaggttctaggagttttagaaaagttttaggcctaggtgaccttgggtctagcgaaatgatgaactgcaaatttggatttatgaaactttaaaacatttatgtccagcctcaagcactatttattatatatttatctctctgtttgaaaagatttttgtatttactactgtatatgtgtgtgcaaatgtgtgcatgtgttgggtgttcacataggctagagcggtaagaactgggagctggagttacagacagttctacctgatgtatgtgctggggatggaaagtctggtcctttgaaagaacagtgcatgctcttatccactgagccatctccccatcgtactacaccacatctgcctcttaaacaataagacttgttatttcaacatcagctcaaaagaaaatcaagttgaaggggtctgcaaccctataggagcaacaacaatatgaactaaccagtacccccctcccccccaaccagagcttgtgtctctagttgcatatgtagcagaggatggcctagtaggctatcaatgggaggagaggcccttggtcttgggaagattatacgccccagtacagcagaatgccagagctgggagtgggttggggagcaggctggggggagggtataggggacttttgggatagcatttgaaatgtaaatgaagaaaatatctaataaaaaaagaaagctaaaaaaataaaataaaattagttgctgaacttaaaaaaaaataaaaacattaaaaaaaaagaaaatcaagttgaaatatactttctttggttgtgttagttcaattatagtggtcaaataggacaggagtaaaacagggtcacattttaaattcttttttttttttttttttttttttcgagacagggtttctctgtgtagccctggctgtcnnnnnnnnnnnnnnnnnnnncacctgcctctgcctcccaagtgctgggattaaaggtgtgcaccaccactcccagctacagggtcacatttatccactgtatcaaactgagcagctatatttgagaaatttaaattaatttaaatttaaggttttaaaatttaaatgacaatgcaaatgagagagagagagagagagagagagagagagagagagagagagagtatcctagatctttgcactttaggggacttcccagtgaaggagaaggagaaatcagaaagaagaaagttcagacataacgatcagcatgcagtcagagctgacttttctccagaaacttctggaagaggagccatcctccagccaatccagggagctgtggttcccttgagctgctgttgacttgctcaaagcgtatgttgagccagggctctgggatgggccttgggtggcttgctgggagagaagctggggtgctgatattgggagttacctgctgggcttctagaccctaggaatttctctagggctcaggtagcctctctctactgtgtgcagcatctacagatggcagaaattcgagactaactatagtttcagtgcaaaggtcattgggaaatatatgtagccagcttttaattttgtggtccataggcttgtacttctgccattgcatctgcggctcatcagagccttttgtattttctctgtggatctctacaagcattaaacagggagccctcattctcctgcactgtagcctgcagcaatcaccattctcggtttctgtatcagagtcaaactcatccaggcaccgtatgtaagcaggctcgtagatggtggttttctttcactttcctgtatctactttgtagtgtgtgctgatttgtttttttttttttttttttatggctgaaaaacattctattgtatattgggtgtggtagtgtgaacctgtaattctaggaatctctatgctcttttctatagtagcagtgccatttactgggtatggaattatgtctcatggttttgatttagagtcaccagattagcagagctgctagccatatggtcacaaatgtctgtaagtcttttctgagggtatttccactctgttctttggcttttttttttttttttttttttgttgcatactttcttgttaaattgtgggattttttttttttttttaagttctggatgttaatctcatttggtatatatgttttccaactacttcctttgcttctttgagttactttaaaaatacaactatttttttctttgacagtttcatatatgtatgtcatatattttgattatattcatcccattgccttctcctatcctctccctgctctcactgagccccttctttcaaaaacaaaacaaaacaaaacaaaacaaaacaaaacaaaacaaaacaaaacaaaacaaaaaagttcgtactcttttcatgcctgtgtgcaggtgtggcctcctgggcttcattagggttgcctaggtgaacatggtgaggattatttactggaactcggggccacttccctgtggctccccactgatgtaagctgatcccctgaagttgcctttgaatcctcttgaattttgacactgactccttctcctggtttctttttggttttactgttcctacttttgtggttcagggccgagaaatgagtgcaaatccacggtcacgacttcttccccatttcttcttaaatttggggctccgaagaacacttagcagtaacctttatgcacagtatgagataaagaaatcacttcttttgcagaaattctatttctccagcactatttaccaaaagctgagagcctcctaagcaaggattccttcagtggatgattccggagccgctggttactgtttcaaaggttaagcaaataatgattaagttgtgcataacttaaggtagattttgacccctcacaagttgaacagtactagagatctaagatcattgacattcttcaggaaggagcaaaataacttaagccttcttggaaagactggaaagttaaagaatattttgctgatcaaagagcaactggctgcaagcagccctcaaattctggactcagctggccagagtggtctccctcttgccggcgaggtgagcgggggagctgcggagcatggcctcacattttctctggggttttgttactttattgatggtacccggattagacggtgaaactggaacaccagagcagaagctacagaaaagaattgctgatctccaccagtaagtataagcgtggcttatttctgctaagggactggagtctatccttgctgtccgtaacaaataacacgagaagtcaaagtttctcaaggaaagtagcgatgttaaaaagcccctggggagaagatttgggctggtataaagaactgttttctgatttacaaatggtctttgttcacttgtgagtgagtcacatctgcgattcctgggaaatatatcattaagaaattctcagagaaataatgatagatgaatagagacggtttggttggattgagtgtgaaatgaggatatgtatagcaagtctatcattattccgcaagaaacttggtttaaaatttaaaactctatgtgctaattactgatgaattctctgctcaaattgtataggcctcggatgactacggaggagggaaacttagtgtttcttacaagctctgcccaaaacattgaatttagaactggttccctggggaaaatcaaattaaatgatgatgaccttggcgaatgtttacaccaggtaatgcactgggaaaacacagctcttgctttgttaatcaatatatactagcttaaattgaccagctcaatattagtcagcaccttgaatcctgagcacagaaaacacaaccataagatcaggtcttaaaaagaagccttatgctggagagatggctcagtggttaagagcactgactgctcttccggaggtcctgagttcaaatcccagcagccacatggtggctcacaaccatctgtaatgagaaaaagaagccttataaagacttcatggtgaggagagaggggtcaatgccagaagaggaggctcattgcttagggacagatttcaccattcagagaagagccagaaagtcagagctcctctaccagagaggaagtaaggaggggaccagagcaggcacagatgcgttctatagggagggaagatgagttctgcatagaaggaataaaggggaaatagagcaggcacagatgtgttctgtgcagtgtgtgtggggcaataaggaggggaccagagcaggcacagatgtgttctgcagggagggaaaagggagaaccagagcaggcacagatgtgttctgtgcattgtgtggggcaataaggaggggaccagagcaggcacagatgtgttctgcagcactattgccacagcagagtagtcagttactctaatactttattgaacgctttccatactcagcattaataacatcacatgctgcggctgggtcatgcacttgtgtgttatattgcttgactctcaggactcccccatgaaagtgttgattattattccacttatgagttacaaagtgggcaaatatttaatgtccaaaaatagacaataagtaattggggcaagatttaaaattcaaaaggtctcattcaaaagcatacatttttgtgttactaggggttgaatggagaaagttttaaattatatcgtagtcaagctctctctcattgagctatagcccaagactaccacacttcttaatatgcactctaaaacgttattacattatgggaaaatacatatacaaaagtcattgtagctctagaagagtcaactgagctttgccacatgttttgaatttataataatgaagctttagtgcttgctcctgtaagatggaaatatttttccatattgttattcttttctttttctttttaaaatattagatccagagaaacaaagatgatattatagatttaaaaaggaatacaactggtcttcctcaaaatatacttagtcaagtccaccaacttaactcgaaggtaaggtcgacatatgcattgcgctcatggtaagagccatgagttcttgtcaatccaactttgtacgtagtgagctcttttgtcgttagctgtttatcgttacattgtgaactttggggtcaagtggcatagctgtaatggaggctagggagtggtagtggcagaaggcagtaagcactacggcaaggctttgttcaagttctgatagcatctcccttgcccaaggcttggctttgttcaagtcttgatagcatcttccttgcgaaccaagggggggttatcactgtctttgtgctgtaatctccttgtgaaggaaacagagagtcagcttatcagtgggctgaacttctttttaaaagacctttaaaaatttacaggtagaaagaaaccccagaagggaagggaataaggagggggaaaataatgaatgaaaaccaaccaagcaaaatgagtccctaaaagagcagcatagcaatgggtaacatcacgtgacagtctctgcgctcggtaattggtgcattttcttccccgctgctacagctcgtggatcttgagagagattttcaaagcttacagcaggtaagttctacggatggatagtcaccgaaaatatgtaagcaacatttctaaggtaaatatggctgttgttcctctgtaaacctagtactcaggagaccgaaccaggagtattgagagtttgaatccagcttaccgtacgtagcaagttacagaccaccttgatatacatagtatgaattaacctaaaataataataataataaatagtagtagtaatataaatgaatcaatagtttcattttaagcggtcaatcaataccaaggacttgattttccattgtttgattcctgctcctgcctccgtccctaggatgtacgagaaaacccagggcagtatgccaccctaaggtcactaagaatgtaggatcttctacacctgagttcacagccctcaagccccaccccttactgtctcctttagccatcctgctgtggctttacttgtgtatgtttggtcagctagtgatcccccagctggcatcaataactgagtctcagaaaaccacatagcctctcctcgctgagctcagaatactggggctgtacagtgttctcggctccttaaaactgcactggctggcagttcagcttaaaacactccccagagcaaatacactctaaccttgctatgtgtaggcaagactgtgttcatttatgcttttcaccttccttgtgggcaaatgactaaaacatcggttgaaaccataacccttctgcccaaagaaatgtatagaatgtaccaatacttatgattctgcaattcccagttaataatatctgctcaaatagttacaactcctttccataacggttgacctcctactgtgggcattaagtttggtgaacaacttcatgttctctgttcatcacttcgagaacacattgtacctcagccttcacatcttcagggaatagctgagcacatgagaacatgtaaagagaactggctgctgtggagcaaagcatcatgggggttttcaaactcctacagtgcttcccagtttcattgctggtcaagaactggagattgcgattaaaatgagcttccgctgtcctctcccctatcgtcggggtcaaggttttaatggtttccaatgtcaatttccttctgctttgtgataggacaaggtcagcagtcactgccaccccctcctcctcttcctcctgactgctaactaattttcgttcctgctagaacccccaaatctatggctttgaactgctttcgttcaccagaaaactcaaaagtttgtggccaatgttcttaataatgtcctttggccctttactggacataactcattgtggttctgacatgaagacaaatcataggagggaagaaagcagaattcacagacacacatgaatgtgtagtcctgggatttataacaaggacagagaaagaatgggctttgcagtaaacagcactggacaagttggagatctcacccttcgtcagctaccggaattttgtccatggaactaagttggttttctctgagcctttgttggtacttatgtatgggtgtaaaaaacactttgtccctgcttgaaacaagatttgactaaggtcaatgcattaaaatgtcttgactgcatcatcacttgccctcggtgaaactgttgcctctgcacccctaaatctttacaaattgtacagaatagtgcccggtagctgacgaagggtgagatccccagtttgtgtggacaaaggtagccctgtttgctgtcctggtctaaaagcagtcaggtgagcagagggcaaaaggtgtatctgctggctccatttcaaacaaaggggcttggagagaaaagagctcagtcatctgagccagtggcaggagggctggtaataaaagatgatccgttttcaaaggcttatctagaggtacctgagataagaccactaggcaagagagtggaaatttccatttcattttcttagtgcaatagcaacattcattcttataccctcatttgaagtcttcttccttccttccttccttccttccttccttccttccttcctccctccctccccctccttccctctctctctctctttctctctctcttttaagatttatttatttaatgtgactacactgtagctgtccttagacacaccagaagagggcatcagatcccgttaccatgtggttgctgggaattgaacccaggacccctggaagagcagtcagggctagaaatctttattcctgtctagtagcacttgtttctcagatgaaccatgctctaaagtatgtagggtgttaaggaaaatgagcatgattgcaatttttacaagagaattgactagaagggggaagagagtcattggaggaattctggaggaagccctcatagatgaggagaaatccacaggctaactgaagcgctcttcactgtgcactgaggacaagcactattctctcactgacttaactgtcctgtcgtttctttcagaatgtggagagaaaagtttgcagtagcaatccctgccacaatggtggcacctgtgtcaacctgcacgactcctttatttgtatctgcccttcacagtggaaggtgagtcactcaggctttcacttaaaaatcagagaacggctggcagggagccagccatggcttcttcggatgcattcagacacacctattatccaccaaagtttctaggattctgtgcctcacgagtcacagtgacttgtgccaaatagcggcagatttaaaccctgggccatgacagttcgttctgttagcactggcttgagtagttcagcactggaaagcatgggctgagtcttggagtgcatatgtgaatattcttgccctcttctctttcggtagcagtgagaatactgcatgcatggacaccaacaaaatcactcagtaaccacccccaagtatagcagccttttgaaataaggactcgtctatgtaaagattctctcttgtgaccacttgaccaatgtactcccgtgaggagcatctcggtcctggtctgatctgagttctagaagaatcttagcccaagattaatattattaatattgtatttgctttcaccaagggcttattgtccacatataagtcattaaatatattgtatgaatactgttctataaacgcccatgtcctatggtgcctgactgggttctttacatctctgcagggtctcttctgctcagaggatgttaacgagtgtgtactttatgctggaacaccctttggctgccagagtggatccacctgtgtgaacactatggggagtttcaggtaacttctttttaaaatgctgtgtgtatttctggaggacaagtagagcaagtcattaaaagtatccaaatgacggtctataatactaggagactaggcacccacaggggctacctgacttttattgaacatattcatagatattttttgctcaaataaatacaaattttcaccccatgaagaagtcattttagcagcatctctgaggaaggagaaggccatcatgactgtcatagagtggtcagaaaacgtggtgcaattgagttgatgcctgagcaagaatcagattcttaaagagcagctatgggatgaagttgtgtggcacaggcacaggccaccatccctgtgccccagtgctatgctaatttcatatattagcaggcttacagttgcaatatgggcacttcattcacactgtgaaagaatgttgaccaaaacaccaaagattgaaagaacattcagagacccagttaagacactgcattctcaattagccataaggtcccagcagccataatgacccatgcagcttgtccccttacagactcattttgatcaaatgatgcactcatggcatcttccaatcacctcatcccacctatagtctttccgaggaaaccgtcccttaaactgaacaagatcccacaaagcctctgtcttcccactggacttcagcagtgttggccagtaaagccagctaatcaagtcaggaagttaatgcttgatcattggcagatttactagtgtatagtttcttaaaataatttttgagaggaacttgacagcatcttttgctatattttggctacctgcctgtgttccgaggccccataaggattaagaagccagttttgctaccgcacaaactcctcattgctcagcagaataatctaacttgattaaagagcggtttatttgctcccttcctcacgcctctggtgtcttgtagcagtgcccggcagaaatgagtgtaataattttgctttaaccctgtcatctcttaacatactttctcaagaaggaaccatagttcctttgttctgagctttaaaactttgattcactctaggttaataaatatgactcaggcaaacttctactaggcatgttttataaattcaattattgtgcacaaccccaaatgaccgcttctcccttatgtctaatactatgttctctgagaggcctggtcatggggcatagtgattggagtcattagtaaaagccatagctttgaaggacaaccagtgaactttttgagggctttattgttcagactttggatctaattgaaaccgtgcccagtgacattgctgccagtcacattctggctccagctgactttcattcccttgaaagcattatcgcatggtttctgtttatggccatttatcaatcagactgtccaactggagatatcagtgacaagtgtcccaaactgactcctagcacatttgattgcttgcctccccagtatctagtaatgtcctggaggttaaatatcattccaatatttctttatctcaccaccttttggtgcattctatgccagtaaatctgtggtggtgtgggtcaaagaggagccgttcatacaagccattgctatttgttttctagcattatttttcatacttaccctataaaagggaaaaaggggtggggacctgtagcattcacaatttacaactcttcattgcatgtcaaggatgtgagatacacacacaagaaaggagaggaagaaggagagagggagagacagtgttgtttttcagagggaggtagcatacccttacaagacaggactgaactcgctcttgttccctacgcacaggaaagctgaaggatttctgctaactcttggctcctggttgtttctagatgctgccctcatagatttactggggggcatttgaaagcagagcattcaactcttaactcttaatttcttggtatgaaaatggtttatgtagccttgagaatccaagttgagtacatctttctttttttttttttttttttttttttttnnnnnnnnnnnnnnnnnnnntttttttttttttttttttttttttttaggtttttggtttttgagacagggtttctctgtagccctggctgtcctggaactcactttgtagaccaggctggcctccaactcagaaatctgcctgcctctgcctcccaagtgctgggattaaaggtgtgcgtcactatgcccagcaagttgaatacatcttaaatacatgaattgaggtatattccaggaacttgtctctatatgtatgttttcctgtattcgtgcatggatgcacatgtatgtagcagccagggaacaacctcagatgtctctcctcaggtgccatctaccttgggttttgtttgttgtttttgttgttgtaatttttattatttttaaaattttatatgtctgagtgctttgcctgcatgcatatctgtgtaccacatgcatgcctagtgctcacataggacagaagaagtgtttacttcctggagttacagatggttgtgagttgccctgtgagtgctgggaaccacacccaggtaccctggaaaggcagcaagtgcctttaactgcctacacatttctagcccctcagcttgtattttagacagtctcccattggcctggaaagtgccaagtagaccaggctgactggccagccagacccaggggccctcctctccctgacgctccattaccaagattattagcgtaagccacagtgcctagaccttttttccctctctcctttttcaatgggttctgggcattgagctcttgtcttcacacttacaagacaagcaattcactggctaagccattatccaccctcaacatctcgaagggatgaaataaaatatatactgctcatgagcataaaatttagtttttgctttgtgagtctgtatgtaataaaacactgagcatttaaaccattcctggaattctgttaagtctgggaagttaaaatgcttaattacctgtagtttcactgggctcagaagctcctttgtgaaactgaaccatgaatttgataaggaaaccatgagctgctgttgaatgatcttagttagcaatgtgggtatggcaggcaattagaaaattctgtgagtcagcttagttgggggaaatggaattctttcttcacaagtttaacaattcatcattatgaatgtctttgagaagatgaggcatcatgtaagtactagtagttgggatccctgttttattggcaatttcttttcttttggtcccccaccccactttggaaaagtttcttctttagagtgatgggtataggacaggataaactttcacctgtttcaactaattcctgaggttttgcctccagctgccatgagagccaagagaaaggcagttttctcttctcggtattattgtctcctaatcattgtgaacgttgcttctgattgtctcctgacttgctttgtatgtaagctagctcttagggtctggctttgccacccctgggtggtacatgtacttacagtgagaacctacaaggctttctaggaagaaaacaagctgtgtttactcccaggcacacagtgctgacgtggtacatcttatgctatctccatatcattggtggaatttaaagcattgcaaagttgaagtagtgaagataattctgttaggcatttgtgctagttaggtattacattttattaattcttttcagttatccaatgtactgatattgagccatggactctaagacaaattaactaggactatggaaggatatttcagtgtcttctcaattggcaagtgcagtttctgaagaccgaaagcctagtttcattctactaggataaaaccaacaataaaaaggtgactttttgtttgtttgtttgttttaaaaaaacaaaaactagtaaccaagagcttgagagatggatcagcaggtgaatacacttgttgcaaaagctcagtgacctaataggatccctggatcctatggtaggagagagccgactcctgacttaacacacacactgtggtatgaacatagccacacaccaacctacacatcatgcatacacatacacacataataaataaaatttaaaaggaattactatcaaaggcaggaatactactaaggtagtttaaaaaacatatgccttttattattgcttcataaatatttattcctttaaaagccatactgagtcactttgaaaacatatttcacatacaaatgctattatattataaagtccatggaaaattttcatactcactttactcttgagaacagaaatgtaacacagaaaaataacggagctgagtaaagcagacctgggtttctcttcatcttctctcatacattggttctgtggctgtaggcaatcttatttgctgcattcctgtaaaataagatgaaaacatttgcttttgaagatcatagcaagaaaggctatagtttacttgtttgttttcttttctcctcctccttctcttccccctcctcctcactcctcttcctcctcctccatttctccttctccttctcgttgctgttgttgttgttgttgttgttgttgttgttgttgttcttcttcttcttcttcttcttcttcttcttcttcttcttcttcttcttcttcttcttcttcttctccttctccttctccttctccttctccttctccttctccttctccttctccttctccttctccttctcctcttcctnnnnnnnnnnnnnnnnnnnnnnnnnnnnnnnnnnnnnnnnnnnnnnnncctcctcctcctcctccccctcctcctcctccttcttcttgttgttcttttcctccttcttctgattctggctcttcttgtttttcttcctcctcctcctcctcttcctcttcttcctcctcttcttcttccttttctccttcctttaatatttaaattaagtgaaagaagtctactttgcatattgtttgaaagactataagatttatgtccactcagctccaagtgacaatggctaggaagaagtaagtgagagctaaggagagagggttgccctcagacacttgagcccaatctactctgacatcataagtagttttccagtggttaggtatttagctattagagaaacatacttctgagtacttcctcaagagaaagacctttggatgaggcatcatgagtcagtaccttgtcagaggtgaatgtttagtgcatctgttccggatttacactttcatcactttgtcccagcggttcccaaataccctaatagtccttgcatggaaaatgcatttagaaaaacttgtaataattggttctgagttgttttgttttacatgtcaaacttacagagtaaatatttagcaatgaatcaaatgcttaaatatgtataagaaatgcttaaaaatatgataatcccaaagagtataatttgcttccctggaagaatgagttagtgaagaggagagataacagggcataagggaaagcatggaaaaagatgagtagctattagatagggagcgaacatcaaatctaagtctaattactaattattattaattcatgacctggttttaatgagtaaagaaatcttggaatgctcatagacattatttattaattaaataacttttctataattacatagtagtgctataaattacatgcaacatacttacatatttttaaagtattcatttacctgagatagaaatttaactgtgtcccctgtattctaagttggtaagtctggcagctctaaatggtagtgcatagattgtggttttccatatctgtcctctccatttctggcaatacacattgaactctttttacttggaagtgactctgggtatcaccccagcaattgtttctcaatccagccctgacatgccttgattgtttcaaactcacttcttgcactatcacactttgacatctgtgattattagctgagctcctggtactgaatgcatagtgctacaacaacctttctgctttgtagcgagtcttcctttccaggagcctcaggaagtagctcaaggtccctgacatgagagacaaacatgttctccagatcctccctcgtcctcctctggcattagcactgacattcagttccctttgggatgaatctctgctggggtctaaccatgacctctgtgcttggcttttccactccctaggatgtgctcacacttagtctttgtgagtccttcacccccaccacatctctcaaccttacaagatccctttcctatgctttgcagaaatacagctaagccagcaacttaaaaagtcacaactaaacaaacttcccctatttgatttctgtttacctcacatttctagtggtagtgcatctcttagtatttaggaaccgtatgatgattatattttgttatgcattaaagtatgactgtgaaggaaatgtccccactattgacaacatctcttcctgaaagaatacatatttcctctgtaatagaaaggcccctggcagagaccatcacctgcgcttcttgacaggtgctataggatgaatgcagtgaacttgctgatctcccgtttcccttcttgaatgaactccattacccatgatttacagacacctgacttttgacagtactgtttgatgactgagatcaaaagaatttattgccccagtcctataaaacattgaatcatgattctctgacaattgatttgcaaagataacacaatcactcggtgcactgctcggaggagaactgaggaatttcgttctaaggttgcagctgaccaaactgcttggctggtttattattaacgttattggtttgcactgatggataccttttatggatgccaatggacagagtctggtactaaaactgcaaaccctgagcttgtgctcttgtgtaaccaacagatgtgactgcacgcctgatacgtatggacctcagtgtgcatccaaatataatgactgtgaacagggctctcagcagctctgtaagcatggcatctgcgaggatttacagcgagtttatcatggacaggtgggtcccttcccctcagtgcttcttgtggaaaccagtgttacatgctccccatgctgatgctgactctagaccatcactgtgctgctacaagtgactgtagaggtgaagtcccctccatttcttggtaggacacacacaagcaaatggggagataatttatacagaaaactggattcagaaaactgtgaggcttggcctcctggcctgtatgtttaacaatgacaagacacggaaacattacaggctctgttttgtcaatagcatctcatgtctggatttttcgggccttgagtccctgtgaagggcacactttgtggatctagctctccagtcttcctctcagctctgggtcctagatgggtagggtagtctggctagtttgatgttacaagaattttagttattctgaattaatttttaaagattcttaagagatagaaaacagtcccttctagcagtaggagtgagaggaaggagtggagagaagagatttttaagaaggaaatgattgcccgaagtctgtacctagttgggtgtttaccctttaactacatagctggctgagtccattgactgtaattacagctcttgattactgttactctttcctgggcatctttgggataaattataggatccttttatcctgaaataaagatgttcctttcccatggtctagtctaaatgtttaaatcatatgggaagagaaagagaatccactcaactgacctgatgcaaatgaacgtttgaatgacagtaaagagttcagggtttggtgagatattcagacctttttctctcctcttccccatagcctttattcactttattgttttcctttcagctgagatttaactgtatctgtgatgctgggtggacaacactgccaaatggtatctcctgcacagaggacaaagatgaatgcagcctccagccttcaccttgttcagaacatgcacagtgtttcaatacacaaggttccttctactgtggcgcctgcccaaaaggtactttcttgggggacacatgctaggctttgaataccacacagacaaggtaccagaatcaacttccctctaccactgatcatttttccagaggtgcctaaacctacctgcatgtcctactcaagagcatcttaatgctagaacaggtctccagagttggagatttgctaggcagtgtgccagcatccaactttaggccataattagacgtgggaagagagttattttcattgtaaataggagaagttgaggcttagaaagactaaataacttctccatgtacacaaagcttattcgaggccagatataaatccacatctgcctggccctggatctgaggtgagctgcagagtacgccatgactctgtcaaccaaggcacatgtgcacctagagctgcatttagagacttgtagtttaacgggtgcttgcatggtgttggtttagaactagcaaaggtaaggagaagaaagtcctctcctcttgcatctcaggggcaaaagtcacacgtagctgaattctcaaacgtaatttatgatgccaatccttaaacagtagatatcagataaaacaaatggcttaaattaaagggtgggtagtgtgtgcttgctttttcattttcttatttgaagaaaacaaagagaaacaaaacttaagaattgaaagcaaaaattttcatttttgtctttaatcattctattttttttcctgaatcttaaaggcactatatgtttgttataaatgttaggtaggtattacaagcatatctgtacaaaagcagagcatagtactatgtcttcttactgtgagaaccatcattagggctagagtgcatgtctctcagctccttgtgtatgcaacctaaccatgctcagacatgatcatttccttaagtcagtttatgaaggataccccacttagtcctaacattataagtatgctaaagggtgaagatatgtaaacatgattattattattataatgaatcccgagagtaatactaacattataactggctacaatagaatatttaaaggtttcttttcacctttaatctcatccttcacttttctttacttttaccaatataggcacagttttcagcaagtcattcctgcagattactagtatgactccaactcttcataatgttctataatttgttgtatacacttaaactatgcatgagaaaattctctcaatgtttgtattgtgcaaatgtacgaatgtgcatatgtatgggcatttctaaaattacttttaaaattcagtgccatagatgagtcttgaggcgctcaactgtttttattgtccttataagcaatgcctcggtaggtcttctaatgtattttgtaatatgtggatggttttatctacaaagaacacatttcaagaagtaaaattacttaaaaaggaatttatttttaaaaattaatgaatgttgccagatctcattccaaactggttttaattaacatccaatcaacagtctgcaagtgagccccatttatctaacacttcatcagaattagattctatgtatttaaagtaaattttggactaccagttagagatatctcattttaatctatagttttgtgtattttattcatcagtttgaattattctttaaatttttattttatttatttatttgggttggggagtgcatgccatagcatgcctttagaggtcagaggacaaattggagttagctctctcctaccatgtgagtcccaagcattgaacgtagatgatcatacttagtggaaagcatcattacccactgagccatgttgtcaacccagaatgattttgtgtatgtcttaactacctgtagttcttccttgttaagttgttaagtgctaatcttttaatcaatattttttctaggttggcaaggaaatggttaccaatgccaggatatcaacgaatgtgagatcaacaatggtggctgttcccaggctccactggtcccctgcctgaacactccaggatcattcacctgtgggaactgtccagcaggtactacatcaggcttcctgatgccatcacaaggcaatgcccttgaaatagaatctgtgctcactttaaatattttttccatttttattagatattttctttatttacatttcaaattttatctccttttctcatttcccctccgaaaactccccaacccccctacccctgctcactaacccacctactcccacttccctgtcctggcatttccctacactggggcatcaaggcttcacaaggccaaggtcctctcctcccattgatgttccataaggccatcctctgctacatactcagctgaagccatgagtccctccttgtgtagtctttggttagttgtttagttcctgggagctctgggggtactggttggttcatattgttgtttctctttggctctgcgaaccccttgggtcctttctttagttcctccattggggaccttgtgctcaggctaatggatgactgtgagcctccacttctgtatttgccaggcactggcagagcctctcaggagacagctatatcaggcctctgtcagcaaacatttgttggcatccacaatagtgtctgggtttggtaactgtatatgggatggatccccaggtgggacagtcactggatggcctttccttcagtttctgctccaaactttgtctgtgtatatcctcctatggttattttgatcccccttctaagaaggaccaaaatatccacactgtgtcttccttcttcttgagccttcatgtggtctatgaattgtatcttgggtattctgagcttctgggctaatatccacttatcagtgagtgcatagctgtgtgttcttttgtgattgggttatctcactcagatccaacatgtaataaggacatatgctccattatgttcatagcagccttatttataatagccagaagctggaaagaacccagatgttcttcaatagaggaatggatacagaaaatgtggtacatttacacagtgaagtactactcagctattaaaaattatgaattcatgaaggtcttaggcaaatggatggaactagaaaataccatcctgagtgaggtaacccaatcacaaaatgatttctaaggaaaaaaaaaaaaggaatggtgtaggatgcctaacttacagtgtagattcatcaatgcaataggacggcaaagtaagaaagagacagaaaacagtatcagcagcaaacagcacgaaaacacagacctgggaaatgcttctgtgagaatctttagatccatcactcttttgtgctcatacatgtatattcatttaatatattcacttgtggaccatgtccacagataaggcttacaaacatgatacatgttagtttctttttttcttctggaaagaggtcattctggttgtcctctagttcaaataaaactagtcttcaagaacttcagagagttctaagcaataaatgaatatatatatatttatgtatgcatatatgtatatatacatacatacatacatacacacacatacatatataaaaccaaagggggggtcaatatttttttttttgagacagggtttctctgtgtagccctggctgtcctggaactcactctgtagaccaggctggccttgaactcagaaatcctcctgcctctgcctcccgagtgctgggattaaaggtgtgcaccaccacagcccgactcaggtcaataatttttatacagtatattccaataatgttttctcctccctcaagtcctctgagttattttaataacatgaaaaatggtactttagacatctgtaataaatcacccccaagaacattagtcaatgaaattaaggtgtgtcaatttagagcctgccatttctatgacacctcacacttgcaagcttagaatatgtacacgcacatacatatgtgcacacacacacacatcttcacacatatatgtatgcacacacaaagccaccgtgctgttttatgagttcttttaaccatgtcctgctgattgactctgtggagtttcatatctctatctacttggctcttcagacttggttgcctggtatcttagtcggggtttctattcctgcacaaacatcatgactaagaagcagttggggaggaaagagtttattcagcttacatttctacactgctgttcatcatcaaaggaagtaggactggaattcaagcaggtcaggaagtaggagctgatgcagaggccatggagggatgttacttactggtttgcttccactggcttgctcagcttgctctcttatagaactcaagactaccatcccagggatggcaccatccacaaggggcctttcccccttgatcactaattgagaaaatgccttacagcaggatctcatggaggcatttccccaactgaagctcctttctctgtgataactccagcctgtgtcaagttgacacacaaaatcagccagtacacctggattctaatcttagacagccattgtctttttcccgtattcttgaccttgtttctcaccctctgctgtgctttggttaggtttcagtggtgatgggagagtgtgcacccccttggacatctgctcgatccataatggaggctgccatccagatgcaacctgttcctcctcttctgttctaggtaatggctcaccccccattgatccttggaggtttcattcaaaccctcttttctgtacaatttcatattctaaaaaaggaattattctggaaatttcaggggggggggagtgttgcacagtctcactctgtagccttgaaatcatataagcctcctgcctcagactcccaagtactcgtgttataggcaggagctaccattcataactctcaaaatcgttatcttgatcctcaaaaaaccctaactgatccccaaaacctacatatatttaaattctataatgtagttactcttgaacgatcttctttgactaaaagttgtttccaataataattaagccaaatagtcaataatgactttagcaaacagaatggagaaagggaagaaggacatatcaccttcttttataattcttctttctgtgccattgactagagttgtgcctttggctactgctggcagcagagaacatatagcatttatttcaggcatcacagttccagccggaaaaaaaaaaagtttacttctaggaaaggacaaatgaatgcagggtggtctcactgtgtagttgctgtggtaccacataaacaagctccaggtcatgtgtgcagtaacacatctttccgagcattgtctcattgcaagtcccagtcaacagctcgtgcaatgtttatgtgccccagctctgacaatcacagctactatttttttttgtcttgattggttttatagctaacagttagcttcttagtccttttaaagcctgtgtttttgttgctattgaacaataatgttttcagttgtacttctcagctttctgtttctcatatgcactgctcatttgctttcttttgagtttgtcacctttgattttacagaggaaaccgtcttccccttctgttttgtgtttttgcaacactttgttcgcagcatgtcattctctggattttgtactagtattttctatttagaggtgagagaccaaaatcttttaaattcaaactcagttttagagaacctgacctaagtttgaactcaggtaaattaacaggctggtacgtagcattaatttccaagttatcccccccaacaaaaccagagcctagctccagtctctaggctaaccctcaataggaccagcatctccagattattctctcaacaaacctgtaccccactcccaggttacaagaccaccccctgcctaatgatcaccattgcagagagaagcagaatttaagtttatgatatgactcccagcaccagccaattatgttaaaggcaatagtaacttcccagttagatgcttgtactctcaaccctgattgatgcctactataaaaccttgccctgacagacatttgcccccccccccccccaccaaaaccattcacttgatggtggtgcattggggttaggtcaagctagcttgaatagaataaagaccctgctgtgagttgcatcagatgggctcctgtctgttttttttaaggggtggggatcatcacattggtcatttgtgtaacaaaaagaaacctagatgatttccatccaaatggttagactcaacctcatccattaaataatacaacacattccttgatgtttcaaatttttatttttattaatgcatccttaatgtgcatgcattgatgagaatatattcatgtgcacaggtgtatacttacatggttgtatagatcgcacacatatgagtgaccaaacgatcaggaagtgtttaacagagcagtgatgtggacaagagcagcattcctcagattcctcaaatcccatttgatttctcctttggtctcatcatatgcttcctatctgatgatggtcaagacatccccatgcctctacactccacctctcccttgtgaactctgggcagtagtagcttgagtaatagtcagcttgagagaccaaaatgaaacagacagatatgaacatagctacattttatgcacaggaactggtcgtatattacatggtgtgaagtagcatttcatgttctttaacgatcatcatggcaacccgtgactttgcctgaggaatggcagcagatatccaggcaaagcatagccggtctgagtctccttacaccatttcccttcagtaaatactttaaaagaaatagataaaagaatgcaatcttatgcactcctttatggagaaaagattcctgtatgtcttactttcaaatcttgcaagcactatggccttaaggacataaaaccaccactatccatttatgctacaagtttgtcgttaaataatttattccaattgaatacttcagtgagattttcaatgcattttcatcaatatttgctggtggaggaacgtgtttacattcatcatcatattaattttcatgcattattccagctcttttatagtgataacagcaatgtatttctgcagtgacatggtgaccttcagcaactagggaatctgaaaatctctggatgttgtatttagtggaaattcataaaatattaaaggaggtatttgttctaggcattacaggataaaactgaaaatcctggatgttttagtattatttttagcttctaactcactcgtaattattaatggtactagaagattcaatcatttttgaaaattgaccaacttctttttccaaccccttatttggtctttccttgtattttgtaacatggaagcttagaataaaacattaaagaagcattggtgtttctattttgtttattgtgttactgtgttattttaatctgtagtttcatcacaaaattccttcgaatgcctcaaattcattttttttcagtggaattggacataggtgaaatctgtatgtacccgtgtctggaacatgagacctgcccatttagtgctaatccttgctatcactggtaccacgccttaaagtttctcttgaattttcacattctaactgtgtctccttgggcaggacaatctttgtgtgcttgatttttatctgtaaaggtgtaaatatttatagcagaatccatttatagaattatcaggaggattgagcaatctacctctgtatgtgtagacacaggtctataatgcttgcaacatctgtttatagggttatagataggattgagcaatctctgtatgtgtagacagagatataattgcttgaaacagataccgctgccataaaacttttattctgtactaaagatcccttcctgacgaagaagtgccatttcccatttcatagttccttcttatttgtacataaccttagatcatctgttacatgagaccatgattgcaaacttatataagaaatcagaaccatctaatgctttgttttacaataaaatgggaaagacagagattttaatcatttctcctcttgctttgtcttgactgcccataggagaaaatgcacttgaagttggtggattcttatctggacactagaattgaatttcatgactgcctctgaaccaagaatacctacacttacacatccatttttatttctgaacagggtccttgttgcctgtctgcacctgtcctccgggatatacaggaaatggttacgggtctaatggatgtgtacgcctcagtaatatgtgctcaagacacccgtgtgtaaatggacagtgcattgtgagtcttgctcctcttagggagattaaaaacttgcaaagaaccaatcatagattcaccattttatttcatatgattcttaagttaggtttctttctttctttttttcttttttctttttgcttgttttgttttgtttgggggaggtcctctcctctgctctcccctcctctcccctcccctccccaccccctctctctgaccaggttggcctcaaactcaaagattcacatacccctgccccctgagctctgggattaaaggcatgtatcaccagcacccagccacaagtttaatgataatgattcaagctttatgctaaggtttctgattctcagattagagattggtagtaactttggttcccaggaaaaccaataagccaatcaattgattttttaaaagatttatttataggtttgtatgtatatgtccttgcacagacttgtgtgcaccatctgtatggagatttctgctgagttaagagagtgttgagtatcatacaactagaattataggcagttgcaaactgtcagatatgggtgctggcttctgcatcctggtcctctaaaatgcagcaagcccttcaaaatctgagctctatctttgctccccatttagttgttttgtttgtttaatcaatgattttcaaactagtaagcaaaacctatagttttatggaaataaacatgactatttatactcagtaattgatgattttgtcaattggaaaacacacagtatagttcaattcctgttaaatatataccttacgttgtcacttcttttcatgatttgggttgattctcttatattttctgtccacttgatttgtagtatggcattttcttttcatcttaggaaacagtatcaagttacttctgtaagtgtgactcaggctggtttggacagaactgtacagaaaacattaatgagtgtgtgagcaacccctgtttgaatggagggacctgtattgatggtgtcaacggcttcacctgcgactgcacgagctcctggactggttattactgtcagactccccaggcaggtatggaagacattccttggaccacagatgctcccagcttaggggtatcatcgtccaatagactttttgcgtgtttgacaatgtaatctgatttcttcaccagtttacacactgacaagtagatttctccttgcagaaatagcatagaatccacgaagtggtatttgtaaacctcattttcaacaggaaacatttttcttcaaaaatattgtaaatattttccatgttctgtatattctttcataatgtaccatatactgaggaatttgcctttcagttttcttggagggctgctttcttcatggcaggcatctagtgatcataggaccctaactcatcattctcccacttactgatactttgcctggttaatcgaggtatagactgtcatttattgtcaatgaacagccttcattctatccatatcactatgtatttctctagttccatagcgatattcacacttcagccaggttaaattcctttctcatttgccatccagatgtatctgttccttgggcaccacactcaactcttcatccaagtctactctaccagctgcaagctctctgttcttactcctgttttcagatcagtgcattgattgaggtcttaccacacgcttaggacaatgatagaatataaaagcagaaaacactgcctctacttatctactccccatgtagtctaggaactgagactaccttgaggcagcagaaggtggcattaaatgtcaaaactgatgctgtaattgactcatgtggcgtaaagcctggtctatcatggcagtggccaaggaggatgaagaaatcgattgaagtttggagaaaatgtgttgggagtgaaaatggactgtggatgcagaaaggagggaggaggcttgatgtcagcacaaagggaccagaaaggaggaaagtgtgggctggaggagcctgctctcttcctttcaataatctatgaaaaccacaattcatcttttttatttttgcagcttgtggagggatcctctcagggacacaaggaacctttgcctaccagagcccgaatgatacctatgtccacaatgtgaactgtttctgggttgtcagaaccgatgaggaaaaggtagacatagtaactcttgtctatgagcagatctcactcgtgcattcaaaactgtgatacatatgacatgtatgtgcatgcgtatacactcagagaaagtacgtatgagagttccactgtcatatattgggcactttctatgtgcagggctttgggctatatactttgtttatctttctctaacgccatacaaactctttgaaataaacaacaatttattttacagttgagataacagaaagtaagagaagggttggagttttatcttctaatactacctagcttataaaaggaacagatgaattttcaaatcaagtttggttctagagtctctccctccaccccccccccactctttcccaccctttgcctagccatcctagccatctcttattgcagttaatgaaggattcccaacattggttgtctagctctaggcccgtagcaaatctgttaaactgtgctgttactgcagatgctgcaaatgtaggatttgaagatgatcattgaccctagtgggttgtcattaagtgggggcaactgatattaagatggcttcctatgtagtatccactctgtgccaggtaccatatgcctcatatacttcagtatactttaaactcaagttaaaaattattttttaatgtgtgtgtaaatggagcctaaattgtttgaaacatttgtccagatatgcgtgctttttaaatggcacgtggttttcaagacaactgactccaaagttcatgactctgagtcactacatgaacaactaaaactaacatctgagcccatgattttttttcatcgttcctgaacttttagatttctaaagtacttgttttccaagcaattctcagacttaaagtggtaggccttaatagttaaaatttcaatgggaaaatagttaaaattttttcccttgaaatcttaacttttcccagcaaactaatgttatagaggacattgtgcaagagtcctctataataataaaaaatattatttcccgtaaagaaggacaaccagttgtagcttggtcattacataatttattctattgtgaataaattccaaaaaagtttcccactgggtctgttgtgtgaatttccttccttccatttagttctagtgaattctatttcctgacattgaaaatttatttttccaaggaaaagatgctgtgaaaaatctttatatgtttattaccattttaaagaaaattcatccttttttttttttttggtgatacaattttacatagtctttttgccataagatataatagaaaacataaacaactaattaacatttatttgatttccatttacaattcttcaagtagaaaataattaaattttttccactaagataaatagcatttccaaaagtcgccagagactttttctgatttctctatgaattatagtttggactgaatgattttaaagtagaattactgtccacgttggcgagcaactacagagtggtggctgtcactctttgtgtgaggacttgtcaactaagcttccgcattaacatgggagtgctttcatgttcttccaggttctgcatattaccttcacgttttttgatttagaatcggccagcaattgtccccgggagtaccttcagattcatgatggagactcctctgcagatttcccacttggtagatactgtggctccacgcccccccagggggtccacagcagtgccaactctctctatttccatctctactcagaatacataaaacgggggagaggctttaccgcacggtgggaagcgaagctaccaggtaagtaggaaatgaagagcaagcagaacgttcatgatgttagggcatgtgtggagactacaaacaatgcaacattttaaatagtcattgtaagaacaaataatttaaaaatgagtttgatttttgaattcaaggacagaaaaactagggtgcattgcaaagctagaatgcatgagtagtaatggggcccttataaaattactggatagaattggtggattgttttaacacactacttgtattgattgtttcagagcttaatacaatttattttgatttcatttactccctctcttccccctaattcctcccagatccatgcttatctcagtcaacttcatgttgtattttttctcttctggttttgaatacttcaccaagttcaatttgtgctttccacattcctagaggttcaaggacctgtacacaagcttggccagagggacaagctgcctgtgtgcccagtgcttcgcaggcggggaaagcagctcctcagagcgagctagcctaagaaaagccaccaactccaggttcaagtgagaggcctcacctccatctgtaagatggtgtgagactgagaaaggcagctgaagccatcccgcagcctctgcatacacatacactcatgcacgtgacatacacacatgcaacaaaaacaccttttaatgtatgcactgaagtgaagcgttttactctattttattttcatccataggttcaaatgtgtgtttttactagtattcagtttgatatactttcccatctgtatttatgtttctcatgtagtgagaaaaaccatgtattttgtaataattggacatggctgtctatatatgacaatttagtcaatttggttagtagtgctgtgcaaatatgttatttctccagagacttaagacgatgttctccactgatgagaggatggcactgaggtagcaagctatgagtatagactttattaattttgttcagacaactttgcttaatatattttatttaattttcctttcctaattatttcgaatatttattgtcccttttcgttcagtgtatagtgaggatgcataagatctactctcttaatttaagtgagatcagttattggttggttactcctacatgcttggtgccaccattgtcctagcaggcaggacagcactgtaggtcaaagcatttgtggccaggctgacatttacatttctcttttggtagtgtgtacaatgccttcctgtactaaagacacctgaacataggggtatgggctctatgtaggcaccagctcaacttcttccagttcaatttgttgtgtaggtgttgtctctaacaatggggtcttgtttgggagtgtttgggcctcccatgggacctttgaccttcaactcacttagatgtaacccaatcctgcttctacaagcttcattgggtgacaaaaaagatgctcagctgggactgtcttcattccattacttgatttcatttagatctccttcatgtgtgtgtgtgtgtgtgtgtgtgtgtgtgtgtgtgtgtgtgtgtgtgtgtgtgtttaggaagcttctaatgtactaggcgtctatactacccctcaaaaaagcacttaattttagctatctcttcttgcattccctccccatccacctctcatttgctactcctgttccagcctctgcccctcccatcaaccatctagaactgtctactctatttcccttttgtaaggagatgtacctgtccctagtcccttactctattcctaacctctgtgtttctatgaattgtaacttatcattgatataacagctaatatcatatctatcacggattttatttttctattgaaaacatagagtcaatttttttgtcaaatttcccctctaagtctcactaccgttactatggagtctttgttcggaagccccagtatcagagtatttctggctgtgctcagagtgacttgtttattattgtctactttttccaacttggccttaataactgtatcatgaacagagcatcacagataaggtgttataaggtctctgggttgtattctcaaaacagctttgtagtaacagggagttccgttactgatggattgcttggatccaactgatgctggaattgagaagggtgtgtcaaagttccatgattcctaagaatatggttcttaccgttctagcacaggctttctgaaccttcagtttttttcagaattatcacaaaactcttacccttctcactgggtctatgataacagcaaggttattcattctcttcagccttggcattccctggctccatacctcgtggtggtctctgttaggcattctgtagtcttcctctatgtatcaacagttaaaggttcctctaaatacctgggatcctcctacaaaaatatttggtgctgtctccatgcaactgcttgcttacatagtatgttgctctgcaattttgaatacttgagaagcttcaaattctggggttttgttgacttaagctagcagaagtgttactgtctcctttgtttattttcgtaccatgtgaagttacacatgggaagatttccagaataagcccagggttcagctcataacctttccattgctcaaagagcacagttcagtgttatttgctccttaagacccctcaaagtaacaataagcaatttttctaacgccaagaactaagcattgttgacatttatttgttaaagaaactagttatgtgttctacacatcatccacccttctggattgtgctgtttgcatctcatgtgccctttatcatgttgtaaactggtacttggatcaaaaggtctattaagttatttttttttcttgcttgccaaggtatccactttgggtagcacatcatatcttctttttatctattaatacttctggattgatcagattggtgatcttctcattccaaagcatcccttttgtgctctctgcagtggctttttgtttttagcagctcttagattcataggaacccacaaattaatgagagtataagtgtatcatttactatctatctatctatctatctatctatctatctatctatctatctatcatctatctatcatttgtctgtctatcatctcaggtaatcaaaaggcttataaattcactacatcaggtatttgcttacaggtaggtcctagaggatgtgtcaatttgatgcaaacttgaatcacctggaaaaggaccctcagttgaggaactgcccctttcagagtagcctctatacctacaggctacttatgcttaaatggggcattttcttaattggtaattgaggaagaagggagggcctctcctactgtgggtggtaccactcctaggcagatcatcctatttgtgtaaaacaatctggccgagcaaatcatggagagcaagccagaaagcaacactcctcctgggtctctgatgtttcatttcctgccttcaggttcctgctttgagttcctcccttggtttcttttatgatgactgtcacctgtcacctgtaagccaaataaatccaatctgtcccttggttgttcttgctcagtttttatgagaggaacaggaagcagactaggagagaggaaatgcatgatacatttttaatttgttcccttttctgttggtatttgagttaatgacttgtttccctgggattcttcaaaatgattaatttcattttggtttgtttttcataaattagtatacttgataagagctgatatagattctttaaaaatgttcttttttcgtgttttttttttttttttcctacttagtttctgagtctgtttgcgcagactccagtgacttctgaatgttgatttgctttctggtttgaaaggatgttccaggcccttccacagtttgatggcttcagcagtgcaaaatgctgcttccggagagagctgtcatgtcctatgagaaacggattttaactcctacatctgggtgctacaactgatttctattgctgggtctctgaacagaagtagaaaacatctttttaatattattattaagggagcttaataatgttattattaagaagttaaggtttagttttccttgacatttatggctcttttctcctgaacaaaaaccatgattcccattagtgtacaacattagtgtatcacttcaggatttgatcctacaaattttcctaagatcaatggcaatattatcactaataacataattgaaaactacttaatgttttgttgctggtgttatatactttatgtacattttgcatgggacacattggtacacgtctatagtcccagcactcaggaagtgggggacaagaagattacaagtctcaaatctgtatgatatgcataacatggccccatctaattagtaatagaaaaaaaccaaaggcatattgttttgagcaggatcacagggttttaaagtcacatgttttcagtattcacgtttaacttttcaattcagtgaaattatttcctcttatttgtgattttagagattacctcttaaattggttaatacatgtaattttataattgtataagaagtatgcacagtgctaaagccctcttaagaacattatgcatttttaaaatgtctagtttccatttctgactctgctatcttgctatttgctataagtagatggtttgtaaaattagctttacacttataccgccaataatcatataggctaatattttcccttctcagataagaagcagtattccctatgtggaggggtttacttgtcctccctgggcctggggactgcatcaaagcttgaatggagcacagcattacatagatgtgtcctggcctgttaagccatatattgatggcctcgtgacctgtttcctctaccattttggaattctaaattttatggcaacaaatactttgcatgttagccttattccaactttcccactgggcctttggaattgtttggtcaacagcatgcataagatttggtattttatgtgttatatttcttctgcagtgttcagaacaccctgtgtttttataacagtgtgggacagtgactacttcacagccagcctaatagtttgtttttaacattctggactcttgacttcgagagtcaagaaaccttacctcagtggtagcagagatgctggacatctttctatgtgtgcaaaagatgctgggatcttttcagtgtactctctcttcatactactcttctttttttaaattttctatattatggatgataacttagatattacacttccatttgatctttaaaattttacattgattatattattttataaatttaaaagttttatactgataatagacttctaagttaagttttaaaaatgcacttctctctgatcttggatgttccctgctaggttcaatgaaaaccatgaaactgattattttgggttttcctttggtaacaaaaactttggcttagtgtgtgtggttttatgaatatcaaccatatttaaaatgacatcttagttttatttctttcttaaggtatatttaacaaagtcttgattagttggtgtttctgctctttgattctactgtaacctttcttacaaatgaccaaaaattctccactaaataaatgtgaatattaaagggaaacagttcttatagacgtttctagtcactgttcagccacatagggagttgtatagtgcgctgggattggcatctggaagcactggggcccggttcactgctgtacttgcttcattcctggtacagtggcttaattgccatgtacatttacttataaacaagaacaacatatttatttcatagttttgttttgttttggttttggatttttcgagacaaggtttctctgtatagccctggcnnnnnnnnnnnnnnnnnnnnnnnnnnnnnnnnnnnnnnnnnnnnnnnnnnnnnnnnnnnnnnnnnnnnnnnnnnnnnnnnnnnnnnnnnnnnnnnnnnnnnnnnnnnnnnnnnnnnnnnnnnnnnnnnnnnnnnnnnnnnnnnnnnnnnnnnnnnnnnnnnnnnnnnnnnnnnnnnnnnnttaataatttattacagcataagaaaaactttcttaaaagaaatttatagctgtgcctggtgatggcgcacacctttgatcccagcacttgggaggcagagtcaggagaatttctgagtttgaggccagcctggtttacagagtgagttccatgacagccagggctacacagagaaaccctgtctcaaaccaaaaaaagaaaaaaaagaaatgtatatgtgatccttaactattttaaagtataaagtgttctggtttattgaaagatgtaggggctcacagaagttccagggtttgtttgtttgtttgtttgtttgtttgtttaatttttaaagttgctatataaaaactaatcttttaagggtaagggactgaatctgttctcccattatttatgtcccagaagggtcagctctgtgtcttaaatcacataactgtatgatgctctgaggcatagagttcctacatgggggatttgcttacataccagttggtactaactttatagacatgaaacggggcagcttgaagtactgggtaatttatgagatcctaaagtttgcatagtcatgttaatgaagcttgccttctgacctcagagtctgtgagaatcatgtgactttagcctacatatgaatttagtaattttgtctcttctttcagagtgtggcggcatactgactggtaattatggttctattacatctccggggtaccctggaaactaccccccaggaagagattgtgtctggaaccttctagtcagtcctggctccttgataacatttacctttggcaccttgagcctggagagccacaatgactgcagtaaagactatttggaggtaaaaacaaataaacaaacaacaaaaagaacaactgaaaacccccacgtttcgataggatttgatagagtgtaattagtactcaagacactgtggttaatgacgctcatggatggccctcctgtgttaccaatgcttaggcagctgatgttaaatctctactctactgagtgtggaagagcttgccttgcatccccctgtctcttactggaaattcagactcctggagtaataataaaacctagcaatgcttgtctttttcaatacatattttgatttttagttttccaagacaagccctcaagatatcacaccacttgactctagggggccataatggttctctaggaagtggttgtcagtgttgaatcttcctagaaaatgttgacaattacccttgggaggaggggagtcagtctcctctattccattagcaaaaggttaagatatggaagaggaaaggggccattacattcacatctcatgcacaaatagatacatcaaaaatgtggttctccatttgtagactggaaaggtcaccaaggagattatttcttaggtagttcctacacttttgccactgtaaatctcagtaccccacaacactgtcaaagagacaatgagcttttctgagtccattagagaaggatgaagtgctgtggaattattcataaaggatgaaggatgcagctgtcatgcaggtctccgaagttgaagtcattagtcattagcagcggtaataatgaatttgaaacctttgggaatgattcaaatatcagtttctccttggaaagtcttagcaaaatatccttttaaaagttgacagtaaaaagtgagttattgtgaaattaatattcaataaagcctatcaaattaagattaaagcctttaattcttacatattaatttctgaatagcatattatagaaagtatcaatcacctggacaatattgaactccctctcatttctcatcagtgtatcaaggaactagttacaagtaaaaaataaagtaacactgccttataaatttgctgccaatggaaaaattgatttgagtaaaagaaattgaccataggaggatattctctggtttattcactccttggtgctctatggagtatagatttttacaattgtgtcagaattatagagtgctcaatgtgatttattcaacacataaaaagccaaccagggtctttaagggctggagattacaagagaccctgggtttaatcctcagtcctatgaaaacggagagcaagggggagaggaagacggggcagaggagcagagaggaggaagacaccatagactggaggttctctcacgggttggttgggtaggtgagatgtcttggcttcagcaagcccaaagacctgaatttgatgacctaatctcacagtagaagattaaaacctgtttcctgaatattgtcctctgacccccacaataactccctgcccacaagtacatacgtgtatatgcatatatctacatgtattatatatatgtatatatatagccatacctataatacatgctcacaagcatatacacacagaattcacacacatgagcacatagaaaaggagtttgtaaggtcacgctgtcagcatgcagtatgtactgtgtgcagtgctggatgacagtcacagggttgctctttaaaggcagctctatgctctgtctttcccatctgtatctccctgcatatcccgtgtacccacacaagttgcaggtcagttcacatcactacaacccattcttccatttcctttgaaatttcattttcttcttcgaaattaccaggatttctttactttgggggagggagaagcatgaaagaaaaaaaaatgagttttacatcatcctaagaaaaatccaaagtatgtattcaaccccagagttgaaattccagcagaagatgagacatctgacaggactgtgaggacacattctttactgaacacagactgtgaatttgtattaatatgtatatgacagaaaggcatccttcacttgtaaataagtttgttaaaccagcactttgggttgccctgccttgctaccatacttaagtgacagattttctgaagcttatgtctcaagtggcttggttaatgagaacctgacttcaacttaatgacttgtggtctttttgttgttgttgttttagattcgagatggtcctttccatcatgaccccattcttgggaaattctgtacttctctgtctaccccaccactccagactacaggtcccgcagcaagaattcatttccattctgactccgagactagtgacaaaggcttccacatcacctatctaacgacaccatgtaagtaacctgcccactgaggactgactccaacttgggagtgtgatgctgttctcacaggtgcttgtcatgcccatgcctaagctgaaggcgttctgaggttagtgacacaccttcatgagtacttcttacaccacctcagattcagtatcttcagaacattagacactacaatactccttagcccttcaactatgcgatcaacactacgatggagaccagaggcacctaaaatgaactaattcagaacctcagatctctagtggtgtttgctgttttgttgcatgcaagattgttcatgggaacagtatagtctgtctgaaaaacgttggcttcattcttggatcaagtccagtgcgcagaagccaacatccaggaaagtattgttcccgttactagagctcactcccatacacgtcactatgatgctctcagttccattcataccttggaacaaaggacaacaatgaagtagtgtatgtttttcatttgagtgagttagagaagtttgtttttgacacctattattgtgttttagagaggattccttgtaagtctctgtattaggaaaaataataagcagcccacccccccctcgtcccttctccctctgctttggcttcaggttgaacgcacagtcagtgttggtaattcctacagttgtaagtactattaatggtgacatgctgctcttctataccccctctcattcaatattcttctcttatatagttatatatgttattcagccacaatattctatcaagtgacttaaatctttatggaatgaagcaaagcactaatgtgcttaaaaagcaatttacagaagagagccatagattgggcagttcaatcacatctctgtatccacttctttggtctctgcggggatatgctgaatatatataaaactggaaaaccttgcagtgggtggcatgggctcatacagggtggaacaagccgggtgggtagggaggagctaaggttttgaaaattgaacgtaacggacagaggtcagccagatgctatcctcatgaccattctttcctcctttgttctcttcagctgatctgtactgtggtgggaattacacagacacggagggtgagctcctccttcctcccttgactggacctttcagtcacagcagacagtgtgtctatctcatctcacaaccccaaggagagcaaatagttatcaacttcacccacgtggagctggagagccagaggggctgttctcacactttcatcgaggtaacctttctattcagttacccttgggggacactcattacaattttcatgttctgtggagtggtggtcttcaaatggctgtcaagccaggtgcatctagatcaccagagagcttgtcagaagtgcttgcctttgctcagcatcactgcgtatgctgagggtgggaagtcaaagcagagagtaaaagagcaagagttctcagaggatctaaaagaatctgtctaaaacagacctaagaaggtgaaatagcaagagcttcaaaatggaggcagcaaagtgagaaaaggaaagtggaagctagaaactcagagtagggctacatcaatggagctcttaatcactaaggcacatgcgcgtgagtgaacctaactagatttattgatgggattagggcttcagagaggttttctagagcaattttgtatgtcaggcatcataacctagagagagtccaatatttgcccatggctcccagttagtcttgacacagacatgtcctttaaattattatgggaggggatcacaaaactggcactcagtaacttaattttgtaaagcagagtggctgactattttgtagttataatggaacttggttaataatttagttcttattttagttctgttgttagatgtctatataacttcaggcaattctttgagtattcagttccttcttcagttggatatcttatcttttatttaacctttgtgagaataaaatccaggaaaggacagagaaagaaagccttaaatgttattacaaaacattatacaaatataagttttcctagaccaaattttttctcttctctacatcataccagttcagaatcagctaaaaagactctactgtagctatctatacacctatttacattctgatgtatgcacagcttcataaggtattgatgaaaattatagaagattgctatcttaaacaaaaccacccattcacacatattcatgtataaactcacacatgcacacacatattcattcacagacagacacatatacatgcacacacacacacacacacacacacacacacacacacccctccacttaagtttctccttctaaaattacattttgcccatggtcagtgtaatatggctaaagaatgatgaggtcaaagagagattaatttttagttcatttgttcttgcctaagaaatcttttaaattgtatagaacagtattatagatgtgacaaaagtcatctttccataatagaaggcagtgactcattaatattttataagtggctcaagccatcaaaactactgtgaatgaaggacacagaaggtaataataaaagttcaaatttttattccagaaaatgcgaatctgggattgactaagaatatctaaagtatatgacattaaggccaaggcttggaagtaggctatagagggaaatgatttcataccccatttatattttccctagaacctgcatttcactcagggaactgtaaaagaagcattacaggagagggtgacagactggtgtggtatgccttctagccaaacagaggtgtttctgggaaagatcttccttcttagaaatgtgatgcatccttgcacaacttcagaaaacagccctgactagggtggaaaaagaatgaaagaaagcagacacacagacagacagaagagctgggatggtactctctgatggagaacctgcagcaccccagaagcttagcttactaattatattcagttgggtggagaggcagggttcttgcatacagcttaacaagaagctggaatactacttacagacaaacaaggaaatggaactattgtatataaatgaacaaggagacgggtttagctggcttcagtaggagcaatcaccataggagaggagtcttcaggccatagatgtccacagggagaaagggatggtgaacgtttcccccccacactgtcaacatctgcacacagggcataggaaggctttgagcctcatcccaggggaaagctttgatattttctcgtgggtctgaggctaaggtccttggcatggccacttccatatcaacaccacacaatcactcagaactttactcacccgggcctcctccactccccacagacatggaaataatcttatatttatgataaaaaattaaaaatgtattatacatgtgagaaatatactatgaaagaaatgtatagagctcttgacttgaatcctattatgactggttggaaatggctcccctggggacagtacttagtgggtatatggttgagcagttggcaacagaaatattaaaacaaacaaacaaacaaacaaacaaacaaacaaaaaaccaagggtgccaggtacagtggccaacacagtcccagaggctgaataaggtagacataggataaaccaaagccaaaacaaaagaaataaaatccaaacaaacataaaaccagactaatgtgactagaatcacaaagacagaaagaaaccagtaagggaagtgctaagctcttgtctccatatataacgataaagagatgaagaggttggggtgtcttctgagagcctgaggttattatcagtctcttagcattgtgcccaccccagtgagtggccacgacagcacatccacgatgagaatgggaaggagaagagagaggattgcatgctgagcttgtaatcaggagagaagatacttctggaaaaaaaaatagatcacattttcttgatcttaaaaagttcatttaaaaatcaagtaatatcattattactcagacactgcctgttatctctcatcatctatcccctgcatgctattctctcatttggggtgatgctacagtcctttcctctcttgccccgattagcctaacacagtgtctaagatcaggtctctctgctattgtgttatccgtcagcctgcaattcaattcacagggagtatgacttcacagttcatacattgaacgttaccatacggccaggctctcttttccaccctggtatcgtccaaacctccttgtctcagaatatttgatttgctttgagttaagatttcatacttaaatggattttagagtctggagtgtaaaaacaaatctgggtagttagcacacagaaagacacatgcgagcattaagccaaggctttgagacctgatctattccacatgtcaaagcctcttgctcactcagctctgcagttcacatttaaaatttcgtgtgaactgtgttttgcagcccagttaatcttagctatctgtacaggaaatagttcctttacaagaactcagggtttaatgagtactttttctttaggagctagttcaacctctaaatgccatttgcaatacttcataagcctgagttattcgttatatcctggggctctgggtttgtaatactcagcatttacaaaatgaataaataaatcctagagagacagtcagcagtgctcacttgctaaggaactaaccttgcaagcacgagggcctgagtttaattcctaacccatgtgcaggaacatgtttgtaatcccagtgcctgggatatttaggacaggaggctccctaaggtcatccagactatcgcagtttgtgagctccaggccaattagaaacttcgtctcaaaggaggcagatggcattttttcaggatgacacactaagggccccttggcttctacatgtgtgtgccccctcacacacgtgtgtaccctaacataaatgtgcacctgtacaaacacaagcacccacacttatacagtgaaacaaactaaatcctggagaaacccgagcctcgttcacacaacactggtgttttgcaccaggacctgtagttcctttgcaaatgtgaccaccaaattggtgaatttactgtactccctctgcaagggaccattgtgtgatatccatgacttcttaaaagaagggaaacttggttactacaaacccggtttcaatattagttatctttctctaggttgttttatggtaagcaattaataatgttccccaggcaaatcaaaagtgataacaagcaaaatccacctcatggttcatttgtgtgtttatttcctacccctgtcaacatgttgttttggaatctgttctgcttgaggctctgttgatatggctttggctttgtaggacccagactcctgatttctcaagaggaaaagcaaagaatgtttgagtcacccactgacagtcaaggcctctatgtacacaggttcatcacggctactcacattcctcaaggctgagcaattgctgtggcaaagcccatagtcaatgggaaggataagtgttcatgttccatcgggaggcatggcaagtcacatgacagagaatagatattcaatcctctcacataaaagcagtcagtaattacgaagtatgagatagtctattctagcttccaagcacaaagaaaagagatttcttttgggtgagagtacaaatttacaagtgcttagtcattaagtacaagtgaatttgggatcagttcaagcagttgataaattttattccagtatctctctttaaaatgtgatggttaaagtactgctgtgcctgaggtccagagagaatacaggctttcagaattaataaggtttccttccacaaagagaaatacagccaaaatcaattgtaccttccaggactagtgcccttgaggcctgaaagcctctctcataacatctggatggcagctgcattcccttgctaacgtccttgagcttcattaatcaggacccaggggaccggccacttcacctagctccaatgctgcctggctgtttttcttccttcttgtcatcttctaatggactaatagaaatgagagacaatgattgtagaagaagcaaatagaacccaggggatgagagcagggtaccatattactcgagtttcctgtgttctagtcttcgggagcagcagtatgtatgctgcctctgttaaagactgaattgaagattgtgcactctcacgttaattgatcaacaggaatgtatcaaatgctataaatgcctgtttacaggctttgttttgcttgtcttttggtttggtttggtttggtctggtctggtttggtttggtttggtttggtttggtttggtttggtttggtttggtttggtttggttttgtgagatactaaagggacactttcttgtccctctgaaacttgcttttcagtcaagtagcataacttgacttaagaataagaaattcgtgttgcagatgtcaagagcttagactaaggaactggtatgagcctgactcagtggagtggcatgcgattctctcacatggctgaccttttaaaatagcttccgttcttacctttgcagaacatccttgcgtatggatccacatgcaagtctgtctgcatcttagacgctcttataggtttaatgcccataatatattactgacaagcatccttcttgaactttgtacttctactagttttggatgagaggaacaatgtcacaatatcccaccaatctttcccttactagctactgcctttaacctaaataattcttaatgaccttggactaaagacatgtctcctgagtattccataattctttgcatgtatccgtcttagagcactccataatttcctgcaagtgttcagagcacttttctactatcagattgctgtgtgtcattattttactattttgaaatgaagttcatctatatagatttccatgcactgtattaaaacattgttatgagtaaacttaagtcaacaaaataaataacatttattccaatatgtgagagacctgggcaagccccagcttgagataaaacacagtcagctgttcttcccccaaaactgccaggatttctccacaataaatgtacactgatgaaaacagtattttttttttcacttgtgttccactgattgtcctggaaaaccatgaatatttaaaattcccaaaagtaccttgtttaatacctaaacatggacaacattttgtgcttcagagcaatgagtgaaaatcacacagggtgtcagggaacccttgggaatgaccatcacatgtcagactctctaatgaggtgattcttgtttgtttgaagacagggttttcctgtgtagacctggctatggtggaactcggtttatatagaccatcacaaatgtggagatgctcctgtttctgcctcccaagggctgggattaaagtcatgtgccaccaatgccccgctctatactagtcatgctccaccaacatcagaataatagataaaaccaaacaaaaacaaaaataaagtttcccagattcctaattgtggtactcactgagccgcagtgttaagtgacaggactgagacctgctcacgagtttctgtgagcactgacggtcccacggggctcctagcagcacagggctgcttagttagcaataccttgataatgctaattgagagtagattaatattggggctactctgccctctagaataattttatgaagctagagtctcatgtatactctttaaacaattctcagctgtggagagtctctagtgtttcaccttttcaaatgtcagaaatatcaagagctcttctcaagtcaatattttattaccagaaatcttgggaaatttcactgccgtctcacatattccttcccatctcattagctaggcttagatggaataacttgttaagattatgaaggcagcgagcttgtgacagatggggacataaggggcccactcacacaggtcgtggccactgaactgaaaggtgtggagtgttgccttaaaccaattgattgtattggaatagtttgtttctcttctctcttccatactcttgctttaatattcattacatgtatttatttatttgtttcattgtgacggtggtaggagttgtactatggcagacaggtgggaaccagagaacaacttacagaaatcagttttctccatctaccatatcagtcctgggggtccatctccagccatcagctttggcctttacccaccgaacctgtccattaggttttaatcaatcaggaatgccaacaggtgttttatcacttgagctattatgttgtttggtatattaggctagcaatagtgtgcacatttagttttctagaactttgtttaggattctgtatatatataagtaagggaaattgattcatggttttaattttacttatgttgggatttgatagtagagaattgtgccgtgcttgaggccttatacatggggaattatctagttcttaaaagggcagaagacttagcaaatgcacactattctctctgagtgcttccctctcaggggaagcaggcggagaagctacccagcaatcctctgttttatccatggagcagtcattcccgttttcctcttcttcacatccttttactgatttatataattttattaaaatagtttatcttgagcattcaaatacatagacaaacaattgtatacaggattgcatttaattaattgcatgtttcttagactgtgtgtttgtgacttgtttataaatttttttattttgtatacttagcaggcatatattttaattttcttattagatttgtctaaaatttgcctttggtatccccattcccaactctcctttaaaaatctgttcttcagtacatttatgattctactttctattttaataatgaggtttaaatcttagcttttaatttttaatggttttattctgtttttagcagattctctctcgcccttctctctttcctctctctctctctctctctctctctctctctctctctctctccctttctctctctcctcctcctcctcttcctcttctcccttgttcgatgaccttcctatcattttaaaatgtttttggtaatgaactgagtttattccttggattgcaaattcacttaaactttcatttcttgatatgctgtatttttggtttttgttgattgggcaaattgtctgcagttacagatttatggcctcgttgatgttatggaaattaagacattttaagaatcacatagttacaggctgtattgacttaagattgtcatcaacatttgataccagttgtttgtattaaaacggacccactgactacttctaaatataatatacacactactaaattaaacttgtatttgttttgcttgtgctattgaccagtctccaaacactactacatctaccaaagtgactttctaattagcaatacaaatctttctttaattttctgcttaggttggagaccatgagagcctgcttcgaaagatctgtggcaatgaaaccttgttccccattagatcaatttctaataatgtctggatcagactgagaatagacgctttagtccagaaggctagtttcagagctgactatcaagttggtaaggaaacttctgcttgtgtatgtgtgtgtgtgtttctgtgtgtatgtgtctgtgtgtgtatgcatgtgtgtacaccatgtgatgatagaggccagggtgttggtgttttatctcttcttcatttcctttccaccttattgagacagagtccctcactgaacattgaactctacgatccagctggatttgctggccagtgagctctagggagccatctagctctgtgctttcagcccccacgcccagggctggcattgcagacacacactgttgtacccagcttcgtgggtgcttgagaacagaatgcaagcatatacaacgagcactttattgactgaatcatgttctcatccctatctatttttaaaattatcttattattttacacgaatggactctttgcatacatgaatgtctgggcacagcatatgtatgccatgctctcagagaccaaaagaactgtcaggttccttgagactggatatacagctggttgtgagttgacttatgggtgctgggaatcaaacctagatcctctggaagagcatccagggcttttaactcctcagccacctctctagccccctaaccatcccttcctacttggtttttaaatgtcaaattcacacactattctaacattttaatttgagttattctatgttcttgaatggcaggaaaaatagtcccacaaaagtgtcatattctgctggttttttagacagatttgtaatgaaattgaggtcaagaattctttatttctgagctaacgtggttatcatttttctatttacagcttgtgggggtgaattaagaggagaaggagtcattcgttcacctttctatcctaatgcatatgctggacgaagaacctgtaggtggaccatctcccaacccccaagagaagttgttcttcttaacttcaccgactttcagattggaagttcttcttcctgtgatacagattacattgaggtaagagtgaaagaccactgcattattcctaaaggaactatatacatttatgtgaaaaggacttgtacagatcaaatatagacataaaatttcctagcataatgctacttaatagaattcagtatatatatatatatatatatatatatatatatatatgtgtgtgtgtgtgtgtgtgtgtgtgtgtgtgtgtgtgtatgtgtgtgtacatatatatatacatacatatacatatatatgtgtgtgtatatgcacatatatacatatatgtgtgtatatagacatatatatgcatacatatgtatgtatgtgtgtatacatacatatatacacacatacatatatatatatatatcatgatgaaagcagatttatactaatgtatgtagattaatatgtcctaaaattcattgaacattacagtacaaaatagaacagtatcagtaaagtaaaaaataacattatcacttagtggaatgcacaaaaagcatgtgacagaatctacatgcatcttataataaaaacagtcaataaaagaactctcttactttgataagaggcacaaaagctgccaagatgccatggtacacagtgatagaggtaccacatgctttgcctcagtgactggttggtagacagccttgtcattgccacacttctgctcagtattgtaccggaaattctaactagggccattatacaagtgtaaaatataccctaactggaaagcaagaaataaaacttgttctgctcgtggccccaaagaagaatgatctacacgccctccacagttaccggctgccatgagcctcaccacaggcagcaattttccaaatgggtatttaacaaaaattaacttggctgtatctatttttccttagattggtcccagctctgtcttgggatctcctggaaatgagaagttttgtggcacaaacataccatcatttataacatctgtatacaatgttctttatgttacatttgtgaaaagttcttctatggaaaatcgtggcttcatggctatgttcagcagtgagaagttaggtaggagcatgtttctctctctccttttatgctgctatcagaataaatggacagttgtacagggatgtttatgtgtgtaaggctctaggttcaatccctacctccggaaataaaagttccttacaataaagaaattatataaaagtcgatgttttccctgaaaaattatcaagtacacttaaaaaaagactatactttcaacaaatacttaacaatagttattgcatacctattaacaaaagaaactaagttattataagtcacataaaagaatagcattctctctttgcacgtttaatcaatgataagcacattttattttggagcctgtgcagattaacattaactgttgtcacaatgattattgcttttattttgggactcatgtaactcatttattaacttctgtgatgatgatgattgttttattattactaattattactcagaatgtggaaaagttctcacagaatctactggaatcattgaaagtcctggtcatccaaatgtctacccaagcggtgtaaattgtacctggcatatagtagtccaacgcggccaactgattcgtttggtattcagctccttttacctggagtttcattacaactgcgcaaatgactacctggaagtttatgacactattgctcagacgtctcttgggaggtgagaatgtttgtctttttatgctgaactttgattgtatagtgtttatatttttgtacatagatgaacagagactataatgcacttaaatcattttatgtccagtttattttactttataaattagcaacatattttgaccttacataccattatattttgaagtaaataaagtgcatagaatagtaaggtcggccttactgatgaatagtatacatgatttagtatagtcacgatttcatgggcaataacacaaaatatccacctggtgcacattttttaaacaagcagtatgacttcgactatagttaccttgctatgtaatagatatctcagaatttcttctcctttgtatcttgaattacctgtcttttaccaacacctttccttctttacccctcccccaattactctaggtgctggtaaaaccattcattacattccctacaactttagaatcatatatcagtgagatcatgtggtacttctgattctgtatctggcttatttaacttaataatcatgccctccaagtttacctattttgttctgcatggcaagattttattctttataatatagtgttctatggtatttatatcaacaccacatcttctttattcattcattcatctgtggatggatacatctattgatgtatgtcttcagatagtctcagtagtaagatcacttgaccataagatagttaacatttttaattttagagaacttctatatagctttccacaatggcttactcatatacccactaacaatgtataaggttattttttcccaatatttcccaacaattcctctctctctcttttgatatatatttcaacagtaataatggaatgagattgtgttgatgagtgagaatcactccattggctatgcatatgtttgaatgcctgatccccggttagtgcagctgtagagaaggattgggaggtgtgggcttgttggagtagatgtggccttgttggaggagagatgtcactaggagtaagcactgaggtttccaaagcctactccagccgcagtcttacccagcctgctggctgctgatcaggctgtaaagccccaaactagcactctagtgccatactgtctgcttcctgcaatgttgataatggactagccctctgaaactgtgatgaaggcctcaattaaatgctttcttttatcagagttgtgttgatcatggaatctcttcacagcaacagaacagtgacgaagacagtgatagtgtatcattgtgctcttgattttgcgtctcattgttgatgcataaataacaccggtttctcatagatccatgattcatctctatgccttgtttgtgataattgcctattcagggcttttgtccattgtttttatctgagtatttgcttcctgttgataatactaagtgatttgtagtcttcatatttcttgggtattaactgcttctccattgttatgtagtttgccattaattctcgttctatgggctgagtctccattctgctgtgttcttagctatggggaagatttgtatattgctagaatcctacttgtctgtcttggcttgcctgtgcttttgaagttgtagctatagaaatccttgtccagaccaatatcataaagtgttttccctgtgttcctctagtctagtcacttcatttttcacacttaacactatttgaattgatttttatctcattgttttgtatatgcatgttttagttttcattatttagtaccagatgactgtgtatagtctgtaactctatgttttgattttcccatgtttcccataccttctagatctatttgatagttataattattttaatatctttattcattcagtgattatgtaattacttgttacgttttagctgcttattctctcttattatgagttgtactttctttctttttatatttgataatatttgataagccgttcagaatttttaattttatgtttaggacaccagccattttatacattcttgtaaatatgtatttggactttgtcctggaatggtgttaagttacttgaatccaagttggtccttttcagtttcccttttaattaatttatttcctgtccttgaggtttttcccttttcatttgatatttagtgtcttgagaagctcttatgtattttccctagcgtttcagatgtttgagtgcaaagttaaacctggcctctattattatgtttgtgttgaaagtagaggtcctctaattgctttttgaacatttaaaaaatctatctatctatctatctatctatctatctatctatctatctatgtatctatctatctatcgtttaccagtttcttggctgtatgtatgtccctggatcatatgcatggtgcccacagaggcccgaatctgatcccctgagcctggagttttgggcagttactactatcttctgtgtagatgttggtacttgaacccatatcgtctagaagatcagctagtgcacataactgctgagccatctcttcaacctcctctgattgcttctctttaaagtcctcttgtatcttcttttcttctcctttattagctttgtaagcattatctttttaaagtagtctctaaatttcttccctcggtctttactgctcctcaccttcttttgcttcttatcttagccttccatctaaaattgtctttgtctttctttaaaataatatatgagtatcttttaaccatgacaaaatgcagtttttgctgaagggaataagctttaatgatcatgtcccaatttaggatgcaagaccatgtgtgcacagttatttaatctgtcttctttcagtcatattaagatgataactctctgttatcactaaaatattattctacatcaaacttatttaattttcctgcttctcatagtcaacattttagcttatttttgcttccatattattttcctctcttgttccaagcatgcgttgtctctagatttccctttttctaagctcttcctcctacaggtgtttctccagatgaaacaccgtggcaccgtgtgatgtactatagctctgtttgggggattatgagaatagattttctgagtaaagcttccttcgttctgaagggacagagacgtggtttcctggtcacactcttacctcttcatacatgagctgtttaaagacagcagacaacttacgcagaggtcactgtccaggcactgctctcaatgcctagcttcagcgatctacctgatccagatgttcagaatgatgtgaagtctacggagaagatgacccagaccaattaaaccatgtgtccaaagtcacagtgcacctgagtggcagagctgtctagggctctgctggatggttttggatgctttaatgtggtagtaaatacagtaaaggaacataattcctttagcataggtctaggaaagagttgctcagtgcgctgacagcaggtgcctgcagtctgtgcttcctggtctcagaacatttttcctgcatgttaaggcattaggcgtgccacacaactcttccactgcgtttctgttattactgaaatatacttggtttcaaggttgatgtgaaatagataacagcccattgtcatttgtattattttcgtctttacatggcctattgttcagaatataaggtcaaatctactaatctgtgtctctcttctttctttctttggaacagatactgtggaaaatccatcccgccttctcttaccagcagctctcattcaataaagctgatattcgtgtctgactctgctcttgcccacgaaggcttttccataaattatgaagcaattaatgcatcatcaggtaacatttcctctgctgcaaaagatgtttaatatctaaaacacacaaatacttacttggagtaaagtataaagacaagatccacccaattaaaaatagggtaaatctgttagctaaactgtgtgctcctttagggattctggaccttaatgtttatatcagggttagaagatgtttgatacagaaaagtagcatccagtgcatagctacagctgtcacatgttacccctacttgccaagcattccacagcttggggcatttttctgggcctggacatattcctcttgagagtcttttgtccagccacctttgaggtgtttatcttcttacacctgtattcctaacataaatatagaaagaaaaaaaaattcttactcaaaatccctagccagtttttcacttatttctcctctagaaattttggtcactatactttaatccaggcaaaagtagttcagcttctgtgttctggaagcatggctttaaactacaaactgcgggagaactgtatacattgatcactggtgggattcactctagcaggtgccccattatctagcccaagcacatgtagaggtaaagcgcaaggatttaaagtatggtgtgttgtgctatgtaactgacattttcactgaaccttattcaagtggttaacagccaaagaccaaagtggatgtctcaggaaattacagtgtatacacaattttctatacttctgtagtttcatctctctcatatgtttggtcccaaaccacaccaaatattcgatttggagtaaatcagttgaactctgtggaatacaattttcttatctgtgtaattaaaagataagatttaatgatctttcaatgttttctggttctaatcttctgtgaacacaattttaatttgctgcatgaataaactgcttatttcttaaatagcatgtaatgtgggcagtacctcctgaaaatgtcatggcgttctctgcactagtatataaaaatgaagcatagttctgtaatgactgaaatgattgtgttatcactacactagcttgggaggcagtatgaagggaagagacagctaggagccattaatataagctggggatgaggaggataaatttaaaatttaatgaaattgttcagaaagataaaattcctataaaactcatcaaagtaataggtccagtagacaggaagggaaactgatacagagagtagggaatggaatgtgctcagtgctagcatgtgctcagcatgcatgactaggttcagttcttcccagtacttctaacataaaagaggaaacggaagggaggaaaccccaagggctcaaaaagaagacactgaaggagcaactccagagactctacccctgcttccctgtgttagtcatgactccagcccctacttggtctagacagagcagaaatcacagaaaagagagtgcatccttttcaccacttgactgatgactatgtatctacctttttttgaatgagctcataggactggttaacacagtcccaccatttgaaatagcaatcagatgatgagacccagaaagtcatatgggtggctgggttgcatgagttgttgaagctggtcctgtagtaaaactcagagcacagctggctcaggagaccagaatagaggtggtggtggtcaggcagttagctaatgctcccaggagcttgggtgaaatgagctgctgactggaaagacagaggggaggactctcttcagctagcgtcttcttctggctaatttctgtagactgaaatcatgttggataaaagcaccagaggacaggcaatcattggcctgtaagctatttccttgttccaaaagaagttatttttggagtaacgatgatggtttggactgctgaggtctagtttcttaccacagcccatggacatttcccttgactctggcctgctttcatttaatagagtcaaattttcctgatttgaatcccgttacccttctatctgtagttcctgcaataagtctatgatgtcagcctttaaacatgtgtttgggagtaaggagattggcttcttgttcatactctgactccctccctaagtatttggctgcagctctcattcaaatattcctgagaatatatagaaaacaaatgatataacaaaagtaacgatgttggatagaatctcataagaactctttaccactgattatgacatccaacatttattagcatgaagtaaaatatttgcatattgagataatataattggtatactttacaatttaaattattatctgatatcctataacaagtattacttatccactgtcttaatatagaactagtaagcgaaaactttacaagtatagagaaaagcatatctatataacgactactccattattcttcaaattaattcctgattcactcatgactatattcattaaaaatatgaatgagaaaaagaaaaacagagtggaaattatcagaggtaccatacaaagttagacttctcttcatgaaaactgtctaaaaagctcagtaagcatgattggattttatttttgtgacgtgtctagaaaatataagtacagtctttcccaattaatctttgaatggaggcaatatcagtctagaatgttgaatctgtcgtcccaagaataaacagctggctggtttaagagccaaactaagcaaacaggcttcactatgctgcctgtttctgttgtcattctctccagggctacagcggaactatgaggaatgtttcttacattttactaagagaagagcttcaaaattacccagggaagtagctagcatggtcccaagcacaatcttatgagcaaatatccatataaaaaggtgaatccactgggatttccttctgtcttacactaccgtgcaagttctcatcagtcaccttggagtgagcccagaaagggaaggcaagaagttaggaagtgataaccaagagggtcacaagggatttatttcaaagaaatgggcagagcacgttctgtgtcttttcttatatctccgtgtggtaagagcaatgttctcagattagaatggtcattttaaaacatcttcagaaagaagagattagctcagatgttatggttataagctcagatatcattcttcaattagaaattctaattaaggtctttggtatagttttacagaacaattcaagcagatctagttgaattttgtctttatagtttatttaaaaactgttataaaagatagtaaagaactattatactcatgattgcaggtcttattcactgcagattgaaactaaggccagagagtgtctgctgagtgacagcttgatgctggcttgaagcagcttgggcaggtttcaggcttcccttgattgtatacctctatctgaaatttctcatattacatgctcaaatatttttgagaaggtttttttttaaaggaaatctattaatctctaaaataatttcctctagtaaatcttaactttttttaatgtttcgtacaaataacccatcgattcacttctaggttttgtgtgtgtgagtgtgtgtgtgtgtgtgtgtgtgtgtgtgcacatacacatgtgcacatgtgtctgttgggccttagaatgaaaacagtgcttaattggggtattcttaatcccttacaggtctaaattgacatttccactgtagaaaactagggatcataggctgagggatggctctgtgggtgaactatctgttatgtatgcatgagacctgagtctagatcccaggtacccatgtaaaaaagtaaaaccaagcctggaagagcacacctgtgctctcagtgctggaagggtaggggcaggaagagtcccagggttctaggtcagataaggaaccctttctccaaaactaaatagaaatatgattgaggaagccatctgacaatcaacctttggtctctgtacattccctacacactagtacacatgtgtacacacatgtacacatacccaaaagagaaactagagatcattagagagttcaagatttgaaaagagtccaaattttatctggtgttcaatctaaatgaattttaaaactaatctcaaagtctcctattcctcttccacacatctttaactagacatgatgactatgttgtttcgatataaaaataacattatgataggctggaaggaccgttcagagatatgtgtgtgtttagaccgcaccagctatgttaaaaaggtagatatgcatgtgtgtacctatgatatcagggttgggacagagggaacaggaggactcctgggattttctgaacaaccaggcaggcagaatcagtgagctttgagtttagtgacagatcctatttcaaaaattaaggtggatgagtgatgaaggaaacattggtattgatatatggccttcatgtgcacatacaaacttgcacatgaatgtgtatatatacagagacacacaaattatattacatatgtaaatgacatggctttgtcagatttaaaatgtgattgctaatatcccccagagttctgtaatagctcctctgcctttattcaacagcatctgatatgtcatctgtggggtcaaagaaaaggcagtgactgtaatcacctggcagcaaactgtagcaaaatgttagattgctcttccgtgagagaggaaaatgtgtaattttatcttccctcacatctttgctttgaaagtatagacttcaatacacaatgaaggcctctgatgtttccatatcagtttattttatatttagaaaagcagttttcaagctgtgagtctcaaccattttgtggttgaacacctctttcacagaagtcacccaaaaccattaaaaaacagatatttacattacaattcataacagtagccaagttaccattatgaagtagcaacaaaaataattttatggctgtgggtcgccacaacatgaggaactgtactaaagggtctcagcattaggaaggttgagaaccaacgatgcagagaatctgagatgatatgcattcactcagaaaccaagttttacatgatcttggaaactatgcctccctaagcaatgggttcccctgtccacagtacctatctaccctcttcttgtgccttggtctcagggagctaatattgccatggctttgtgagttgaaggactcccggtgattcccagttttcccattggccacctttaattctatggtgtaaaagtttttatgaaagtgcttaatcaggcagaaaaacatggtcatttttagaaaaatgtagttttgtaatttttttattagtctacagagtttatttttgacagtatattgtcttttgttgggtatctattaacctgtgtgtgtgtgtgtgtgtgcacacgcgctcaagcatgtgtgtctggaatgcaagtgtattcttgatcagatggtacactcaagtctttttcccttcattttatggctaatgggcttctgttttctatatagaaaatgtttgcttgtcaaaattatgagaccatccctctatgtatcttctagaagttctatagcttgaacttttaggtctaaaattcatcttgatttcctagtatggtggtctaagtttccaagtccattcacttatgaaagtgatatttagtggagcaaggccatgccttaaactcatctccctcaactctacctacccccccccccaacatatacacacactggatttcctttaacccgttgctgacaattgtccaagtatattacatgtgtgcctctggaattcttactctgtcccatgatgttcatattggaccttatagtaaaaggagagtctgttatacaatattattggcttcagggagattttcacaacagcatttgcatttcaaaatttttcttttggtgatcttagatcctttatattgccatacacattttagaaactgccttttgggtttttttttaaccatttaaaaaaattgactgaaatcctattgaattcatagatcaattgggatcttgggacattgcaaactatgtcttccactccgtgagcatattctaacttgatggctagtcatactttctctatttctatgagcacttacttaaagctctgagtgttgatttttgcattttccctaggtcatcatgtgctttatgctgttgtatgctgctttgtgcattatattccagattgaccaatacatgcatattaaactgattttccagatattaatcatgtattatgtaggcttttaaaactcagtaccaactattttttggatacaaaacatacataaatggtcccaactgtgaattgctgttttgtgctgttcttcctttctccctctttcttattgcagtgagcaggactgtacattgctcagcagaggggtgaggctggacatactctattcttcattttggcaagaatgcatttaatcttctattctttaagaactatgatgggatctcatagatttctgtttttgtcttgtttattgagagtcttcatcaaggatggatgctgattttttctgaatgatttaatcagaagattctttttaatccagttaatatgatggattacttagattgatttttcccacatcaaacaatctgatactcccagtgtgagcaatgcttgctataatatcatcttcacattctctggaactatatgcttaagttttttttcaggtattttatctgtatttatgaggcatgtttatctgtagtgttcttgttgcaagtttgtcttgtttgagcatagcagtaatatttggtcttaataaatgagctagggagaatcatctcttcttatttcccaagtctgggtagttttaatatttccttagtttgcttgactatcaccaggggttattcaaatacattgttttctttgtagaaaacttttaatgacagatagaatttcttagcctgattgtggccatggaaggtgttattattttcttttgagttagctgtggcagttggtagctgggaacaaatttgttaagtttatcacactgttcttttactgactggagattctatagtgtttcttcttctttcactctttttttttttagtagatattttcttcatttcaaatgatatcccaaaagtcccctataccctcccccccccgccctgctccccaacccacccactcctgcttcctggccctggcattcccctatactggggcatataatctttgcgagaccaagggcctctcctcccattgatggcctactaggccatcctccgctacatatgcaactagagacacaagttctaggtgtgtgtgtgtgggggggtactgattagttcatattgttgttccacctatagggttgcagacccctttagctccttgggtactttctctagctccttcattaggggccctgttatccattcaatagctgactgtgagcatccacttttgaatttgccaggtactgtcagagcctcacacgagacagctatatcagggtcctgtcagcaaaatcttgctggcatatgcaatagtgtctgggtttggtggttgtttatgggatggatccccaggtagagcagtctctggatggtccttccctctgtctcagctccaaaatttgtctatgtaactccttccatgggtattttgttcccctctttcactcttaaaaaataacaattcatagtttttcttcttcacttgaacacttgtgctagaaatctatcaaatttaatttttaaacaatggggctattttttatatcattctctatttctgttccattttccttgatttcagttctcacctgtggtttttctaactgtatttctatttgtttgtttgtttaacttgtttctcgtgagaaattgttcaaaagggaggggcatgaagccagtcttatcttcaactgtagcatggtggtcttctgtgttctattgcataaggatttcctcagagcacaagttctacttagggaagggtgcacacacaggggtattcccacctagccagattcaaatagtagtgctcacagcagatggctaagttctgtttacttttcttctgtaaattgtttgggtcaatatttctaatttagcctgataaattttacttagtagtattcataacagtatgaagcttttaagatatgcctctttcctttctaattattgctccatctcattgccaccatcttttcttcctctcttttacctttattcacttcctcctttcttgacttccctctgagagaacaagcactgcgagcttcctcaatacagtaaagccttgatttgtaaactcaaatatttgatgactttttgttactcataggtagtagagtctattacatttttgtgttcccaataccaatgataattctccccgtcgtggatgaatatatggcagcaattgaggaaacgtaactgcacatcctcagcgtttatttcacttgcaacaaagtatacatattacctcgctctctacagtttttagtcggggattctgctactccaagtccccagatttaggtcattactgagtgaaatttgaagctagatgtatatcacaattaagccagactttctttgtcaaacatgtcagattgtaagagtataagggagtgactggttggttattgaacagagtctgaggagactgaatagacaaagtgtacacaaactggagcagttagtgcttaattaggatgcagcattccagatagacttctaataatctcataggaacagttaaacttactcctcgtaattacacttctccttggcctattctgtttgaaatatattgggaattattgctacatatgtttggcaaggcagattttttagctgaatcaaactatacccaaggtcagcaagcatctccatcatagaaaagagagaactgatatcaggagatggcatggtgcgctcaagtagcctgtagatagtcaagacaggctttgatagaaggtcttttcaactgtgggtgtgcacagccacacctagatctggcctcccactccttctgcatgaccaagactccaacctggtcacttctcatgaatgcatatgcttataaagggaagttatggagagaattacagaaatgaataatttctaagtctcctgatatctgtgtagtttaacctaattattgtttatggtaattttcatgaattagaaaaattgtaacacttctaggactctgtcattctgtcaaaatacatgtaactatgtctttctcattgttaagattttagcatttgattgcatatgaaaatttgaaaatgtttcaaaatgagatcaatctttaaatattaaaaaatactcctgaaattcaagtacaggaacacaaattaatgcattgtatatgactagacacatgcaagttataatgcttcccatttttctctctgtttcccttcacagtgtgtttatatgactatacagataattttgggaggctctcctccccgaacttccccaacaattacccccataactggaactgcgtctacaggatcactgtgggactcaaccaacagattgcattgcatttcacggactttgccttggaggactattttgggccaaagtgtgtagattttgtagaaatcaggtgtgtgcttttatttcattataacctttattttgattaaaaatcttcaaagaaaagattaatgggaacatggaatgttttgtaaaattaccttatatgttcaacattataaaatttgtcattttaaacatgatatagaagaaaaacagaaattgtataaatttgatggttaagttttacttcttgatttaaattatgcttacatgcatgcatatgagtgtggttatgtgtgcacgtaagtggctgtggaggcaggaagagatgtttgatcctctaaagttacaggtggttgtgagctacccattgtgaatattgggaattgaactctgctctttcgtagagagcagtaagtaatcttatgtgctgagccatttttccaacctctgatagttacttcaagttcttgtattaggaacattttacaataattgtcagagtttacttaggcaaaggaagtgctactattccaaaggtgatgctcactgtttttgacatgcaagtttcatttctgttgctgtgataaaaatatcttatgaataagaaacttgggggaaatggggtttatgagcatacagtttcaggttacagtctgtcagagcaggtgagcaaagtgccaggcactaagtgagtcacatcataccctcagtcaagagcaaaaagaaataaattcatgcatgcttctagctagcttgcttcattgcttgtgcccagcagctctatttctctactctcatataggtcaggactccctgcctagggaatgatgtcacccacaatgggctgactcatcccatgttgattaacttaattaagacaacaccctcacagacagctggccactggccaacccagttgctccactgagactcctttcccaggtgatactgggttgtgtcaagctgatgatcaatacctactaccacagacaagtgccttcattgtttatgtaaaatcagtctttttggtctttgttgtccacctaatctaattgcatcactacaatcactgttacaacagcatccttaccttgtgtttgaataatagaagtctaggattgtggatttcagtgtgtgaagttttctttcactgaactttgaaagaatgtattataaaaattatatcactgacagtggtatattggtataaagatattttcttataccagtgcatcaagtaaaattaggctgattgctttggcaagcagctatagcaaatatttgacttgtttcaaacttgtaatctttcaacattttatgataaatattatcctttggtataaagtaagatacaaaattaacaaattacaattgacccatatcacactaaaccaacagttttattttggggaagtgagaagtttaagagtctcactctatagcctgaaatggacaagaattcactagatcatccaggctgtcctcaaactcagagaaatcctcctgactcagcctactgagtgctctgtgattatagctgtgaattttcacacccagcttaattttcttaatttatagcagctaaacacttggtttcactattcaatgagtcatcctttaaaaagatacctttagatttaaaattcccaacacttcttaggaaaataattatgtctacaatagttccaaacacaacaaatatgtcatactacatcttgatgatttcaaaatcagcaagaaatgtaaggtttttcactaaaaatattgatttatactgtcaataactatagtttctatattctgtatcctctgatctacttggctgatgtctttagaaagagaatctcaaatatatgctttactcagatggtataaagatgccagacaagccatagataatagttattgttcgccccccccccccaaggtcatgcaaatcgtagttagtaaagaactgagacctgagaacttaacattaagttttttaagtagtgacgtcagctgaggtgatgaactgctcctctgcatccccatgcttaaacatatgtgtttattgtacgctgccatcaaattgtaagtcagtccactttcatgtctctccctgtcacagagatggaggcttcgaaacgtcaccactcattgggatttactgcggctcagttttccctcccagaatcatctcccacagtaacaagctatggctaaggtttaagagtgacacggcactcacagcaaggggtttttcagcttactgggatgcgtcatcaacaggtaagtagcaaggatcttacattttcctggagaaaccaagctgatcgtgtttttcatttgtcatgctatgtagccacctgtcaatttttctagctatcctttatcattcatcattttttataatacgctccaacatcctgggtatctttggagtcctagcatcatacattttgaaggaagaggaaagttctacttccccgggagacttcaagctactcatcttgactagataaaggaaagcacatgaatgtgaagaagagctttagatgactctctgctttctgatgctttaaagaggagcacaggttgggtggtgggggtgagcccctatgatccagaaataggaagcagagacaggaggattccagttggaggcaagcctgggctacatagtgagtttttgtctctgaaagccactggcttgaggtgcatgcctcagtggtagagctcttgcttggcatgtgtgaggtccagggctccgaccccagcaccgaatacagaggacagtggagtgtcgatagggtgttttagccaaggtttatcttgcagaaagaaaaggccatgcttcccccactgtgttcccctgcaggctgtggaggcaatctcaccacccccacaggggtgctcacatcgcccaactacccgatgccctactaccacagctccgaatgctactggcggctggaagccagccgtggcagccctttcctgcttgaattccaagacttccacctggaacaccaccccaactgctctctggattacttggccgtatgtatactgtgtctccatgtcatctgttgctcctccttactcaatgcacaaaacacatttaaaaattattcttaagatttaaaaagcagtgagatttaagaggagcatttacataaaagatttaagtgaagtgaaatcttaaaagtaacatggtaaaaatgacagtcttctaagtatatgtacctagtgacttgagacataaagtatttaaggtaatgtaccgtaagctataaagatgtatttaacatatgctgaggagttatggactttatcctaactacaatgtccatgatttcagataggcattggaagctcacgatgctctggtttattgaggagaactagaggagatgttaaattcatctagctataggtttttatatagttcttgcatgtcaccaagttcttctagaatcctgtaaataaaatgggctgatgttttagactttggaataaaagaaccagcaacatttttcagttatggtctcaattttgtttattgaactttctttatgcatgcttagccttcagtctcagtcagactacaattgtagctcacatgctgactgtcaagcatctgtttattgaccaagttcagagatgcttatatggaattcaggactggctgtttttaaagcatatgcccattctgtcctcatcttttttactgaagagtcctttgcacttagtcttgactgtattatatgcaaaatgtcttattaaaggtgtttgatggcccgagtaccaactcccgtctgataaataaactatgtggggatacaccacctgctcccattcgttccagtaaagacattgtattgttgaagctgaggactgatgcaggtcaacaaggacgtggctttgagatcaactatcggcagagtaagtgcaaactccagcagtgaagagcctccagcagacgtccagacttacttagccaaactacccagataacattaactagtggtttgaggcgctggaactagacttaaattcttatgtgaaaactccaaagtcattgaaagggaaaaagcttgcatattaaatccaatcacatattagccaagcatctggtaaaacaagaaactcagggtagtttttactctgtggagacagctgtagttcagctcaggatcatgtgactctctaatggcatgtagattccagtcatgccacatgttacaatcctttaactagacattgtccagggaacagatacctgtcagcctaggttctgtcttctgcctgagttttattcagtagagaagcgttcatggagaacacatgtcctccactctagaacatcttctacagtaatgaaagatcttcctgatctttcttctccatctcctcttggcataccgagttcttcagaaattctcattatcctgtatacaaacagcttcttaaccctccatgaggagtgtttctgcttgagtgtatagtcattcttttcattttgttattgctttgcctctctttcccttggttattgtcaggttattaagccattcacctttgatttcccccctccaatagttttttatacataggatatcagtccttacaggtaaaatcagaggctgggaatatggatcagttagcagggtgtttgtctagcatgaagttctaagttccatctccagcacttcattcaactaagggtggtgacaagtgtacacaatcccagtatttgagaggtggaggcaggaggatccgaattcaaggtcatctttaattatataactagttagatactagcgggtgctacatgagttctttccaatcagcccccctccaaaaaatccttgctgtttgaaattagaaacttgcagacgatatcatttgtgagatgaaagaaccagctctgtgagtttggaacatattgcctctattgtcttgactggggatacacacatatatgtgtatgtatatgtatgtatatgatgtatatgtatattatatgatgtatatgtatatgtatacgtataattatatgatgtttatgtataaatatggcctaaagacttttaggagaacagttatcttcaggagttccaggttattgtgtctgcttcagcaaaggaagaatttgaagggccatgtgatgcatccccaaagtctctaagtggtgtcctgacagtgttgaataagaaattatctaggagccacattgcagaggcagctctttcaaagcaatgtttatgttcccattttcttttattgaaatagaaaatagtaaaagttatctaaacagtgagaaaggtgggtggtgcgtttgctttgttcaggtcattttgattgactggacctggtgtttaaccccaagattaggcataggtagtgctacttgtgtggcactgctgaaaactcatctttagaaaatgctattcataacattttaaaacttgatcgaaattgagggattgtatttcccttttcccactctgtgtcccctctgttcactcagaatgtcgtgatggtaacttgaggaataagggagcctttgttgaggatgcatgcaggcagctgtgcgttctgttattcatgtgacattcacaaaggacttatattctaagtggctgtattctaacattagaatattaatttctctaaaatatgaaaggtttgaaaacagaagcacaaaatgctcactacacatctctaattccagcagagagattagaataaaaccaagttatttgtccatatcaatatataggaatagcatgtctattttaatgtagctttttatgacacttcagtacataaagttaccgattactttacattattgtaactggagacttcttcagcataaaaatgacatgtcgtgtatacatatatatttattaatctagagtggaaagtggaaaaatctagatgtcttttaaaaaggaatttcacattgatcttagagacattatgatatagatatgagttcttaacactcttggcttttcctcccccccagcatgtgacaatgtggtaatagtgaataaaacctctggcatcttggagagcataaattacccaaatccctacgataaagaccaacgttgtaactggaccatccaagcaacaacaggcaacacggtgaactacacatttctggaatttgatgtggaaaattacgtaaactgctccacagattacttagaggtaagtgtcttgaagctcaataagcaattccatgttcctatccagaaaacaaaactatgctagacatccttcagactcttcaggttcaaatccctagctctgtccggtctgtctgaagtatatcaccatcactgttacgtgaatgggtgtgcttcatgtctctcattgcaccgtttcaatcttaacttaaaattattatcttgttagttacttttatgtctgatctctgtgcataagagaaaatgtttgaatatactcaatacttaattttctaaatattaagtattatttttatattttaaaattcaatttcatttgaaacaattttttcttttgtgaaacagatattttacatgtctatatgtctaacatgtaacatttattcaagtttctttatgcaatcctagtcaataaaagttgctttactattaaatgtggaatttaatagtgaagaaatgtagactatttgataatatgctattttagtcataggagatttcacttgagaaagttgttcttatgatttgcatatgcaacttttaggattatagattttcaaaattaggaagaaatttatttggtttagtttaatattaataatcactcatgtgaatattagtttttattttggtttatattctcatgtatcatatctaagttggcatgtatgtgacatctattttccataattaatgacattgccctttgagtcagctgacatatttcttttatttatctctgtgctggtaacatatgatactactgtgtccccatctgaagtgtagaggacctgctcggactacacaggtcattttttatggtcttccaccaactatgtaacaatggcttagtgtagcattttgaagattattagtaaggatgtagctaaaggtagagtccttgcctaggatgttcaaagtcccatacatgttcaatacatgttgcaaaaaatatgatttgtgttgtttggaaatctaccttgcaatgatttacagcatcaacacatgtcaactaaagccatatccccagggaaaacaacctcttgcacatttccttaactctctttcaccaattttcctaaaagattaatgtgatcacactgttgtctgagatcaccatgccttttctaagtactgaattggctttcaacacaaagaagacagaatatcttgtctttgagagacttttgcttgaagctaagaatataaggatattcttttgttttgggaaaagttctcgtgggttaacaacaataataaaaattatcaaaaactttagcaagtcacggtggtacagatctgtaatctcagggtttaggaggctggggcagtagtattgttagcctgaggccaacctgggaaataaaaagactctgtctcagtgaaaaaagagagcaatcaagcaaacataaaacatcccttcatttatatgtagaagcaacagcatgcagaaatagtattcgcacatcaggaagtgataggtatttgttgccctaagaaactatgatgtgttacacattagatttacaagcataaatttggaatgctctttgttattgctttcatggtttggaaatagagtatcctcttgtagatcaggttagcttcaaacttgctatgtagctgacgttggccttgagaacatgtttttgttgcctccacctcccaaatattggaataataggtgtacatcaccatggctggcttgtcaatggttctagggtcctcttcctctcgagtcaaaagcatgcaggagctcaggaactgcctttcctgtttatataactgaattatacttttcttcacagaggagacttgactcatggtttaaatagcaagttttaccaattagggctctcaacatctcctggactcctgacttctcaaagtaccagctatctgctattaactttggccaggccctcactttccactgagactctgcacaagtctgagaatctgagggtaaaaagtcatagccatatttcagctgtagtctcataatcgctattaattaatgagaaagaactgcatttaatgcaaatctttctgtaaattcctacactttcggtacagtcctacctctttgagcacaaaccacaacctgggacagatgccaagcgttggatacataaaaaactccatgctaagtggataccatggttgggattggagatagtaccgggaggagagcgcataagaagaggaagggactggactggtctttacttgggagaaagaatggggaggaagtgagaggaaacatttccaggaactacatcccacttttttggattggcccgagagtgcaatgctcccaaaaatctcttcaagtcattttgagaggtgtttaaaaactcaattaagaatacttcttccaacggctacaaaacagctcatcagaggccccttgcgatggcgtgcctgtcgtgttccaggcatggcacttgtcttgtgcaatactgatggtgaacgcgtccaagcacagaatgagaaccagaagttcagaaaagacttccaaagaatgacacaattgccagagggaagagatttttttccattgctataagccaagaggcaagagcagagcagagacgcagaggctggtctatgatggaaaatttcaaaacgcaaccatttaaggagaaaaaaaaaaccctgcaggcataaaatttctagcttccattattttaataacttctagttaaatgctgtttttctttcccatttccttcaagtgccctaggcaatttcccaatgagtgacaattactggagccagaaattaattattttgaattaataaaactgaaactataaaaagactggattaggtctatcccacacctcactgggaaacaaacctaccctttaatgttttatcctctggcccaaactaaacccctcaggcttagaactagtgtctcagagcgagtgctggttgcttgtttagggaagctggacattgcctgtgcagctttgtgaagtcagcgtcaaggatttgttctgtttcctaacttgatctcactcttgtcttcatttttgtcctaagtttccacttagaggacatttctactgggtgactgaggatacaggcagaagcaactcttatgtatgaaccctgtggcaggtgttaggtcaacaggagcatatgagtgagaggaagaagccagagaaaggggttgcctcagtgaaacaaagagagggttatggaaggtgaaagagattgccatcagaggggtcaagagagggaggtgaggatggtgaaaattcattggaagataagtgtgaccaaggagggccattgctggggaatagcaggaggcaaatgggtgtggggagacatactggggagaaagcaaagttccactgagttctttgcctcaaaccagtatgtgaggccatggcctctttcctctaaccctcccttttatttccttacctggtgctcatgcagctttcatgggggtgtccttctaatatgtccttttgcatggcagactgtcctaaatgtgaccccaaaagtggatagcacctcccattaaactggacagagctgacttgtatgagagtatattatgttcctggtattatagatagacattatatgatgttccaatcaagttatagcaagacctataatctccaagttgcttcttaggtgagttgttatagctaataagctctgtggcttataaaaatcttattcaattttgatcgtgtagtttttaaaaagtcacaaagggcattattcctagtaagttatattgaaatttgtctggtaatttcttcataccatgttccccctaagtgcatatccattactctttagaatgttattcattatctattatgaatggacatacaacttcttcaaaaataattgattaaaaaaatcacacaggatggcctctgttttaaatattctcacacagtggattttgtttaaatggatctatagttgaatatttagaaaatattgctatttaaatatctaggaaatattaatatagctaatatctactaagcatatattatagctaggtaacacaggaaaacattgtcctcattttacaggtgagaaaagttttgtagatgtggatttctcataggtaagcataatggtactgagagtcaggtgggctgaacactaggcactgtgccttgggccttcacacatcatagatggcatctcacaactttctgccactttcacagaaatcatgagggaatgctcatgggcccctcacatctatgcttatgacattcttgccaagaggcacaggaatgttttaccatggtctcctcatggaaatagtcttctactgtaatcacagtttcttgtatatcctataattccttttagggtctaatttagaattttagctgaaattcatgtcactctcgcctgtttatgaaatgtcaggacagaacttttctatattttgccaattgaaaagacattggtgtgggattgctgctgtgagaggcgtgggccatacaggagaggctgagaacccaggaaaggcccaggagtgaactctgccctttctcttcttgtgaagatcggttgcttctccatggctgtttccgtgtagtcttttctccagaagctccttagagtttctatgcccttgtcgtcacgaacactgaagccatggctgtgcataggacactaacctcaagcacttaatatcaggggttcaatgttttaaaagaagcagcaaaggtgagggaatagcttacttgtgcagggcatgccagtcctcatatatggtgtctgtaagagtggctaaaactcccagcagggtcacagtttcactgtcattctaaaatattttacaacaaccaaactgtcaccaagatgacatgtttttgtttttgtttttttctgtgtgagtagttattgcatgatagagttcactcatttctgaaaagattcaattcaagtaactggcctatctcctgaatggaaattctatgtctctttctccagtttcagaatcaatttctcatcttccttctctgtgtcaaattcttctttagctgaaggtatccaccaccaacttgaaccaacttggtcctcttcttttttctttttgttttgttttgattttgatttttcaatacagggtttctctgtatagtcctggctgtcctggaactcactttgtagaccaggctggcctcgaactcagaaatccacctgcctctgcctcccgaatgatgggattaaaggtttgcgccaccacacccggccagggtcctcttcttaagtcaaccatagctttaaaaattagaaaccttttcctatttacattaaacccaaagtttagctgatttgcacacacactagtaggatagtcagagagccccacaggttgcttccttccttcagaagtttcctccttggtacccttccacatccatgccatttctgattcatagcatgctttactttttaataatctatcttttgtctggaagtttcttttccttttctttttccctccttcagatctttgtttcttgacctatattgagatatatagtcttttgtgtcactttgaaatctgtcacccaaatcataggttgatgactggcatgctcagttgtctcagtccttatagtcagtgtaccacttgacccaatcatttggtcacctccacaacaactgctccttttacagcattacaatgaatccacaatagcacttctcatttctgagaaataaccatggcaataattcaacaaaatctatggttttgtgcaaacatgacatctaacaggggctcacatggttgattggccttccaagtgccatttctgcagattatttgaatgtctccgtgtggtgtcagcatttttcctttgtaaagactgcagtctaggacttagagttggcttggtggttaagaacacttgtggcactagcatgaaggctagagttgttcagatccgataggatacctgtaaatctatggaagaactatatggaagaaagctatggaagatgaaaaacttgctggggcagattatggggttttcttacttccaggttagctaagaaaaatgtgaacctcaggttcaaggagagactctagcaaaaaaaaaaaaaaaaaaaaaaaaaaaaaaaaaaagcagagaatgataaaggacaccagatattctctttttaacatttcatgtatgcacagagtacccacacaagtgacatacacacacacacacacacacacacaaacagatatagatagatgattgaactttcaaaaattgtctctaatgatttagaactataacatttaaaactggctattaaatctagctgcagtccaaaatccactagggatctcattagatagagctgactttagtcattactaatggtaatatcttcatttcaaaactctattggtaagttacaagtgttctggtaggtatcttagtgtgtgcctttgtgtacaataaatatttctctttaaaatgaatcttattatcttagtcagggtttctattcctgcacaaaacattatgaccaagaagcaagttgaggaggaaagggtttattcagcttacacttccacattgcttttcatcaccaaaggaagttaggacaggacctcacacagggttggaagttggagacagagtagatgcaaaagccatggaggagtgctccttactggcttgctccccctggcttgctcagcttgcttttttatataatccaagactactaacccagggatggcaccatccacagtggaccctccctccttgagaaaatgccttatagctggatctcatggaagcatttcttctgtgataactccaacttgtgtcaagttgacacacaaaaccaggtagtacacttactttcccatagctacaaggaggagatattctcctgccaacagtttaggagggcccaaattagcattaaaatacaagcagcattaggccaaacccactacaggaatgggtccacccacaatgagctggaccctctcccttcactaaatgaagaaaatacctaataaaaatagatagatagatagatagatagatagatagatagatagatagatagatagatagataaacgaaaatgccttatagccggatcttatggagacattttctcaattgaggttttctccttgcagatgactctagtttgagtcaagtctacattaaactagccagcactctcttccatcctatcctttcctcccttcctgtccttttcccctttcaatttaaggaagtttcaaattcttcctgattatgtcagtgctttctgtcaaatacatttccttccagtgtatacaatctatttcatctcttgccaaatccttactgatgtcatcctactcaccagatgtttatgtcattatatatttcactctcacgtcctctttttaattgcaaaacaaccactatgctacagcgattttcaattacaaaataatgcatttcaaataagaaagggattaacaagcccatcaccaatgtccctgaattctccattttggcaccatactccctgtctgtgtcctaagatatttcccatcccacaactgtggatcacatggtattttaatcacccacagtgctatttgggttttgtgtcaaactcataccacttgctgatgcttcatgcaaattcattgctcagtcacatcagagtcataacacgtattcttagctttccatacagtgattcatgaacacagacaacagggaagtctgttcagggtaaccacattgctatatgccacagaaacaagagctttgagttgtactgaatgagagaaatgctgagataaacacagcttaaggggctagttatttgctttttaaagctatcactagcctacaattcaccatccagacagtagaagatgttttagactcctaaactgtagaaattaactgtatatcattagtttttcatgtcatactagatgaaacagatgctaacgtatcacacaataaagagtctatcgtaggctgcgttatctgtttgagagggctattgatgggtgctctgaaggcatcagacagggaagcaatcaagcttttctgatgaccagagaacacaaacccaaggaagaaggatccccagacatcagagaggttgaggattgacaagagaaagctgactctgcacacctgaagatggattacaaggggcctctagggtatcaataagaaagtcatgaatttcagtgttccttttcagaactgtaagtctctcaagggccagataaaagaaatagcatgatcaaatagatattttcatagtgtaatatttcccttattgaacatgtgtgtgctttttgttttgttttattttggtttgttttggttgagtttttttttttttttttttgaggggggggcagttgttgagccagggttggccgtgaactcctaattcttttgtgttagcctggtgagtgtaatgactgcaggcaagtaccaccatgctgttttcagatctgtatattttaaaaatgattgtggctactcaaataatatggagatccattattgggcttgaggtggaaagcggaggagatggggcaaagccccatattgctgtggagaaataatgttcaaactgaggacttttaagaacattctagaattgctttcttgactcttcttccatccttgcagagagaacttagcattcattcttggacatttgaggaagatgtttttcacccttagtgcagtatccctctcttgaacatgccatctgtgttcctccagctaaccagcagctcagcccagtggcatctgtctcctcccccagcagagagctagaatcctcagcagccccagagctctctgtgggtggcctttgacttccacgtccccttagtccacagatgcagctctgcttaggattttgtcttctctttctctcttggaatctgtttaaagacagaagtttctatccagttaaagtttgttttttcctaacctctccaaaaagggaaatgaaaaaacatgtttgtatttgcacataactgctggtcacatgtccatacaactgcttccatgcagggttcccgaacaatctctcaagatccagaaattctgttgtcagtctaatagtagtcttctttagttctccttgaaaaatatcattggaaatgaaatttcttacttgtgcagttgaggagcccattattagaatcaaatctgttcaaggagggtttaatcaaatcagttgagcctgctgacagctgtggggtggtaagaataaagcttcatgttcctcaaatattccctggctagaagtgacccttaagcatcgggctctattgcagacctgctcagtcctttctatgctgctcagtagagcatgacggtttagaaagaagattctagagccagtaagcctgggtttaaatctaagcttgaataaccatggatgggttgttcagtctctgggtgtcatttccctcagtaaaatggaacaatcaaagtaaatgagctaatacacacaaagaatgagaacagggcctagcacacagcaaacaatgctaactgctgttcgcggtactaatcgaagcagagctcctgagccagccatagggattcatagtgcatccatcctgcaggcggagggaattagtggcccctcgtttagaattcttccttttctttttgctgatgactgcagccagcttcctcgatgcatcttggcaccttgcacaaagtataaatgagaaatgacaacacccatattctagtctactgatttaactgaagctctttgaggaaacagaatggagaggttccattgacacattgaaggtttggaaactgttagtaacggccttaaaaactgctccgtgcttctctataatcctttaacaaagaatgagtatatttgctacaatttaacattttttggcttttagaaagaaaattggggtgaagaaaacaatcagttttctttgcatcattgatgcatttcacaattctgcattaactacacttgcactcacctcagtttgtagagacttcattgcagagttgctaggcattttaacccccagtaatgcccagcataggacacatgcccataaacagtgcattattattctagcatgaatagaatctcccagactaaagagaggcccattggacacgcaaactgtatatgctccagtacaggggaacgccagggccaaaaatatgggaatgggtgggtagggaagtgggggggggagggtatgggggactttttggatagcattggaaatgtaattgaggaaaatatgtaataaaaaatattaaaaaaaaaagaatctcccagactatggttcagcccctagccttttgcactgtcaaaagctgtatttgggacctggggagttgtttcagttactaagtatttgtcacacaagcaagagcacctgcgttcagactcctgtgtaaaaagctgggtgtgatagtacacctcacatctctgtaaccccagcactgggataggcatgtggaaacaggaggatccctggatctggccagccaacttagtcaaattgggaagaaactttgtcttaaacagagtagagagcaattgaagacatccagtgttgatctttggcctgcacacagcagcattcacatgtgcttagacccacgtgctcaaaaatacacccttcacacataaatacttatgtgtccaccccaaaagccatagtctacaaacattttcccctttatgataacagagttgtacacagagtgtccccatgtgtgaacagcacagctccttccttctgcctctcagccttcttccaaaagccacagagcttctctgtctgaagcctggtaattaaaagctcccttcctggttagaacaaagcagagaagcagaagaggttttgtgtgtgtgagccacagtgggtttgactctttgatcagggcgcgcctccttgctcatttcctgagcagatgagtcatgtttcctggaacagtcctttagaggaagtgggcttccacaacgttagctgtctgctaatagccctgcttacagtagagcacctgccactcacaagtgagtttaagtgcattctataggccagacatttagttttgtctccataccagctgggagaatatagctttctactaggataatccacattcagaattttgaaaagtatagcaatgaagctgatctctcttacgtcattaagcagtccaagatgcatcttagacaagatgttgactccaaaattgtctgggtaaaatgtgatttttttgttttgttttgtttttccagacagggtttctctgtgtagccctggctgtgttctggaactcactctgtagaccatgctggccttgaactcagaaatcctcctgtctctgcctcctaagtgctgggattaaaggtgtgtgccaccacttcccggcgattttttttaaattataaaaatatatgaattctttattttttaggcgatcaaaattcttttcagacagagagtggtggtacacacacacacacacacacacacacacacacacacacatcacagcactttagaggttgaggcaggaggatccatttacaatcagactggctacctaagacccctgtctttgggagaagaaaagaaaatcgttgcccttttctgaccatcctcacgatgaagaattttcaactgactagtttgctatataaaatgatgcagagctgcagccttcaaacaaccagcctttggttcaaaagagctctggtctctgctcctcatagcctctcgaacttgaagcataggattcagatgaataagaacaaaacctaccacaatttcccaaactaccgttaagccacttaaaaatccctttacatgcacaaagtttgacattatttcccacaactttccacctctcttcctcccatacttaagcccaaagcagaaaagtccagaggcatctactatcaatgcttgtgagtacactgcacagggaggaccatgggtgcaggcacactgcaaagagaggaccatgggtacaggcacactgcacagggaggaccatgggtacaggcacactgcaaagggaggaccatgggtgcatgcagactgcacagggaggatcatgcatacaggcacactgcactggtaggaaatgctggtcacaaggttaagttttaaatatcataaatcttagttaggaattctggtttaactttttaaatggggaagatttccaattgcagcattagagacattatatacccacatgcatacacacatgcatgcatacatacatgcatacatacatacatgcatacatacaaacatacatatattagcttttaaagttggcttgcagaataatcactgcattttcatatctatttgatctatattgggggccactgttcacagctcccttctgcttcctttttatacattaaaacatgtgaaaacactttaattttagttcttacttagcaggcttactctttcttctggcaacctggaagaagaggcaggcaaaagcactctaggtctctatggctcaaggttccataattttaatttgttctatgaactaagcttttccatctgcagcagatgctcaggccattggaaggcacaataatatatgtttaaagcatttagtgttttactatgacaggacaattgaaggctatagcctatggaactaaccatatgtatccacaggagagtgtgtttggctctcaaagtctttccctcctccctggggagggacaagttattcactgctccatcaatgatcataaaattcaatatttatagaagtccatggacttctaaagacttcattttaataaagaattagaataattaataatagttaccatgaaaaaggatatgctcaggattaaatggcttgaaaataacgctggaacagattactttctgtaacaacattttaagacaaatgttgatgtttgattctaaacacagaaaagagatatggaaatagcagaacattttagtgggccagctgagtgactggaaacctagaggagtttgtaattctaatatggcaaacattactaagacatatttatgttatgatgtgaatagttctacagagataatgtatttaaaatagacttaactaatcaaaaaagaacacatagtcactgcaggagattgagaaaacatagaaaagcctagaggtaacaaaacaaaaaaaaagttaagttccactgcttccaataatatttagtggtattcattgcctgttctcctttttatgcttattttattttaatattcacagattattccatgcattctaccctgtaatgacatttttctatggagcgtatctattatatgtgttactgtccaagttcacatgtggttgccacattgcagctgctgtgagacagttagcgccctttctagataaacatctttgtaggtaaatgttagcttgcatgcatgtttatgcattgattaaaaaaataaataaaacaaagcacaacaaaaaataatctaaatcagcctttgtgccttctgatataagtgatccatagaaagcagtacttaaaaccatacaggcaacaagagcagactgagagcagccagtccacagagaggccactaagccatctggattggagataaacctctaattcaaagtggtacaaaataactcagggtaactcagaatgtggtcatctgctggtttgccactcacatgcaaaccctggcattatgagtaaccgttgactttagatgggcagttcacatgccctgctccaccctgatagcacgtggcattgtggcttttcctgtagtgaggacgtgtgtgggagtccccgatgccagtgtgccaggagtgagtggctgcatgtttagtggggagaggcaccaaggccccacagagccatggtggagcactgtcgcatgtgtatcacacattctcaaccttcagcaatatttggctcctttactttctgcagttcaacaacagattctgcaagccctgggctttttcctgttcctaatgacaactgtgtatcagtattctactctacaattctaatttggcagaattgcagaaacattccaaaacctttaaattttaaagtgacctataaaggtcacgcttaccaagatagtgtatgtaaaacttaacaacatccataaggattgcttttgtgcttggggtgaactcagaggtggtgtaccttcccagcctacacaataccatggcttcatctacagccctggaaagataatgagtcagtgccataggcattctgcagttgtggttttcgggggaggaataaacaggtgtttcaagaattcagcacctcctgccctcttgagttccagggcataagcagcaggagccacagcatggaaggacagtgagaagcaaggccactaaactaaggaaaagcatatccccttctgctcatccaggcccttctcatctcatcatgctagcctcagcaccttctggtgtcctctctcttatgctgtcctctgtcatgatggaccacacttcttcacctcccacacatagacttaatttccctcccctcactaagggtgatttgcatctggctctcacccagaatgtgaggaatggctgcagtcacaactcaaaccaaggttaccacagcaacgggatgcaagtaagcaagcaagggcactccatctccaggcttgagtcacttcttccctgcctgctcaaccagtgatcattctgtaaagagttaaacatgagtcagactcagctgtctagactcatatttcattgcacaaagctacttctgggtggtttctttagtgaaaaaaaaaaaaagtagtgttccctttatatcagaccaaaagttaaaagaacttttcaaacacgctctaccttgtctccatgtagttttctcatttgccacaaggctgtaagtgccaagtgataccaaaattacgtattcataaagagttcagattcaaaaagttaagtaacttctacaagactgtgtgctaagcccaactctacccacacaagaaatgccttgacaagaaaatgacttggttgctcttccatcattgacacttgacttcaaagagcccatccaagaactcctgcccagggtcttaatcagcttcattttattgactacagtttcactttttaataaagataggggaatctttgctgtaccttaagggtttaagttttacttatttatttatttatttatttatttatttatttatttatttatttattatatgtaagtacactgtagctgtcttcagacacaccagaagagggcgtcaaatcttgttatggatggttgtgagccaccatgtggttgctgggatttgaactccggacctttggaagagcagtcgggtcctcttacccattgagccatctcaccagcccaggtttaagttaagttatttcagtcacataaaaaaaaaaagagttgaagtagtattccttggaagtttccaagcattctatatataataggatgtaatgaaaaattcctgtgtttaatggcatcatacaagaaaggcttaatttgccttccatgtcttatgactgaccttctgtgattgagaaaatgaggtttacttctagacatgcttcaagaacagaaaaacaatactttggattgtggttgtagctcagtggtgcctacagtaggtgcctagcagtggtaagattctaggtttgaactccagaatcaaaaaagaaaaaattgaaaagggtttagtaaagggacaacctgctggggcccaagtcagaaaacatgttacacaaggctctgctcactaagactctgatttccagtgatgcaaaggagcccacctagctttttggttggttaattgtttttttttttttcttttttctttttttttttttaataaagacagggtgtctcgacatagccctggctgtcctggaactcaggctaatctcagactcatagagatccacctacctctgcctcctgagtgctaggattaaaggtgtgttccacggtgtctaaatgccagcatactttaatctccagggctagagagatggtttagcaagtgaaagcacttgtgatgcaagactgggagtttgtgtttgattcctagatactgtggtaaaggggagaattaattcttgaacattatcctctgacttctagatatgcacgtatacatacaggaccccataacacatatattaaccattaacacatataaacatacaatggtacaaattaaaaacaaacaaaacaaaaccaaacctatctcactgggccagtgagaaggctcagcagataaaaagcacttgctgtgcatacctggtgagctgagttcaatccccagaacccacatggtagaaagagaaaacacattgctgggaattgttttctgacttccacacacatgcataaccttgcataccttgcatacctacacaaatatcataatcaaacacactaagaataacagacaaacagaactgttaatatcacaataattgggccttctctgtcagttgctaacatactgcatgtgtctttaattttatatcatctgcttttggggggcccttaatattgagaggggcctatgaattgtttcatattgtaattgaaatctgaagttactatggtttctgtgtttgtaccagattgtcaaacacacaggatgtaaccaagcagcccagcattttaggaagtgtagcctggacaataaactccttccctgtgtgtcctgataagggctgagatgtttttgttagggtgagggtgagggacacttgaattacaaacatcacacatgaattgtgttcctaagagtcaaactgactagactgaacacaaaaggccttatgatacacagtatcacatttgaaatgatggccaacatggcaaagtgagaatcatttcaagtattttatttttaaaaagacctgcagtgacacaaactagaattcatattcaaggtgataaaatctcatctgtaggttcttgtttctttaagagcgttcagaacttctcgatggttctgtggagtagatctcaggcttgctgaaagcagaagaaatcatagttttaccagattcaaaccagcaagctttctggtcatgcctatgagtcacagctggaatgtcctgtggttaacattctgtcttgaaaacagaatcaagaccagcaagccactgctggtttctatggtgactggtaagccaccgctggtttctatggtgactgttactttttgcatggtgagtttactcgggaatgaactgtggaggtgcattagccatccgtgtgagaagttaaacaaacaaaaaatgtgatttaattaaatataaatgttaaaagcacataaaactgaaggagctgggtggatggtcctccccctctctagtagaagtattggtgtgaagtaattaattcgttaatttatttcacattgtatttaagtattttcaaatatgtctacttggtgtttattgtaatgcatcattccattctttccaaaggataacaacatttagttatcatttatcagtgtttccacaaacccatcttccttgtctatctacctggcccagtcccacacacaatgtaccaccactggcttctggcatttaggggctcttctttagtgtagaagatcccattagaaggaagaaaatataccatctacatcatttaaaattccacagctcttaaccttgttgagctggagagaaaaagaatgcgctataatgtattataatatataatgacctgtgtagaatcaactatggtccccagctccctgctacccactgcgtacgacaatccaccaggtagagggtgcttatggccacaaaaatgtttaccttaagttttgcaagttaaagaccaagtaatttcagctttggtcactaaatcacaacccaaagttagaatctcttgggtttaaagactgtaggctgaaagacttgcttattaagtcagtatgtggtgacagtatatttatttttgtatttagtttcaaagtagacttcacgcaataaaattgatgaaaaccttgaaacagagataaacactctgctgttagacagtgattcaggagcattcctagtacagcctgggagcactcacagcacattctgggagtacttacggcatagcctggcttcattttgcacctacctccagcttaagaaggtgatagaacccaagactcaagggaagggctttggctcttgtctcttctgattttcttattctcttccttccttccttccttccttccgtccttccttccttccttccttccttccgtccttccttccttccttccgtcctcctccctctccctctctctctccctctatctctctctctttctttctttcctcttcttttttcattctattgccttttcctggcttctgtcagcacatagtgttatcagactttttattactgcaacaaaacaccatgttcaaaagcaactcaagatggaaagggccattttaagtctacagttccacatcacagtccatcattgaggaaaatcaagggtggaaccgggaggcaggaacaggaagtcacaaaggaatgttgcttattggcttgctttccatggctttcttgtcctgcttcctaatagtacccaggaccactggcctaggtgttgcactgcccactgtgagctggccccttcccacatcactcattaatgaagataatgctccatgggtttacccagaagccaatctggtaagggcagttttagatttagaatccatcttcccaattgtctccaggttgtgtgaagttgaggttaaactagacagtgcatgtagtatgctaggaacctgacaagaaatacaggtagttaagcaagagtgtttacaacacaaatacaggtagttaagcaagagtgtttacaacacaaaaccaagagaggtaaggtaataaacctgggaacgaactctatcatgatccatttatttaaaaatcatggatttagtaccaaacagtgaacagcttattgaactctgcttctcattttaagcctctgatgatcaccccacagtaggatgaacaactgcttgagaatttgatgaggcaggtcatcattcagaaatctgagatttattatgagcttgaacaagacaacaactaggttcccacattacaggatgaccacaaagtgattcaaaccctttactgcaggaaattattagactgatacttacagttgtatgattcaaattcttatctaactatacaaaagtagtaaaacagattaagtctttaaagaatatcacattcgtggaagataccaaaatgtccattcactggatagctactggaattcttcccttagagtgttctgcttttaacagagaagaacaggaaatccaggagtggcctgtgcccttaggaaagtcgaagtcataggggtaagagaatgttgtgtgaatcaccaagaagggaggcgatgtggcagactgcctagcagcacaactgaagagctaagaattcactaggcatggtggctcaaccctccagaccgagcatatgagaagctgaggcaggtaaattgctacaaggttaagccacactacattgtgatttttcaagcctgcttaggctacagagtgagaccctgtcccaaaacaaaccaaagtaaagcccaaagggacatagtggcttattcaaaggttaaaaacctcacatctaatcattataattaggaaagagtccacagacgtactttgcaaaatctggttataagatttttatagctgagtttaaagcacattatatcacattttagtacataaaagaacttaccagtttgaaaatcactgactccatatgatgcatgtattcacagatgtatagaatgtacagccactaaacagtgagcaaaaaagccaagggtggtagaatgatgggcagcttggtgagcacaggagaggggaaaagccacacgggggcaaaatagcctgagaagaagaagaacagtcagaggctaggcctttaatcccagcaaaagaacagtcagaagctaggccttcaatcccagcagttgggagttagagacaggcagatctctgagtgaaaagccagcctggtctacagaatgagttccaggacagccaaggctacatggagagattctcaaacataataagatgaaacaaacaaaacaaaacaaaaccaaagacaaccacaagaaaaaacaatagtccaggaagcctatgtgcatattttccaatacttcccgttttgttattgcaggcagctcattctaaagtaactgggatcaagtgatataggtagactgcagggggtttcagaggtaatctgatggcccaccacatgaggaggccacattttgggtcatccttttttcctacgtgaaaagagaaagattcttttccagaatagcaaacaaacaaatgtacacacacaaacaaaaaatatgtgtcgtgctttacttaggggaatttctctttaatttcagctctatgatggaccacaacggataggacgctactgtggagaaaatatccccccaccaggagctacaacaggttccaaacttattgtagtgttccatacagatggggttgactctggagagaaaggatttaagatgcactggttcatccatggtaagccactcattgatctccgttgtattaataattgttatttggccaaaaagtatttctttaccaactccttccttggaaacagtggcatcaacaaataatgaaagcaaattagtaacctagagctaggctatagataacttactgagatgtctgtggaattccaggagataaattttgctggagttctgagaaaaaacaaagttaaagtagaagagatttgagtaactgcttgagcaggtggagtgataatctgccttagagtagacacattacatacatggtggtgacatgtgagagtcccaggtgccatagaacagaaagggacataaggctcaccttgacatttgtcagagaaggaatgaccaggacaatataaagaatgggagtcagaaaggtcaaagaggaaaaaaaggactggggtgagagaaatagtggaaacagatcatttgaactggatgcaagaattgaggattgtgtcttgtatctgctaaacagactagggacatactgaagactatctacaaaccactgtttaaggcacagatagaaataattactttcctaaaactcattattaattagagtcatgagacttcaaaattcatctcctgagggtcagtctataggttgacggaacctgcacaatggtttttaaaatgcagctgccagtaacagcaggagcacaggaacttttcagaaatgcgaattcttagcccctaccctacatccacagtagttctcaaccagtgagacatggtgttaggactcatggtgaatgtcagtaaattgaggagagatagagttgcactggtataccagaaatctcacagatacctaaactgcaaccctcctgttaaaaatcagtggtaaaggctggtgagatgtctcagttggtaaagtgcttgccttacaaccatgagaatctagttaaatcactgaacccaagccacacccagtaatatgctcctataaagccagcattgaaaagatgggaggtgaggccgaccagaaccttggtgctcgctgaccagctaggctatctgatttgtcagagttctagatcaacgagaaactttgccttaaacaagaggtgggaaatccctaaggaccaatactcaagattgctctcaaagccctacctacagatgcacagtgcatatatgtcccaggcatgagcatgcacatgtaaatgcacacaaaaacagagaaacacagagagaatgcagtgtgagttgcgtgtgtgtgtgtgtgtgtgtgtgtgtgtgcgtgtgtgtgtgtgtgtacatgagaggggagagagagggaagaggggagagaggaaagaggagagaggagagatgagggggagagaggagaggggagagagagacagagagaacatgaatcagaggtacataagcaagcacatttgaaacttgagatttattggcattacaaccctcccatgtaaatctcagaactgccaaatagaattgtcaattgtagatcctttatttatcaagatgaaggcttttctatttgtgatacagttttatataccaacaaacccactataacttgaaaatatctagaatcatgtcatgtgtctaacttaacaaatatcattactagcctaacctactttaaacattctctaaaacacctagataacctacaattggtaaactcattgaacataaggccaatttataaagtagcaaaaagtatttcatatgaaattaaaaaattacaaatatgttttctcttgattgcttatcacattcaatcatctgaaggtaagaagtgtctttctctgtaagaacgttagatgctcttctgatatgatttttttgttaaaatctaaatgtagacttctccatatttaagtactagtggcaatacactgggctactggtaacttgaaatacatatgatgattctcaatagtaaatgagacatgtggtcaatcttgcagagttcctggatgttcttcttcatcacgtgagttttacacttacagtggttactttattaattgacctaattaaaggatttagttgatttctctccccagtatattatgtttccagtgttctgttgttcaacaatattttgattctaagtaatctagagatggtctgaaaagacagagagcaaacaggaaaaatttgaaaaatagcccagactatcaatgcctgggaatactcctgagaacagtgtttgtcagttgtttatattcacagaacagctaaggttctccttatcttgtatttagttttgcaatgcctagaactcaaaaccaggaccccacacatgctaggcaagtactctaatgatgagttatatccttagccctcactggcaaatcttgtaaatatggagtagtgaggcacacccactggaatttctaagactatctctggacgataaggttgctattacacgtaactcagttttaggagcaaggcaaaatggcattgcatttggtcaagtaaaatggtagaaagacagaattctgagattccagagaatcctgctaaggagttcaaatcacatatgatcctaagtaagtttaaatggcaccagatggcagccaggttcctgaaggaaacaacgttctgcttcaaagatttaaagggcctaagcatgggaagtgtcttgggccaaaggcctcagaatgtggtcctcagtcctaggtatacataggaattgtctaggagtttaagcacaagagaaccctgagagatagaattctattggtcatgtttggccattgccactttaggtcccgtcctaagcgatgcagcctgcagtcagggtggaagaatgaagagatgctggcggtacttttgctagctgatctctttattcaagaagctgctcaccctcccctccaggctgttccagccgttctggctagagcttgcttgatgggatggtcatcactggcgacactcaacttactggataactaactgggttcttctagccaacatgccaaaccctctgttgaaagctctaaggttttgttgagccaaaatttttctttcacttatttttggaatatgtcttctttcaagagagtcaaagacaccctctgtctattctcttttcctgtttaccattgcaaaattttcccccgtttgctgaaaatttgctaagttcagagccagagttatgtaacaatattttactaattaggacaaaacttaaaaaacaattttgactctgtactgtccactgtatgtagatgctatttgacaataatcttctggaaggagatcatgggcagtaaaatcaatacaaaatgaactgctatggcatgtcatcatcatgctgcattagtacatcttatgttctatatctgacctatgtaacttgggatgacttgagaagaggaggagttaacagagtaaacatcaggcagaaagtcttcactgagaatggtaccttgattagttattagaggaaaactcaagactaagctgtcattcttctgtttattaaagctataggtttaatgtttctatactagataccatgctatgtatgactagggatactgaaatggcttagttcccacatccactgcaataaagggaaggcaatcagcatgcaaataaatatgcacaatcaaatcttattagggacgagggaacacacagaaagagattggataagattggagcaggcagggaagtcgtctatgaaattgcaacctctgaactaacacctgaaaattaagtaagtgctatttggccaaataggagaagagaaaggaaagaccccatgatacaaagaatcggggagcaagagattcaagaccaaaagctaaatttctagaggaaactagtaagtccagcagcaactaccacaactggcttcatgagacacaaactcaattcatagtggtcacagtgtcttcctctctgcaagtcctttatacttcatgcaaacaggtctggggtaggatgcccaaggatggagaagcacgataaattgtgggtcttaaaatacaggatgcaatacaaaatacacactaaacagagttatgactcactaaacaacagggtcatgtttcaagcaatgccttgttgttagcccatttcatcattgtgagcataacggagaattcccacacgtactaagattgctacaaggtcacctgctaatctgtggggctgcccaggtttgtggtgcccatccatgactgagcttcattctgcagcatgtgactctcagtctccctatgcagaactgatattgaagccctctcccctctggctcctttccacatgatgctataagaactcagcaaacgcttgctagcagagcctggacttgacaatgatgtcatatcctgagcactgtggctcaggagcccctacacacttcattcattttgctcagtgataaataaatccgtttacccagtgtgcctttttgtcaacagcacagatcttctctttacttggagaaaatggatctacaagtgagctttctccgtgggtccattttgtagatgcaaaataaagcccacactgcagtgcctttatgcagatcttcaaagagaatcccaccctggaaataaggaaatggccacagtcgctctgcccagctaatcagttcacaggattcagcattgacatgacagtattgttcagaagctgaattctatcctgggagccttggtctgggctgctgaagggtatatagaacttctcataaattgtgtgaataggagcctcccagccagctgcacacacccctcctccctttccctccggctccttccagcctcctctcacttggcagtggactatagcatgcaaacaaggtcaaggagctttgtgggcagagagtgacatttgcaaaggcagcgggcacttcagctagggacccagcaggggaagagctaaatggcatgtgatcaggaggtgatgtcaccatggacttccacaaaggaaagtgtggccttttctttggggagatagatgacatcatcctcccagatgggggccaccccattctcttttctttttagttgttaatgagatttctgcgactctagactctagggttttaaaagtttgtttgtaagaacattttaaaacatttttaagaccttctatgagtgactgggttcaaaagataatgcctttctagctaactggactttcagcccccgcaccaagggcttctcaaatgttcactttcggaatgctggccaggagcttatacagtgtcaagcctcattccagatcttgggggcagtcaatagtgtgtggctactattggtctttctggggaggttcttctaatttgacacttttatttgtttttgtgactttgagttgtaagcttgggtttctgtaagcactcaagtttttaatactgtccgtttcttagggaattggcagggtagatgcagagggacagctcacagcatctatgatccctgtcttaaaaagaaaacttcttatttaaattatatagataacaagcatcgtggcatagtacaggcacatgcagtgcccaggaaatatctcagtatcaaatgctatgaataaaaaattagaagatatcttgaaaggctctgtaggaagccagctgatagtaaacaaaaggtttaaaaacactaagcaaagcatgtgatagaaattaagtcacggctggctgtccaactgataaaagacaaatgcaaaaaaggctaatagtttttcctgtcaccagggaaaaaccatagatagattttttttctctgtttctagggatggatctcaagggatttgggtgcagagcaagccctccatgactctgctacattacatccccagtccccagagatggatttttattttgagctataggactctagatatataaggtaatgcagtgccttgcacagagggacattttgtagtaatagcataggtactggggctatcttttacaggcacacagaaacaatgatctgaaggcaccatcgaagaaatagttcagcaattaagagcactggctgctcttgcagaggacctaggttcagttcccagcacccattggcatggtacaacaatctataactacacgtccagttgatccagtgctctctggcctctgtaggtgccaggcctacacatgatacacagacattcctacaggcaaaacacatacacataaatttaaaaataaaaccacacatgcatatacatacacataggcacgaatacacagaaatgcacacaatgaaacagggacagagctagagtgacttgttggtgatacagacagcactataacaaattctaacacagaaatgctacattttcttttcctggtactttctccaaagttacagtgtggaaatcatattatttaggttttcatatttgaatattattttgagagctttataattatttcatgatcactcttttgggtctgtctcgagccatatttcttcatggtgtttacaacgaaagcaatttcatgaactgtggtcaggaaagatccaatcaataaaactggcctatgtatcacctgctccgggagagccctacctctcagatggtgatggacttactcttagggtggcacttcctgttaagctgtgacattgcagagaggagcgcacacaggagctcctctgcctctaaagggccctcagtcatgaacaaggtgcaactcgcgcatgcaccaaacctgtaagcaagtcattggaaaagatgaaagaaaagatggagtcctgccactgttttatgattatagtatgacataaattctgtttggtttggacagagatttaaggaaatttgaagcagaaaccactagttgtgttcaagcacaaaagtagctgtttaacagctcactaagtctcccctcagacttttgcatactgtacacataaatgcgtgtttctattttgcccactttgatattttggacttctgtgtttgtgctacttgaaaacatttttagggatgaagattagaaatgaatactgctttagtatggagataagttcaaagttttgattatgatcctgtaactgacttgatttttggcaaattctcagttgtagctttgttctgaatgaatgatgctaatttaaaaaaaaatctgtttacccaggcagataacagtgcctgcctctatttccagatgttaagggggccaagcaagagactcacttgatcatgggtttgagattagcctgagcaatatagagtgaccttgtctcaaaaacaaagaaatctgtttgccaataatcctgctgttggaataattttctcaaaaacagttttgtagctcattttgcctcaggctcaagagttttcatggcaagttctgtgagcaaatgcaacggagagcatgtgcagatctttcacaagacacggaaaagggagacctctattttatttacatttgttttttgcctccttgacaacaacagtaaatacacatacacacacacccataaagttgaccttcacttagcattggctctacgtatgtggccagagcctttgggaccttatgtcccaattcccacattgccactgtttgaaaccctctgagggcaatttcagtgctatttccactgttgctctttcaaaccgttataaaatggggcaggggggggataaccctcaaagaataatgaccttccaaaatcatatattgcacaatttaaaatagtccttgatttggggccaaagggagagttttctcaaatcttctgtttgtgttctggtttcctagcaaccacttccctgatagaaattgcacattctttccaggagattccttgctttttcacacaatgtgaaaagggaagtgatcggctatttctttctgacaattgtaacaaacacaaatggccagactcacacaggacagtcatcatgttcagtatgaacattaatcttttctgtctcttaactcttacctatctccagattagttttatttgattgctgctgtgagctcagcaaacatgtcaccttcctctcaccaagtaggcagaatgatactaatgaagttagtagaattatattctgcatatatataatgagtgatacaaaatcattttatgctttttcttttcattatatagactaaacaatgtaagtttttatcacctaagaataattttaactctgtctttaggaattttttaaacattttatttactcatagtattcatttatttatatgtatagtgtgtaggtgtgcataccatatatgcatgtggaggtcagaggtcaacttgtagcaggcatctctctgcttccatcttgttagctgtcagcaaacctttagctggtaagtcacctctctgccaggaaatcggcctcaggtcattaattctgacaaaacaaattacattggcctgtgaaaattgaattaaaatatgattatgattaatatttaatgtaccgaccttactgacattacttattatcactcttgatgttgttatttaaaaaataataatttcactgtactgggtactttaaaatattatctcctatgtcactctaatacttctgtgaaagaagcaacattgtctctttgtagataaaaatggctgagaagggcaccttcaagacactaagtgactaactcagactcagaagttcagagaccatgggattggcccagaggaacctttggtgtcagaccccaaagtctgggctttaagtcgtggcctgctgtctgaaatcagcagtttctctcacaagtttcactgtgaaaaggtggcatctcactgtggtctgaagaagtcctaagcttgcagtagctaattttataaatgaactccaataaacatttaaaagaaatctatagaatctttcccatgtaagttatgttcttgtttcaagagctccacaaaaatttacaccattcattcattcattcattcactcattcactcattctttcttcagtcaaagtagcaataaactgaagtcctgcggtgaggtctgagcacattgtcagaggtctagcacacaatagctcatgtttgttcgccattctgcatgatgtctgcctttctttctgttcattgagcacactcatgcttgctaagcctgtgccctaccatggagctttgatacggtcctctcctcatccatttacataaagttcttctggagttaccacacgtagtcaatggaattaattcatctgggaaaaaaacacagggttagctactctgttactcaggctcagctccagaaagtagcttacaaggaggagtgaggttataatgccaggggcaggctagctgtcttcagaggagattggatggctcagcataggcactgagggtggggtggagtgtgtgaggacttagctgatgtagttgttctgcttcagtttcgagaaacccaggctggctggcttgctgactgcaaccctggatatattactaacagaaaatgatcttggaatcatctgtccctgtaaccacggtctctgctgccatctttacatggccttcccagttctgtgtgtctgtctccaaattttccctcttagaggatgtcttgaacttcattccaactgtaaggcagcagcctctgcttgactctccttgaattgataacgtctgtggttatatcaacaccatcagcatggtgctgctcgtttttgtgcatttttgggtgtggagcaaccttcctgtggagaaaagcttgggaactgagggcagagtacacagcagaatcagagagaacagggtgaggcagagcctctgaggctccctgagcctcaccctggaaaaagttatcttagataatgacatagttttcaaatcttctatttgaagatttgaaaactttcaaatagaaatgtaaatgttggacttgcgaatgcctgagggcatgatcccgttatctttgcctgttagtagggttttatgaagcatcagtagtcttaggtacaacctcttactttgaaagatatttctcctattttattaattttatttcctttgaagatatcttatactacactttgtttagaaatctttaataatttcaaaacaccctgagagacagaggtgatagatgatagagagatagaatgactataattaatgaattgacttatcctggagaactgtaagggaagaatttctactgggaaaacattctgaatctaagaagaaattcaaaatagaaaaagtagattcgaaggaactgggtacagtgcatctcagcgaaagtgttgagaccggatatgcttctctgggttaaaatgaaagatgtctatcctttatgtataggaaattaaatttaatataaagtgtggccatcctgatttatctctttttatctggggtgctcaggtgaagaactttaatattcatatccaggtcatctcagatagttagaggctgtggctgccttaatcttatacagtcgtatgataacttgcatagtcattcctataattttatagctataggtaccactgattttgcacttctgatatttttttttgttcaagtaacatacttcataataagggtttgtttgttttgcattttggcctatacaattaaaaacaggcaatttcactccatatggctatatagaaatcaattaaaatttattatcagaaagtgtggagtagagataaagtccccatggaagatgaaactgtctaatccttcatgatttcttaagtcttaaaaaaaaaagtcactcttttaacgtggtactagacccagagtctgttgctggttttctcaatgatcttttctatttctaaccgcattcttctctaaccatcatctaatgttcaaggtgataaataagaagaggttagtacaacatgcagtacttcttgctgtgtgattctagagctgctgcctccttatgcctgcctgggagcttgtctgcctcagttatgagcaaaagaatgagctgtactagcataaagccattgtaataacgtacccagaacaggcggcttaagacagcaggaatgtattactttgctcaagaaggcactgatcgaaagtcaagaccattgcatcaagcagagccctggggaagaatgaaccttcctgcctctcccaactcctgttgtgcactggaaagtgctggggtttgtgcctgatagcagctgcaacctcaacttctgcctctctctttacccaggagcctttcctcggtgtcaggctcacattctctcttctcaggagagatttcagtctcatgctaacccagtagctgttccttgacctgataatgttgcagagacctgcctgtcacattttcaggttcctggcagacatgacattgggaaatgactccactcattccagagtgttctgtactgtgactttgaacaactctttttcactctggctttgttcggttttcttgttcctgtcttcttgtttcctccttttccttaggagaatgtcacatttcttgcctttgaagccaaggcaaagacaaagtctcccaaatttgtcaggactgacttgaacttcagaatttgcagattgattttctagggaatacttgcgggctagcatttttctgtgagaacaaggacatgagcttcaatgatcatggaatgaggtaaaacaagaagaccagaaaataggttagctggccgtgacttggagtttccctcacttcccagcttttcagccctcgttcccatcaaacctaccctgccaagagcagagctccactcccagacctccccagccctttccagctctgcttttccttccttgctggctgttgcttgcctacttctaaggataacgtaaagatctgttcatgaaagggctcttctaatgttgtttctgttctgacacacccacgagttttaaaattcctacagaaaataaaatcaggctcctctgtgtatcctctgccttcaggattttgtgcttgtgtgttttaaataaaaacaagtttcaataacacaaaacagagaggaaatagacaactgtaggcacaggcactaagaagcctttttatgtgatagaagaaaactggcctaaccaatgagctcattgtaagatattacggaacaaagggtatgagttttcagttcatagaaagactattataatataaatcaatattcagttgagtatgtgagcctccccattttgttgtatttaacatttgtttttattgtagttactgattttactgtatgttggctcttgggctttgaacaatgactcctggaagcagagagcaggatgtgaggataccctggaagctggctttgtagctcctttcctccagtattagtggatcttagccttatttattccacacaggcacctctcctgaaaaatcacctttcagattacagtgttaggaaaacagaaaaaaaaaaaaaaatgaagagctgacaccttgagtgacctcggggcacaggaggataaactgaaccaccttgcccctgattataattgtcttaaagaaagaactcacagaagacctgtgctatagttctgtgctgcgatttaaaaattcatagcttgttttagacaaaacaaaaccagtattagctgagttcttacttgagcaaaattttaaattatctatctcaataaacagactaagcaacggctttcaactctttcttgttcagagcactgtagagcagtgtgcttcctgctgataagggaaacacttcctttcagctgatgacgaggatttggagggaaataaaaccaaatagattatcagtcctgggaaaggttttataaagatcaactgcttaaaactgggaaaacatgtgagtcacttcaaagcactactgtagtccagtttggctacactagacaccaacacactagacagtgtcagatttgcctcaaagtcgatacaaagattttgctctgcttcctttacccaggttgctggggtaattctgtgtttagacagtgaacagagcagctgagaggataagacaccgtcaggcaggtacagccaccaagtttgatagagacagcacagaactagaaatgaagaggggctaggctgtatctgactaactggattttctctagaggaattcactaagagacttgggctcacagatcatctctaaagtgagccccataccttcatgcctaactcgtgttgttaggaatttcaagcaatatactgtgcttattaaaagcatttgagaactaaactgccgtatacatggaactgtttttaaaagcttacaacttaatgaataattttgtatcttttttttttctattgctagctaaatttttagccaataattctactcctagctccaaggtttatttgtgtgtgtgtgtgtgtgtgtgtgtgtgtgtgtgtgtgtgtgtgtgtgtgtatgtgtagtgtagtgtacttttatatctagataaacttttgctaagagacagtacatagtacaagcagagcaattatcccatcattcccaaaaatcttattttgactcttttattaacctatataacaactctgagcactggagtttggaacctgatattatcaccccagagtacagtaacaggttggggtgttagcttcctgttatgtgcaaaggaatttacaaggaaacctaaaaacattaggagacacaatggggaaaaagtgatacagagccttagatgagtcaactatgattttggattcaattagctgataggctgaacctaaataaatacgcagagatgtgttacccaagctccttccctccttctctctaagggctttcacatttggttatcaagcactttagcatgtaaacagaatggcttcacttacttgtaatttagaggaaagttccatgtttgaacataacacaggttcctgggctgcccaggctcaggcagtaccagtttctggagtaagtagactgtgagtggtgtccctagagctcagcagaggttccgaggaattgtaccagctacactgcttttcggcttcagggatattttcagtgtggttttacagttggaaaagtgttacctaatctttgatggcacttattgttatataccattctccacagtctataaataatattagtatgtttgcttttacatagtgattttcaaaatggcacacacaccactccctccttgacataaaaggagaaacactatatgacatgggaaaagtctggaaacacaagtttcaggacaaagtaggagagaagcacgagaagaaggtggtagcactcagaactttgagccagaatcaagggctttggccttcttcttctctcccttttcccctctttccctctctctctctctctctctctctctctctctctctctctctctctctctnnnnnnnnnnnnnnnnnnnnccccacctctctctccccctctccccctgcctgcctccttttcctctctcccctccctcccaagacaatctcagctagtacaggctgggctctcaaccttcctatgtaaccaaggataaccttgtcctgatgatcatgacactgtctccatttcccctgctaggattgcagatgtgcatcaccatgcctggctagcattgtgttctttatagattggaaattctcctattaggttctattaggacccccactcccagaattcactgtgttcctcttaggtctagatgtgtaggaataagaactcagcattatataaataatgtaatattgtttatctaaaatgaataaatttaataatgatttccctctcttgccctctctgctagggcttaaagcctaggtcttatatatcataagcatgcgttctacaatttactttatctcatgaccctcttactgctttataatggcaacattaaacttttgcacaacatctctcctataggagccatagttctttgccacctttggtgagcagaaggtttgaatacattctggcttctatggtcactttgtgctaacagattgtttttacttgacaggctgtggtggagagatgtctggaaccatgggctcctttagcagccctgggtaccctaacagctatcctcataacaaggagtgtatctggaacattcgcgtggccccagggaatagcattcagctcaccatccatgactttgatgtggaatatcatgcaagctgcaagtatgacaccctggaggtaggaagtctgattgttctccagtgtatcacaaaatcttgggtagaactagagagatccccatcttctttcctgtggctagtcctgttctatgcttaggcattctagcaagtatcctcctctatgaatggattgtgttagtagaataagggattaatatagcagtttggtttctctcctagtggctagtaacagttcactaggaggtaaggccaggtagcagcaattgggtgtcaatatgagcaaagaacagggaagggtccccagtgggcaggcttggttctgtctcttttccggatggataggaagctgagccatcagttccctctcttcttttcctgttgataaaatctgtgcttgggctctttaacagcccacacttctccttctggtccgaggaatcttccttagagaaagcattctgcatttgggagtcagtggaagaggggccccagcacactgactgcaagtgccactgacccctttacagcagcaaatgctgcctgggctgtgggatggtcaggatgctacagctatagttgctgcagagggctggttttgttttgttatttgcttttgttggttttgttttgttatttgttgttgttattccttagtgtggtctttatctacaaaaccttttcaaggctaccttaagagtttatctcacaaaattaaggtagccattttgaactttaggccttaaagtttattataatcaacttggacctatcagcaaaattaaatggtttctaaacacacacaagttccccatctgttagtgttagggactactattccatataactctacagctagtgtgtgacacagagtaagcacctgacgcctgtgagcgagcaaaagcattcaaacccctgactgatacatggtaataaggcacatacggtccatgatgattgcacacagccacattctcacttggaggtgaacagtcccatgtaagagtaggatgctgtctgtccacatattacagttgtcaaaatcaagtctcacattcatggcctttttaaatgaccaccgggatggttgctgatatgggcttggatggcattgacccaaatttccagtttcatgtgtcccagggcaaagaagttagccacatacgtagacatagaaagagttattaagaaagggaaatgagagcgggctgagggaaaagcatattcttgaaagtgctgggcccagggctcatcaccttcgtaggtcatgggcacaacccaagcctctcccactcgtggataccctagggtttacctaggatgcccttctctatacagctaggaagggaagcatttcaaggctttctctgccagctgacttcttccatatgctaatcttcatatagttttctccagcaagcactctcctccataaatggaaggcctatagaacgaacctggtcacctttctctcctctgcccagataaaataaggcatttcagaggattgaaaacagtagagagtactttatggaaaactttaatccttaaaaattatgtgatatgaagaaacagagttcttaagcaatctgtcccctaatgataggtatactcactaggaattatattcagcaccccagttccctctgcaaggagacagtgccttctcagtgacagtcctgctactatgtgatgcctccatcttacaggaggaatggggtttaggaaagaacaaggcaccttccaaaattcaccctcatagcttgaagaaagaccaccaacactaacccgtgagatgctgaacaggttccactaccaacaaagatactacatggtttcataaaacccataacgcttacaaaaggctggccgctgaatctctgttaggaatgtgcactgttccaggttccaagccctttattttcatcttccaagtacatgtcattggtgcccacttggcaaaatgtaaatgggttcattgtgctttgggtcttgtcattcccattacatgagaaagcagagatgtgtcgttctctataagcagcctccgaagcctagggcagcagagactctggccagcaagtagcactgttaggggtaggtggtcctatgccagcgcaaagatgtctgtgacaagagttggcaacctgctcaagtttacatgtattaggacaagctgggagttctgtgggctcctaagttctattaagaacatagtttgaaggaatatgtcaagaccccaaaggctataaagagtaactcctttttcatatctctgccatagatggaaagttctgtagtgacctagtgttaaaatgagcataaggaggctgtattttttgtggttgttttgtttttcattcctttgcttttttttttcttagtcactgacaatatattgacagtcgatttctaaatctgttacccagatgagtgtatgatccagaaaaacggctaactttctcaactccacacttatttttttaatcctgtcaagcacagccaaatgaaaattaccatcactagacattggactttctggggtcccctaagttttaccaggagccatttctttccctaaagaattactgtccagaaagtggccagttgcataaagcaactgccataatcctgttatgctgacttggtcttcaaaataaatggagccaacagagcagaaagcaatgctcagaacagattaacactgcaggctttgaaatactccccaccctgggcatttgctaaaaacacactttaatctctgatcagcatgccattttcagggtttagtcacactggagtggaatgaatcacaccctgaaattctttccatcctttcccacttgtgaccatacgctaatgatcagttttatttatgggcaccaaaaaatgccattttgttgttttggttatggaaatcccaggatggttttgttttcagtctccaagaaagctctgtgcagagcctggatcaacatccaggagaggaaatcccctccctggcacaatcaaacaagacaattgcttggtgtgggcagttagcatagacagggcctctcagcaatggtcatttgtgagttcagcccagtaccaggggaagcaaagaatgtccaaagtggcagtgtttattcttttggaggctcctagtcctagccaactcctagctggtatgaatatgaccgctggggaatagatgaacaaggaaaacaaacattattttgccaacttgtaggtttctttgtcagcatctagtgccagctccgtgctctctggaaatatgtgctggtggttgcactcccttgattaggagcacaggctgctggctgcatttgctggagactgtagcctgggccagaaggaaagatagacatggggaaagggcgtatgtcgaaggggccaaaggaggctcttcctgaagctctgctttttatggccttttcagggcctcccaaacactaaacatcatctcctaatgaaaataagcccagagcagttgctggcttcattcctttgcagttactggccttgtgttcagccctctgggaaacagcagtttcttcttactttaattcttgctttactgggggctggggcgggggtggggggtgggggagggagnnnnnnnnnnnnnnnnnnnnnnnnnnnnnnnnnnnnnnnnnnnnnnnnnnnnnnnnnnnagggcttgagagtgaggaaggaagggaggagcagacggagggaggcccagtgagaggtgaaaggggtgctgcccattgagacattacccagagctgccttcctgcctggctttggccctgggtgctgtgaaggactcagacacaaacatgcatgaaaactctcatccaaactgctctgccttctacaaagcaactttgatgaaaccttggatatgggagtacgagtgtcagtgtttgtttctttaagtcttatcttcccttcacccctagtccatgcacacttaagataagtgttcagcatgtgagctctgctggaatagggcttaggaaagaaaacccctttctatagaatgtaccactgagttgagggatcccagtcagttatacagttgggcaaatttcgaggtatccatgagggttgcagccatgtgagacagacttggagggtttccacatgggagataggagatcctggccatgctcttcagtgcagacatggggaatgcatgtcacttctgtgatttccagaatatacttttgcaggttgtattttgatttcctctgaagaaacatacctgttatgttttactcctaatcttgtaaaatatccaattttcaggatagatgagatttcctaaaagtataactagataatcaacagcctttagtgaactcaacattcaaaagcaaaaccagctttcacctgagacttccaagacttagaaaaatcaatctttatactatattatatgcaatgtctctccagagaaagcaagaatccccagactgatgagaaagaagaaagcaaaagatagaaaagatcctagagtagtctgggtgttttctatcagatgaagcaaataggtattttgtaagtgattgaaagtgtgtgttcctaaggcagagggagtgcctataaatactcatttcaggtttatagttgatcccaccaagggaggctaagtacaattactaatcataatagagtccaagaattggttgcaaaaatgagctcaaaacagggctgatatgtctagatttatcttttaactaatgtcctttttttttttttttttttttgcatccttgttagatctacacaggtcttgattttcactctccaagaatagcccagttgtgttctcgatcaccatcggcgaatcccatgcagatttccagcactgataatgaactagcaatccgatttaagacagacagctctttaaatggaagaggtttcaatgcctcatggcgagcagtccctggaggtaggtgaacctacggaatcatgctgtaagcttttgagctgaagcctagatgaattttacaaaattattagaagaagacatgagagttatcccttaatgactttgtgacttctcaatatcatgacagggtttaacgttctaaggatatgaataagccaatcagtccatgtacgagcagaattgaggtggttggagagacttgttagctgaacgcatgactaggtcctgttctccaggtgacatcagaaaatggttggagagtgtactaatgctttgattcaaccatgaatccgagtttccagactctgaaggtccttgtccccaattggttttcgattgatcaataaagatgccaacagccaatggctgggcatggggcaggacacttacagttgtataggtaggatgcagagaagaatgagagattccccataactccgggaagaagggtgggatacagagcttcaggagataaagccaaccagccacgtgagattttgggtaaatggccacttcaggggaaggtttagaagtacccagtctttgaggtagccaaggcatttaaaaataagataatgtgtgtgtctttcatttgaggatccaaaaatagctcccgggtgggtgcacatgtgtgatccaccaggagccaaagcagtgtaccaaaaacttcagcaagcgtaagtgtccaattgcatacatcatgccatagactaggttttggactcttaggaaatgtaaaaagaaataagcattaaatttgtcaaatccaaaattaagtgttgcaatactgattttctgcctaagatctcaggctgtcaaaataagttacttactttaaatgttaaatactttttaacaaagtgttttaatagacactcaggcctggtgaggttagtggtgtttatgaaatggttactatatccctggtatttttctaactaataagaattattttatttaatagttacaacttacactgtgagggaattctcttgtatatcctcatcttataagcacagacaggaaacttagaggactcgttgacttgtccaaggtcccatagctgtttcctaggacagagatgtgacatgaggccaccttaagtcacttccttaatgccaagagagtatggagctatgtgaaatctctctagagtgaattacatattaatttatttgtatagcattcaggttaatccctctgcccaaaaacattgctgaaattttctatcagttgtttgtatgatcataaatccaaggagcgctgacagatacttggtaacattgtaagaattaaatacaacttatggaatgaggtctacctagaatattaacaattgcagagccagacattaagtaatttataacatcataagctattggactaggaaacatttcaaaggcaaggatgattcttagagcataggtttgaaagaacccatgaaaaaatgaattcacctgtatttaggtttcctgctgtttttattattttgagacagggtcatatatagatcatgatgactgcagactttccatgtattaacagataactttgaacttctgatccctcttctccacctctgggtaggattatgggatgcatggctatgcacagtgtattcagtgctggagtttgaaactaggttcaagtgcatgttagacaagcgctctaccagctgaattataccctacattattattttaattaacttttggcaccaatatttatagtatttaatgtattatgctagtattacccatgttcccttatttatgttgggataaatgatttaatatgattagttctttgatggctttagcatagaaccaatacaatagctaaaccgagtagggtattatctgcctgtgcttggcaccagactgcttacatttttatataacagggatatctcgagtggctgaactctgtctcctacttgcaggttgcggtgggattttccaggtttccagaggagaaattcattctccaaattaccccaacaactacagagctaacacggagtgctcttggatcattcaagttgagaaatatcaccgtgttcttttgaacattactgactttgaccttgaagctacagattcttgtcttatggtaagtggcacaaattaattaccattacagcatggacaaattttctatacttattagttataggtgttttcagattggtcataggagaccaattcctaacaattttaaaggcattgttgagagggtttttcttttggttgttgttgttgttatttgcttaaaatctgatcaggaggtagatgatttaaaggtttgttcagcagctgtgttgaaatagcttcaatagccttatctcagtctattatctgacaaaaagaggaaagggcagtgtgtgtgtgtctgtgtgtgtacacatgtgtgtttgtaaaccatgatttctatacaagccttcttatgcacatgactgtgcacaaagctgtggaaagaattgtcataactagtttaggtaggttatcattaagcttctgcggtcccaggagagttttattttttttatgattagagtttttcagttcaaattaatactctgataggaccaaacaggctgggaggttggggttcagaaagagatgtagctattagtgggttttatagtaagatgtttttgctgctaccaacagctaaagtttctgactcgaagttaatatgttggcagttaatgtacgaatgaatgaagtattctttatctatgtaatttaaagaggtttggcaaaatattttccatgtttcattggtttataggtatttcattctaacacaaacctggctttcttgtttaatggatcttcttatttcagctttctgacagcttcttatacacattccaactggctgccttcttttaaaggtgactcaggaaaatccaaaaggttttccacgtttcaaaatcatcaagttgattgtgtgtattttaagtattattttccaaggttggatcattaggaaaagtatatgcgacttatggttatatacttacaccccatacaagtctttagagtcagagtgaataaggtatcatatggaggacatctattccccttaatggtaatttggaccaactctcctaaaaggaatatttaaaagttggatgacatttaaatacatctttctaaatgtagctgtgtcttacttaatacgtgagaggaaagtgagcacagaatttggagcagtctttgcctgcaagggctttggccattcagagaaggtcagcaatagttctggggcttctggagcaatggggacagtgagcccatggcctagggagctgcaggtactgcacaacaattatatcctaagtaatatgaaagtataatagcttctacagagactgcttctgggcttccagtcatttgcatgtcaccagacatctcaagataggggataaaggagaagagatcttgtgttgcttatatgttaaggtatagataattggaagaaacactctaaagccttctgaagggaaatagaatcatcttagacccctgttttcatgtgcaatagcctgcagcttgtcacaggcactcgtccacctgacaggatgctattgtataaatgagatgcagcagaacaacaaaccaaactaaacctgctggcatgccaagtactgaggccaccagacacatgattaccaagatcctggagataaaaaaaatcaaactaaaacatttcagtaaaggattgcaagctataaaaagtcacagtgcaaccctaaaaaagaccaaactgacagttctagaacaaaaaaacatagtgcctaaattgaagactccataatgtttgagaaaattagattaagatgaagtgagcaataaggaacaggaagataagtcaagataatgaccgtgaagaaaagcacaggtggacatgagaggcacagacacgtgaaagagattcatagaaaccctagaaggaaaagagcagagaatcaaacagaagcaatagctagtgagctaatgatggattaagacttctgaaagtgataaaaaaatttttaatgaaattactcaattcacaagcagaataaataggcatatttacttaagaaaaacttaaagtgaggggtgggttgggttggggaaagactgtctttcagaatgttacagatgaaatgctgacttcttatagcaataagtaaaagcaaacaaacaaaaggtaaatggaattgtatgttccagctaaagaaagaaacattataggattgtaaaaattctttacaagcaaaaccgaaataaatattgtttcaaagaagggtcgtcaataggagtttaaaagggttagaagcatactgtctactcatagactggggcaagaggcagctcttcactcccccctccccttagcatccacggtgtagctgagtggagatacagttcttcctgcattcatttcatgatccctagagttcaacatacagactgtgataaggtcaaagcccaggttagaggcacacccagtttgggagtgtttttcctttctgtgttcatgaagtgactttttttttccatagaccttggggacaaaaacacagacaaaagttgtgttaactacccacatgtctccatgcatatcagggcttggcttaaccaactatagcagtagagaatgggcaagaggaagggaaacctcatagtatgtcatcagaggatagagctgggtgtgtaaactggcagacaggtgctgggtgggatttagcttggcagatacatcaaaacacaaaatgtgatcagaacacattgacaggatgaaacagctggtgtagcctaggcaagtggacagaagggttctgagaagcaggtaccctgaaacactcagcaaagcggcatataaagggtaaaccacatcaacactgtgagttaccgtagtgcattggctctgacatctaggtagaatgaacctgagtctagcccagcacggtcattactagctgtgctgcttgaggagaggtcatcattcagctttagtttcactaactggaacaggttaataagagggctcctgacacattcattattgatctgagaaaaggtggaagacgcgcttgctgtccaagagaagctttcaactgtagacttcagcatgcttctgttactgatggcacgtgtgatttcaggcaggcatgttcaacaagcaaaagaagaggcagcatggaatgctgggagaatcactgggcttaggagcaagtagggagtgcctcacctctgacactgggcctcagactccttagatgcagaaggttatcaatcttccttatagaattccagctggcacttagtataccaagaaccttgcacactcccataattataacaagaaagtagcagagaaatgattcactgggtcctggaagctttcacactggaggtggcatttaagtgacaaggatcacagagtaaggtaggggtgagggaggctgccagagaaggaaggaaggaaatagcacatggacttcagaacgggaaagacaagctttgtgcccgcaatgtagacagttgttaagaagcatggagacgaaagaaagccaaaagaagccatctaagttgaatgcgctactgtacactttccattggatagaggaataggtcgctcacaattgtgttttacaatgagtggtgtaaggaataagttagtagagaaagaaaatggttcaatagagactcttgaaccagtggggaatgcttgagtgataaagccttattttgggcagttgtcttgagaatggaatccaggcaccattcacactacagatctgtcatgatgaccaagaggaagacccatgggccagttacatgatggaaggaggatgggtggcagaaggtggagttagttatttctgtaaagagcacttgaatgacaaagcaatcaactgaataaagagttaagctaggaagtgtttacatggctaccctatagagtttggtactcaaggtgggggtcataggtagagatctgtatctgtatctgtatctgtatctgtatctgtatctgtatctgtatctgtatctgtatctgtatctgtatctgtatctgtatctgtatctgtatctgtatctgtatcatctgtatctgtatctgtatctgtatctgtatctgtatctgtatctgtatctgtatctgtatctgtatctgtatctgtatcatctgtatctgtatctgtatctgtatatctgtatccatatccgtatccatagatatatatgtatatgagtaaatgtgtttttacttggatagttcttaaagtcatgggaataagtatggtctcttataggaggattgtataaactcttagaggtcatgccactaatcaaggggcaaatgaaagctaagagaacaagagagagtggtctcagagacacctaggatgaagctgaatgtaaaaagtgggtgacaaaaggtgtcacacgaactagaaatgacagtgtaataagagtggaaacagaatcactgctcactgtgggtagttgatggaagactctagatcacatcaggatagaaagtgccgaacttcttgagtgttccatagaattatagacataagtggcatggatagataaaaggcaataacctgtggataaaagaaatcaatggaaaattatactttaaaagtcataggaaaacaatatatatatgtgtatattatatataagtcataggaaaactatatattcatccttatgatatattgatatatatatctcacataagggtgaggtgcttatggtaaaagaacagtcaaatgtaagaggcaagagtaatggttgcagtcatgttatcagtacacagtgttagggtttgaatctgaggtatctctcaaaggctaatgattttagcactcggtttttagttgggctgctatttggagggagggctgtggagctttgggtgttggcgtaggtcagcagacacttcagtaggtcactaagaacatctgtgtgactcttatacttgtcccacattctgaatttgttgttttctggtttatgctatatgagttattcagctcctgtgttcgtgacaccagagatggagcctcttcatcactatgctttttgtgtcatgatgagctgaagtggccgggaaaccatcagctgagtcaagaccccccctccctttagttgcctctgtcagatgttctgttgctaacacaaaattaaacaaggcaggaacccagatggatcctataattgtatgtctttagaatgagaaattagaatacatgtcctaatatttttctgatttatacatttatgttctgaatggtataaactgtataagctaagtcgtcttatatagtttggaaactatcttcacaacaacatcattaaatataaaaaaattacacaggtacattagaatagagatctgctgtgcacagttgccaagtacactcagttgtgggaacaggaggtctacagagatttggagccggtctgggcaatgctccggtaatgctggagcctggctccaagatgtagttagttatccagagattcatgaaggcccacattgaaaccccagccatttatctttatgaccagatggacactggatgtgaaatgtacccccgtgtccaaaaccttacataataatctctgtagcttaagctcatacaaagctaatcattcattttagagacacaaagttaattccttggtcctggagcttagatagagccattagtaaggggaaaaaaaataacagcagccaataatgctttctcaaatgattgtattcagggcatttttagcaaaactaaagtgtaccattaataccacggtaaactaggcttaaaaacagggacaagtcatcctgtttatatgaaaatgtagtaattagttgattatagcaaaaataagaaccgtcatcgggtcataaagacacagaatgctgaagtcaggacacattacaaatcatttagtatcctctccataaaagtctcctttaaaaagagggcgattaatagagcctatgtcaaggtccagcacacattaatagcaggcccagtactcagaggtaacccttatcatacatactccctaaggtaagaataagtattttgataaaatataaaaattgtcttctatttctggtgaacctagacttgaattctcactgaaagaaaacatttaaacatgaagtggaaaatgttcttgtttagaagttgggaggtctacattccatggactagctgcctcattcattcacttgttcattcattcattcattcattagttcattcaatgtaggtattgattatgagcagtcaccacgaggccattggtattgagtgtggcatatcccccaccccctctacccttgatctaaggatcttagtttgctacaggctctgagaacctgggacattcaagaagagcatctgctttgagcccgtgcttgtgagaaggaagagggaaaaggggttgaccaagcccgttagtcaacaggttctccagtgcaggagtgaggattaaaaagaaaaaggacagccagacaacattgtagcgtgaccccagtcaattctgaaactgaaggcacattttttattttccaacccactttttttttaattaggtattttcctcgtttacattttcaatgctatccccaaaagtcccccatacccacccccacaatcccctacccactcactccccctttttggccctggggttcccctgtactggggcatataaagtttgggtgtccaatgggcctctctttgcagtgatggccaactaggccatcttttgatacatatgtagctacagtcaagagctccggggtactggttagttcatattgttgttccacctatagggttgcagttccctttagctccttgggtaatttctctagctcctccattgggggccctgtgatccatccacttctgtgtttgctaggccccggcatagtctcacaagagacagctatatctgggttctttcagcaaaatcttgctagtgtatgcaatggtgtcagcgtttggaagctgattatggaatggatccctgcatatgacaatcactagatggtccatcctttcgtcacagctccaaattttgtctctgtaactccttccatgggtgttttgttcccatttctaagaaggggcaaagtgtccacactttggtcttcattcttcttgaatttcatgcgtttagcaaattgtatcttatatcttgggtatcctaagttttgggctaatatccacttatcagtgagtacatattgtgtgagttcctttgtgattgggttacctcactcaggatgatgccctccaggtccatccatttgcctaggaacttcataaattcattctttttaatagctgagtagtactccattgtgtaaatgtaccacattttctgtatccattcctctgttgaggggcatctgggttatttccagcttctggctattataaataaggctgctatgaacatagtggagcaagtgtccttcttaccggttgggacatcttctggatatatgcccaggagaggtattgctggatcctccggtagtactatgtccaattttctgaggaaccgccagactgatttccagagtggttgtacaagcctgcaatcccaccaacaatggaggagtgttcctctttctccacatcctcgccagcatctactgtcacctgagtttttgatcttagccattctgactggagtgaagtggaatctcagggttgttttgatttgcatttccctgatgattaaggatgttgaacattttttcaggtgcttctcagccattcggtattcctcaggtgagaattctttgttcagctctgagccccatttttaaatggggttatttgattttctggagtccaccttcttgagttctttatatatgttggatattagtcccctatccgatttgggataggtaaagatcctttcccaatctgttggtggcctttttgtcttattgacgtccaacccactttttataccattttaattacatgcaagtattttgggcaaacagtacaataagtaactaacaaagcagcaagtgattactcccatgacagtttaaaagggcttgtcataatgaccaaaatacctgagcccactttcttgtccaagcccaaaatcttgtctgaagcctagttctgttctaccctaagactaaaattcctgcctttccctacttctctattacagcctgaagttagattcttgccaaaacttacttccttattatgccctaatgtcagattcctgcctgagcttacttccttgtcatggccaatgtcagattcctgtctaaagcccatttccttgtctttggccaatgtcagactcctgccaagtggtactccagaaggctttccacaggaggttacaatggatggtaagggcaatattctgtcaaagtctgactctcaggacctctcacattcagtctctggaatgcaagcacagtggggtttgagtggcagtcgcatctttctctctgtgtgttcagatcacagctcatctagaagggaggacaagcccacagatagccccaagctggagcatcaggactgaaaggcaaacttcagcattcagaggaaacaaattaaaaattaaaaatagagccatcggccaaatacaacctcccctccccctttggttgttcctatcaggtgttctatcactgtgatgaacaattaactaaggcaataaggtaataaataccatccatcttctttcatataacccacagcagtctgtacccataggcagaaatctgatgcatggattcctcctaatagacacaccgtaattatatgagtgaatgagtccttgccatctgtactcctgctgggatccgtgcattttaagatttgcagaggacactgtcattgacataggacctcattattttgagttgcatgaggacttagaaaacatggtacagatgtgttgtctagaatttcattctgctataatgaaaagggagggaaactgatttctttcaacacttctattaaaatgttgaggctcccacacacagctgacttgtactgggcttcatataatttggtaaaatgtccgtgattcctgcttgcctgctttccagcctggtgttagctctcctctgactttggggatgataagtcatgagtgtttaatgctagacagcatttgctggctggggggtggctctgtgtagtcatcagggaaaagtgactccattatgttttctttcctgaagggtaagtgttaaagtgacctccaaccgccagtttaattgcttcgttagaatttctcttctgagccttaggtactatgggtctgtaagttcttattgatctgggagaaaacggctgcactctgtgtgagaaggagggggagggacagactgcggtgggggaggggggagaaggaagggctgctgagaggctgacctctgtttccagcagcctctgtgctcagtgcaatggaatgtctgccttgtgtgaatcagtgcagataaaaaagcaagcagagcacaggccatcctgcctattnnnnnnnnnnnnnnnnnnnntctgatctgaactgaaacaatccagaacccacaagcctcactctgaggcaccagaagcctgttgttctcacattatctgcccacaacacccagaagctcaacaggacaggcgcctaaggcagggtccataatttgtctccccccaaccccccttcgatgcagcccatgatatgcttgcatttaaaacacagtcacttcccagaggggactgaagggagtcaggagtaatcgataactagagtttcagagaaagggaaacagccttctttaaatatttactgttttacaatgagttcaggacagtcaccctccttccttctcccctcctttttaggtcctccccattctccttttctctcccttcttcccttctttcttgatccccatcagacgttttaggttgcttgagcaagggctttgaaatgtttgttttgtgattcacttgtgataatctgcttagccattcccatgcctatgtcaaatgaatctccggtagctatgccaaagcaaagcaaggaactgagctgaagccacagctcatgggccagggtatttatcatgtttgatgttcatgttggctccgtctttttaaacgtttccttcttgagggatctttacggccctgctcctaggcctggtcacatctcctagtcttttgaaaaatgtgaaggccgaatggcatagtgtacaataacagcttaaaagtaggagtcctgaactgagatggaagtttgtcaatttaacttggttttccatttcagaccagcgtactgggaaatatcattaatgcggaagcccagcttccttcctctctcccctcaaaaaaagccattgcaaggagtcaggtttctgtatccttccctgattacatctatgactctaacagcatggaccatatcccgagagcctcccttctttgtcatttagtacttcctctcttttggggccagatttgaagctgagaattcccttagcagctacgctaccatatataacatggaggtggttcatgagttctctgttctcaaggttgattttgtatcttgatatggtataaaccaatgacacgactgctccacgctatgggaagattcgattgtgcatcagagagaaaaaatatacagtggcatctggaagagcctagagcaggtagaaaaagaagtagactgaacacagccagaagactggtcatggccagtgctatcttccagagagggggaaagtagcagaggagagagaatagaagaaagtctagtgaggnnnnnnnnnnnnnnnnnnnnnnnnnnnnnnnnnnnnnnnnnnnnnnnnnnnnnnnnnnnnnnnnnnnnnnnnnnnnnnnnnnnnnnnnnnnnnnnnnnnnnnnnnnnnnnnnnnnnnnnnnnnnnnnnnnnnnnnnnnnnnnnnnnnnnnnnnnnnnnnnnnnnnnnnnnnnnnnnnnnnnnnnnnnnnnnnnnnnnnnnnnnnnnnnnnnnnnnnnnnnnnnnnnnnnnnnnnnnnnnnnnnnnnnnnnnnnnnnnnnnnnnnnnnnnnnnnnnnnnnnnnnnnnnnnnnnnnnnnnnnnnnnnnnnnnnnnnnnnnnnnnnnnnnnnnnnnnnnnnnnnnnnnnnnnnnnnnnnnnnnnnnnnnnnnnnnnnnnnnnnnnnnnnnnnnnnnnnnnnnnnnnnnnnnnnnnnnnnnnnnnnnnnnnnnnnnnnnnnnnnnnnnnnnnnnnnnnnnnnnnnnnnnnnnnnnnnnnnnnnnnnnnnnnnnnnnnnnnnnnnnnnnnnnnnnnnnnnnnnnnnnnnnnnnnntgggggtggaggtgggtggagaccagcgggtgagcattgaaatgtataacaaatacttgtgaatggggactgagggagcctggggccagcatggacattgatatgctgagaggtgccagaggtgtatgttagttggagaaccttttgtcttgctggaggtaaaggaaaagactcctttggtagactgaaactgacttcacaagttcctgaggaatgctgggctttatctaacgtccagaaacccacctttaatccaggttgggcccatttctgatattttgagtaccttttggagtttgggggattagagtttactttggacctgacagatatgaatagttcttttactgccatagatcttgcccttcccatgtttcttttactgtgctaagatttaattcacttaagcagagacatgaattgccagatggagttcaaatctcgtaaagatcaggatggaagtgaggagctgtgctgtgccagagatctgcagttaggcccaggaaaggcagcatgcagacactagtatacccgggtccaagagcgcaagcgcatttagcagtcaggaatgtaagttttaggtttatttgttagccttcactctgggctgttggttagacaccttgatgaattagccatgctggtaatgctatggctgttcagtggaatgcgtgactctgaaatccacaggagctcaacacaaggctttctaaaatgtccctgtattagtcaggcttctctaaaggaaaaggctaggtgaacttgccagttagaatgagggcaagcaggcaaaaaggcaaaagcttctttcttccttatgctcttatgtgagcttctaccagaagggaggtgtggcatagagtttgagtgagctttatgacctcaaatgatccaaccaagaaacccccctcacaggtgtgcccagctgctggggtcctcattaattctagatgaagtcaagttgacaagcgagattagccatcacaacctccaaggatgccctattgcagtcttcaaaatgcgggaagctccaatgattatctttctaaaaggtcatggggaactcatgtcacttcacagaattctggtctcttaatattgagttaaatgaatgcaatttgtttacctttcccctccatttaatgataatcaatatgatgtcagaaagacatgatttgtactgttctgagctactattacgtatttgattccaagtcacttacattttctaagtcttttaaatttccaagctgcaaaatggggccataagaactaactcacaaactgtatttgtgagcacttataggtgcctcatactatggtttgtctgttcctgccaaagttcccattactccttcttctagcctggttagtcatactatgttaaaagtcttatttatcattttacattgtggaccttaggaacacagaactgatccagcatcctcagctctttgcccaccaacatcattaaatcataaatagtccccacttaaaaattttggtgttttttagtcttcaatgtatcatcctaatgaaattaacatgtaagtacacttttatggactaattttgtattcatgtgggtatgcatgtggaggtcagaagacaactcactagaactacttctctccttctgtcatgtgagtggatcccaaggctcgaactcaggtcatcaggcttgtctgcaggtgttcttacctactgagccatttcaccagcccccgcctaacacgtttgaccatgctacagttgcattgttttgctatttcccagaagactggcaaatgaggggacaaaaagtatagtgccacaaatggaaataaaagtatacactgtacattcccagtttctcctcctgcaaagctcaacttggtgcaattcattttggccctgcaatcagggtgagctttaggtagtaagtggtgactgatagttccatcggatgaacatgagccatttaatctcttcagggtcatgaacagaacagagcaggtactccaggctgcagtggttactagcagccacactagtcacatgttcttccattcttaaaggtagccactagtgactgcttatctctgatgtaatctgcattacctgaagggttcttcagttttcccttgcattggacttcagagacagcacgtggcacagtggcagttgcctggataccgaactgaaagatgacacaaagccaaggcagaaaacaactgatcaaggcatgagcccagaagaggctccaggcatgaggagaagagatggaaacaaagttgtggcagagcatatggacagcatgctgacccactgggttgggaactagaggagagatgtaaaaagttttgtcataagtattcatgctatttaatagctatctgttacacaccaacactataccagaaacacttttaattctatttacttatttagttcgccaaaatagtatgtgataaaaactaatattagcgccatttcacagagtaggtggctgagtaatgattaggaagtacaagatagggagggacttgtcccccaaagatgaaacattacctcgattattctagtcccacatagaagcttataaagatgttttgctaaataagattatttttccaactaaaagaaatctgccatcaatatttcaatgtcacatatagttcattagtaatgaatatttatatcaacatatcatgtacaacaaagtaaaagattctaactgcatttttttcaaatagccattctgtaagactctgaatgtagagcctttcctcccagaactgtaaatgtcacccagaagggatgtcagtctctcactggaatgattatcttcctaatgccacttgatgtatgacgaggagaggcatgtattaacctggcgttggttgacatttagtcaaattcatgatatatgatattgaaatgtcaaacatgaaaactcctaatccattagctcagttcctgcttctggctaaggctcaggctatggaaagagcggacacattgcatgatgtatccagtatccgacatacgctgggctgtgggataagttcaaagtcttggaccacctcatccttcccccttctctcacactgccagagaaaggcacctgggagctgagtgtgtagagttggctatgtcctgtgactgcacccctgccctttactccctgggcctagaatatagaaaaccttgcatgacagcagccacaggggacctggcatcagccacatttgacttcacctcctctaaagagcttcttactattgagcctactttgttttttatactccacctaatgtgggagtgggcagcttcttcttagggctttttctcagcctagccctctattctcagaaactataaactgacacattaatacatttggcctttcctggctattatgtgccaggttctggactttttctttctttttacacacaaagttacatttttgggttattaaatatgtgtactagaatcttgtgattttatactatccccaatcctttcctgtggaaatgtttagcagttaaccagatcttctgcaacttcttgagaactctgttagttggaactcacgaacatggttgctatttttaattttgtggattcagcatcaaaaatcttatttcactagtgtcacctagaggaaaaaagtaagttgagagttttgtcttgtgtgtatactgctctggcatttcttatttaagtagcaggttagaaagcctagtctttcttggcagcagacttaagaattacttatgctatatgaatatattaaacacatatccaatggtgatacaattactagctctgctttgggagccaaagtagaaataaagggccatacatattgatagttttatggcagtacagctttaaatacgcatgaatagagcttctcatattttctttcttgaagtgtttccttataactttgcaaattaaaaatcaaaatgcaacaccattgtcttaatattgcaaatgctgaaagcactctcaagtagaattgatatttcaaatgaaatttaaatactgtctcattggttgtgtgaggctttggaattttaccaaatgataattaatatgcataaaatatttatttatatagccagtatcttattatagtctactgtgggcatgaatttatgatatcctgccgcagtcttccaaattctggggttacaagcacatgacaataaaccagctatcaccagtgctttaaaagaagcactgttatgtagaatttgacgagtgaagattcatgctcactagctgtgtgatcttagatgagctactagcttatcttgggtagggcatgattttataacaagcacattagtctcactttatttaaaaacaatcacatgttagtgcagactaatgagatttgcagtgatgctaataaaaagcatgcacgcacacacacacacacacacacacacacacacacacacacacacatttagtatgctattggtacataacttcaatttaactacaagaattgcctaggaagatgggaagagaatctcaaggaggcattatctacattaagttggcctatagacatgtttatgggggatttgttttaattcattgacatcggcactttgggtggcaccatttcttaggtaaaatgatctgaactatataagagtaatcaaactgagcacaagcaaggaaggggctttgcatgcattcatttctctctactctgttcttgaatgtgctgcgattgaatgtgtatttgaggttcctgccatgacttttccacaatgaaatactgtaaagtagaattataaactgaaagaagcccctttcttccctaaattacttgtcagggtattttatcacagcggcagaaattaaattagaacatttttttttaaaagtgtggacttggagaggttcaaatttctattatttgggaagttagaatatacttattagagtctagtattttaccagagtttaagaattaaaccaattaagaggaatgtttgtgatagtttatatggtgttttggctattatttgtctaaaagaatcaaccatactggactggaaaccatgtttatttattttgaaattctcattacacatccacaatttattttgatcataatcagtcctcagaacccctcccactcgtcctgaatccctcttcacacttccgtgcccttcgtttgcttccttgcttaataaatgtataaactgacaagacatctattccatggtatgatgaaggggggaaggtttttattgtgtatatataagagagtgaacagctagaggcagctgtatgagtccagagcaaagagagaaagcagcagactgaccatagcagactgaccaaacctggccagggctatttgtaaaagaggcatgagaagcctgggtagagaatagagaaaacagagtgagaaaagcaagagcagaccatagaaaacacatggagggtagcagagctataaagataatgggtagctgagggatagggatgtgaagagaaacccaagggccggaaggagtttagaaggaggggaaagggaggaagacttgtccactaggatggactttgaaatgtgcaacaagctttgtctctgtaactccttccaagggtattttgttcccacttctaaggaggggcatagtgtccacacttcagtcttcatttttcttgagtttcatgtgtttaggaaattgtatcttatatcttgggtatcctaggttttgggctaatatctacttatcagtgagtacatattgtgtgagttcctttgtgaatgtgttacctcactcaggatgatgccctccaggtccatccatttggctaggaatttcataaattcattctttttaatagctgagtagtaagtactccattgtgtagatgtaccacattttctgtatccattcctctgttgaggggcatctgggttctttccagcttctagaagtgggaacaaaacacccttggaaggagttacagagacaaagtttggagctgagatgaaaggatggaccatgtagagactgccatatccagggatccaccccataatcagcatccaaacgctgacaccattgcatacactagcaagattttatcgaaaggacccagatgtagctgtctcatgtgagactatgccggggcctagcaaacacagaagtggatgctcacagtcagctaatggatggatcacagggctcccaatggaggagctagagaaagtacccaaggagctaaagggatctgcaaccctataggtggatcaacattttgaactaaccagtaccccggagctcttgactctagctgcatatatatcaaaagatggcctagtcggccatcaatggaaagagaggcccattggacacccaaactttatatgccccagaacaggggaacgccagggccaaaaagggggagtgggcgggtaggggagggggggtgggtgggtatgggggacttttggtatagcattggaaatgtaaatgagctaaatacctaataaaaaatggaaagaaaaaaaaaaagaaatgtgcaacaagtacttgtgatactgaaggactttggaagccaacagctttggcatgctgatagacaccacaggtagtcatacatctctttggccagaggtaagggaagtgactagttttggtggacagaaattcacttcacaagttcctgaagaatcctggttttaactaaccatcagaaatcctcctatagttcaggttgagcccatttttggatatttggagtgtcgtggagtttggggaattggcggttattttggacctgagaatgactgtgctgcccatacattggagaactgtacactggagcatgaacaaggccaatagcaataaagaaaactgccttaccgttttctatcattcataggctaccataactgctaacctagggggtagagcctcttgagtccctcccttatccatgttgccatattgactagcttgatcttatgcaggcaaccacagctgtgtgggtttatggatgcaaagacccaatcatgtccaggagatactgtttttacagcactcctccctttttgctgattctacagtcatatctgctcccttcttcctggatattctctgagcttatagggaaaggtgtgagccagatgtcctgtttatggctgaatactctctgcagagaataagtgactggtcaaagtgatcagtactggaaattacattttaaattggctagaagaatataattcaattttcagtcaatgttggttgaataaaaatcatttttaaagcttcgcttactgaatgtttggatttgaaatatgaacactaaatgataagagggggagggagaaagaagcactgttctagaaccacattgactttgtgtttgttactctaaaagcctggtccctttttctgagaatttaaatcctattgctatcttattcccatgcttgcacaaatcaactcagaatgccctcccaaccctgcttatgtgagagcattctgatcatatatctcactagatatttcaggttacttgtgaataccgtccttactttagatttttgaatagtctgttatctcctctaaatttttagcaaagtatagatagcaattggtttttaaggagacagtcattattaatttaatttaacttatttcagatacttaatatattaatatatctaccctgttcaactgatatcttatattggataaaataagagtttcaagtttagtttcataacttatatgtgacttagattgtttatgagtttgttgatagagatataggtagagaaactgctcggaagagtcaatgagaaaggctgaatccattttcagtcagagtaggtacttaacaagtggcagcaagtattgccatacaagttcaagggactcatttatcactggttcacacataagtgttcagaaacgcatgttagctcagagtagcagactaatgaggacatttgagtttcatagagtgatgtggggatttgggcatacaggatataaacttcactccactggcccagaaggtagggttggagcagttccagcatagtcctggacagggatagaatttaatagatgtctttgaatgaggtattttttttcctaaaccaaactaatctcactcacattattagaagtattctgtcatttcttttgctcactatctatgatcctcgaggggcaaagggttccaagaatgttctgtttctaacaatgaatggttgctcattatagtctctagacactataatgaccaaatcctaagccatgttcctggatagcaagataatgaaataaggcattttttttctagatccagtcaatgtgatattttactagttcattgatatgcagatagcccacagaatatgagtcttatacatgtgaacttgcggtattaagacagttttctgtcttccatatttgtagacatatgatggctcaagttctgcaaacacccgtgtcgccactgtgtgtggaagacagcagccacctaattccatcacctcttcaggaaacagcctctttgtgagattccagtctggatcttccagccagagcaggggcttccgagctcaattcaggcaaggcaagtatcctatgggtcacctgagccctccttagtggtataatggcaccagacttcagaaactgatcacagcttccaacttaacatgaaaatgttcagaaatcgagacttgtaagtattctaactgttctacattttatttatcttcatctaccttaaatgataatgatgtcttaggttatgcatatctcttaagtgctgtgtttttagagtaatgtttaatggtatagtatcagtgatacataagacagaattagccaagttaatttccctagcacttatccaaggaaacacaactgggaaagagtcaggttctacttgcccagagtggttttccttgttgctgaatcccatagttttctattgtttttgtccttaagttactgccatttctcaatttcctctcccaagcattttcacccattgcctttcaccagaattttctgagattaatctttatcaaaccattagacagggaaggaacacagagattagagggattgttaactggtttgaattggggccatgatttttgtcgggatgactcagataatctatttcaaatattttttaattaaatgaattgtacatatatttacttgtaagtgtgtgtgtgtgtgtgtgtgtgtgtgtgtgtgcgtgtgtgtgtgtgttggtgcacatgtagaggtcagaggacaacttgtgggactcagaactagactcagttctctcactgtctggacctcagggattgaactcattcagcaggctgggtggcgactgcctttacctactgagctatctcattggccttgcctccaataatgtttgcctgcttaataatcatatccctgtctatatccatattaggagacttataggtatcacattagtgaacgatcctggttggacacaatttctgagtcagtcctcccaaaggtacactggagcaagacactaggtgtgctctatcattcttggtgatttcaaagacaaagcagtacttaacagtcatatatatatatataacatttccataggtgcagcttcagaatataactttcctattggcctgtctgatcttcagtatcagcctcctcaaactcacccacccttgctccatctttctaccaagtaacttgtaagagatacactctcatcagattgagggtcctcatggctgtccttactctgtgtggcttagatgaaaggcaagtccctacaactgttcactacagtccccaagccagtcctgaccctttcacaatgctgcttctagttctacctaagctttataagcttcagttcagactgtataaccgtggccctcctcacccatgtcatgctcaggctatgcattccctccaccattcttcttactctccacaccctgtctcagtcctgcctcctccagagaccaggacccaaccatgcaacacatcctcctctcctccgttcccacagagcattgagcttctctgtttaacttgaaatcatcttcatacatggagtgtttcctagagaggaaaaactcatctatgaataaattattccctcttataatttatcagcaaacagagtaagtgaaccaaggccagagtatgagttgaatgattcagataattcacaactgtttgtggtgttctatgccgtgtgtccccacttcttataattgaaagacattataaatgtaaagtgttttctcattatctggtggcttctttgcggcttccttggtatgtgctatggaaataagaagaatgtatttgcattttcacacacctaatgtctttatttggtatagttgataggaaccaaaagtgtatgacatgtgtgtctgtgcttcccagagtgcggagcccacatcattactgactcttcagatagcatctcctctccactgtacccagccaactatccaaacaaccagaactgtacctggataattgaagctcaacctccatgtaagtaacaaaaatcaaaaggaggggagtctggggaaagtggctcttctgagaggtaaggctgtgaactgcatttaacctcctcagtggcagcaactgacaattggcttcttcctgggatgcatggaaacagacactttctggcctagtacgaaagcacttttaaaaggattcgcattcatctaaaagaattgttaagtctggatgtggcgattctagcaccctgcaggctaaggcagaaggattttgagttggagaccagcctgggctcaacagtcaattcaaggctcgcctgagtaacatatggagatcttgtctctgatgaacaaacaaaccaagggctggggagagctcagtggactgagtacctacctatcactattgaagccctgggttctatccccacaactaaatgaatcgcatttagttaatggtattgcatgcttgtcgctccaacttctggtaggagaaccagaagtacaaggtcatcgtccattcatacctagttggaggctactctgggatcagtgagatgctttgtgcaacaacaaaccaacagaccaacaaaaagacaaacgactgaggatgcagttactagaacacttacctgcctgaaatgcacaaatacatacaaacaaagtgtacaaatacaagtaaagtagatggtgaatgaatatgtgaataaggatagagattggagaaatacctaactgttggaggacgcagggttgcaagttattgatcactaaaagggaaactaattgtaaaacctgatctctcctgcaatggatatatttatgaaatcagtgcatgcctagaggccctcaataaatgcttattttctctttcttcttttggggatcttagaattctgctatgtgacatggcaatagtccctccacattttccaggcagagaaaatgagatggcctttacaggcctggcagaatggctccaagcagactattccaggcctcattatgagtcctgtttcatctgaaccctcccctcctttcaggtctctaggaagaagttgtgatttaagacacaacgtgtgaaagccattaagttctcttctctgttctttaattaatgactttgtaaaaacaggacagtcacttaggctaatcaggtccctgcacaaaataattctcaaaaaagctggccttaaatattatctaacactttcacaaactgatagtattttatggccattcatggaatgtgggagctgacagataatgtaatccttagcctttgtacatggagagggtggagccccaacaaagccaagataaagaagccccctgcattgagctcagcagttttgtgcctcctgattattttctaatgatctgcaaaaacatctagatgaaagatctcaccgctacaaggacagcaacaggaaaagatccctttctgaggattagaaacgctgtaaagactacaagaggaaactgccatctgggcgctgactgttcttccatgattcaaagctttcttgatggatgattcagaagctctcgggcactgcttccgacccctaaataaatttgagtgtgctgggagccatgtccaggggggaaaatatgccttagtacaagtacatgtaaggactcagagcctaagaaagtgcttctcagaggaacacaacaatggctaacaaacaacacaaatagagcaaaacataacaaaacaaaacaaagcaagccgaaaactatgttttccaataagatgtctccagaagtccctgggatgaccctacccaagagtcctgatttaccatgcctggcattttggattctgcaggcatttttcaaaagcattgattctgttactcttcaaaggaagccctttagcgcgaagctgagcccttagctctgtttactcaccccacccctgtgcaaagctgccagaaagcaagggatttggcatcatctcagagtaccaggggcaaaatctctctgttctgcttgccagtgttttattaaataaccaacactcttctctctcttttttttctacagtcaatcatattgctctctcctttactcactttcatctgcaaagcagcacagattgcacacgggactttgtagaaattttggatggcagagactctgatgcacctgtccaaggtaccggagattttgtcatttcatctgtagtcttgtcacgtagtgtgtgtgtgtgtgtgtgtgtgtgtgtgtgtgtgtgtgtgcgtgtgcatcccaagtgtgcagccatgcacacagacattcacagtgttgacattcaaggttacagtgttttcaataagcatgaagagcctcaaaccacataagaataaccagagggtaggaaagcaggacaatgtggggctcatgaaattcaacttacttatcttctacatgcaatttgtgtattttaacttgtttctgaaaggcaagttgcagatactaaatgacagtctgaggcaggggcagtagtgtgacaaagactgttttggcattagacaaaagtctttctgaagcttctggagagtactttaaaatatgtcttatactccactggacatgtttcttctgtccccagtgggaggaaagcatttgaaaattagttaattgacttcattaaaagtccaccagttggtgtgctagacatcatgataaagtgtgtgatatagctcttgagatggttcagacaaaataacttcacatgctttaagctttctccatgagactttaccatggaaaagtctccctggcagagggaagcgccatcagaggaggtttcaatgctattcctgtgccgagaatggagcctgagagaatggtggacaaagaacaagccccaggcaaacccctcattgtaatgtttaagatattaatccattcacattggaacaggatgtgttatagaatgcacactcctacccagttatctcctgtggagtactgttctaagtattttataagtggtaactcagtctttacatccttatgagatgggtttaattatttctaatatgtcctcctcttcacatggggcaactaagtcacagagcacccacagtacttgtctcaggttatgttgctagtaaatgacaagcaaggcattgaacccatgtaacctggcccatcatctggagcctggtcacatcaactttcctctgtcctcctattgctttctattgggtttatgaatcatcctggctatgcttatttttgaggtttatccttagtggtcaggcattgtctcaaacacaaggctaatgtaagtggttctgcttgtgatttcttggttttgttttgttttgttttgttttgttttttgagacagggtttctctatatagctctgactgtcctggaactcattttgtagaccaggctggcctcgaactcagaaattcgcctgcctctgcctcccgagtgctgggattaaaggcgtgcacggccaccacgccctgctatgcttgtgatttcttgtatgtacctggaaaaactgtgtgtcgtccctgccatgctgtcactcacctccatgtggttctcttcaccctttaggccgttactgtggtacctctctgccccatcccatcatatcatttggcaatgccctgacagtgaggtttgtctctgattctgtgtacggttttgacggtttccatgccatctactctgcatcaacatcaggtgagtgggagggattagcattaacagatgacctcagggttagcagacatgtggtagaagtctttggcttgttatttggggctcttttcatttaacgttgggagctaattcttgaaatttcccctgtaccttctttataattcaatgtctacattctgacaaccatgaggtatagaagtgagaaaaatcatctgtaaacctggccatctcttagctaaaccttatttgtctgggagacctgttctctactgtcacagcaatgtaaacatgaagtgctaaggcactccatgactgccagtttgatagaagctcttatggatgtacagcctcatggttgttcttgtcttgggagcttgatggtggggtcaggtaggtctggctgtgcatgtccactgtgcagtgaggcatctaagcaggaaaggaaaggagtgccatccagccctgcggctcttggccaggtggggcaattacagccaatgtgtagaaagatgaagaacagtgtgtttcactaccctccgcagagggaaaagctgtagagtttctttttacatggcaaccagagaaaattaccttctcttccaggctagggttgaagagcatactggacaagattaaaaacaagtcttcctaaagttctagttcacatggagaaagccttttagaaaggggtcccctccagctcaccatactgtggagttcttgggtttctgttttcagactcctccctctgttactgtgcgtgacacagttgcttcttcatatggaatggacgcgctttgtccttcattttagatactggctctaatgcccttccacttgtgtcttgtggtgtcttccattttgtctttgctctgaaaccccctttgtttcttttgactttcagcttgtggtggaaccttctacacgggcgatggcatcttcaatagccctggctacccagaagactaccattctaatacagaatgtgtctggaacattgccagctcccctggaaatcacctgcagctgtcttttctgtaagtccttgtcaggcatgccctgtctcagtgtgggtaaatctgcagggaggaagcactgttactgacagaatggttgaccagcagcctgtgtctgagctatcagcagagagaacttgtgggagccttaggaaggctttcctcaatttctttggtttcatttgtagcttcagttgtataaagcattaagaatctttcaacaatattctttctttcaactgagaggagaggagagagagagagagaaggaggaggaggaggaggaggaggaggaggaggaggaggaggaggaggaggaggaggaggaaacacctgacttcatttggccttctttatccacacactatattcctattctaacccacccttcctttcttatcagagaagtgatcttggataggatttttttatttagtttcttaaattagccataattagtgatttgtaaaaactactttcaattttctcattgaatcttgacacttttggaacatggactatggattggagtgaatgggagatcttgtatgttccaagtagacctaggttagaccaaacagccataatagtatttcccagaagtagatgtaatggggagatgttatatgacatctgattgtttcattcctcagtagagaggttccaatgagcaaccacacctttaatcccaacactcagaggcagaggcagacagatctctttgaatctgaggctgacctggtctatacagtacacttcaggacagccaggactccatagaaagaccctgtctcaaaacgaataaataaataaaaagagacagacagatagatggctagatagtgagcaaagatatttactgaagacatgttagcatttaagttaccatgttgagttcaaaatcatgtgccatactatattacattattggggtcaggttgaaatcattaatactttgttgcttttttctttttcacatgtcctcagtgtgtagcccacaatgacctaaaacttaggatccttgcctttccatgcagagatagaaggcaatgatcctcctgcctttccttgctgttcagagacaacaggcatgcatgccaatgcctggctattaagtgcctctatgttgagaaaacattctttgctggtttttccttgaagacatgcctaattgtgctataagaactaattaagaatgagacaagctcaaacatttcaagttgctttcttgaatccatcagtcagcccatgcctcctcagggtgcaagtgacataagtaaaagccgtcttcctgtacctgaacgacaatgccagtttaaactgccatgtgggaatgtttgggagttgttttcactgaaatcatgacatttcttatgtaataagaaattgtacaactgtgcatctagtaatcgctccatgatgtgtatttctattcaacacatatttagcagcaccctgagcacataaagaatgcatgcttctttcctgggggtgccttatagacagtgatgagaaaagggttctcctgtcttagtgttgaaggtcaaggtccactatgtaacttgttgtagctcccaacttgccaagaatttcaatctcttttcttggtctttttcctcctacctcgaacacatttatgttgtacacctctctgatgttcagtggttccaggaactaggataggtcctgggaatatttagtacatctatgctctctgttctttgtagcagtgagtttgggctacaccactttggctcctggcaggctgagcacacccacccaggaactcttggattctctaatggaagacacacacacacacacacacacacacaccataccagttaattttaaaatgccttggctgggtactcaaaggctgggtactcctgccaccccaggtccaaatggggaaatggccagtggccactcaactgaattctcacatggctagttggctttctctcctgtgtcccatccttcttccccaactcatggcaatctcccttttctctctaccctgcccccgtgcccaagcccaagcaactctaagggtcctgccccatcttcctttgcccagcctttggccgctggcatctttattgatagatcaaaaaaaaaaaattggagacaaagacctttagcatttggacacacagattcccaattgaatcaaaacattcgaaccaatctccaacagttcttgacaaatttgttgataaatcaactttaagaagtcattgaattgaaagctcaaaagacacattttatccttagagagacaacaataaacttgaagggcctctgttaggattaaacatactaaattttaaaatacatagcccaaggccatgataaagaatgttcagtgaaggatgcttcattctttgttatgactgaagactcctctctggtgttttaggaaccacattttatggcccacagtaggctagagcacaggtacttatcttggttttcaacttgaaacaccagaacaacagcagaaagttatcgtgtgaatttatctatagggcgctgtcttgattagtaactgctgtgggcagcccagcccagtgtggttctgaactgtagaagaatcgcaggtgaatgccagcctgggcataaggctgtaagcagtgctccttggtctttgctttagttccttcctccagattcctgcctagagcccctgccagatctgtccatatgagggactgtaacctattaaccaaataaactctttccttgtcaagttactcttgataatggtgtctatcacagcaacagaaagtaaacaaggacagaaaggggcatccatttcacaagctgacagacattaagtcctaattactaaataggaaaatcttggtgactcagttgttcccttgttcacctatatgctgtttctttggcctttgtgttccttgtttgagtctttttttgttaaggtggcttttgaagaatgcaagttgcttttgctgtgtgtgttaatgtgaataagaaaggcaaggcccagagttatttctgccctgatctaaattacattcagatgtgtactagaacttgtgcctggggtgtgtgagagacatatgaaccacatcaagttctcaagcatagggtttagattatgaatgctgtggtgaaactgagtggggagggaaaaaatggataaattatagttgaatttgcaatgaaaaggaaagaggagaaataaaatttatataaagcagatattcaaagggctgaacagaaactgtacttcatgccagcagaggggtctgagaaaatggctggttctggtagcaggacaaaaatgcgataactagaaacagaaagggtattatttttattacacattatatttttactgacagatctttgccaaaatgtagatttgcttataaaacaaagactgctaagaataaagctttcataagaacttttgtttggcttttataagtttctccactgtaattcctgataggaagccattccggctgtttactcctggaagacagtccaatagttaggagagaccttccctgtgtaatctccgagattattggtcagaattttaaggaacattcagatcacctgagttttgctaaatttcataccctgatttagttgctatttagggatagattctcccgctaacccccctgaatatacaattattacctattcttttactgaaaatacattttcatataatatattctcattgcagtttccatgcctccacttccttcccccttcctcccccaaccaaatctacactttcccctctcattagaatataatcatctaaaataataactattattataaaagaaaatgatacaaaacacaatcaagaataacacaaaacaaaacagaaaaacaaagaaagaagaagaatcacaagaaacacagagtctgaggcagggtcacacatacagaaagcccataaaagcaaaattaaaagctataatatacaaggggaaaactctgtaagggaaaggggaaaaatgcccaggaaagcaggtggggttcagattctttatgtcaaatgaactcccacgtggtgctgggttgctgggttactgggtcacactgcatgcttctatagaatgctttcagagtaaggccctggattcaccctctgagatgagagaagagtcacctgtctcttttctcaaaagcagaataaaataacttcggtatgtttcacattgtgggtttattccactaaatataataaaattgatcctgaattatactgtttctcttataggtagtattgttttgcattttcttatttcaaagttccaaaggtagtatgttttgtagcaagagtttatatttcttatatttgagctcatatatgaaaaatgtaaattgatttcagcatataaagaaatagagtttattttccttactccagaaggatatccaaatattgtagtaggaacaggataatcttatatttgttccatgtttgctttgtaactgtttgtttgtttccaaattagatccttccagttggagaactctctaaactgtaacaaggattttgtggaaatccgagaaggaaatgccacgggccacttgatgggacgatactgtggaaactccctccctggcaattattcatcaatcgagggacataatctgtgggtcagatttgtctctgatggctcaggcactggaatgggcttccaggccagattcaaaaatagtaagatggtttgtttccataagggtttctagaatgtatcctacaaactaggaataatgataaaagttttagttatatattaactaagaagaattctacactctaccttcttttcaatataccagaaaaaattaattattaattatttatggatagatcactgatggcaaagaaaagtgtgcttgatgctttgagtattctttttaggctctagtttctacctgctattaatgatattgtacaaactggccttttaatatacttcaggcagttatatcaaacatgtttatttggtcttttaaatacattcttcaaacttagacctttagaattattttaggattgtcttaatcattcagataaaacctgggcaaatgcagataaaatattaattatttttattctttaacaagtttttcatgattggcaatactcagtgttgattctcatatagaattaaaaaatattttatttcataaacaaagaaaatttagtaatcataattaagatatgaaatggcaccctactccccaagtcccctggtgtctgggaaatctttttcacatgggaagttgccccatcttttcatagcctgcagccatctaaggagatggaattccattcaagactcatccttgaactaatagtccagaaaaccaaaagcaaagcagtatttcttttagtggtcagaaaagaaatggcagtcaattaaaagctcattctttccaacagtcttgccctttgtgtttgttctcagtttagttttgttttgtttttcattctattaaagaacaattataaataggtctgatttacaattctgttctctgttctagtatttggcaatgataatattgtgggaactcatgggaaaatcgcaactccattctggcctggaaattacccacttaactccaactacagatggacagtaaatgtggattcttctcatattatccatggtagaatcttagagatggacatagaattgacaacaaactgcttttatgacagtttaaaggtaatcttttgtgatggagatgtttttatactttgatggatactactggcaaaaataagttggaattcatacctactcaagtaaataacagacataggtgatggtcctaccatctcattactgttgtctcgttgtcatctgtacaaaagtaatccttgtattgggtttgttattttctattttatatcaaattagttttataataattgtgctactgactctgtctgagcatgcctatttgttctagttatgtgtttattctgtcttctatcctgttatcctgtttcttcttttatttgcttgtcttgctttgctactttcgttgaagcaacatctagtagaaacagtttaagcttatcccctactaggtttcaaataaatgagactcagactatggttattttattttgctttgacaattattgggggctaacccctaatctattcttcttaactgcagcttgggtaccttcccagcagtataccccaaatacttgttgtttctcctggccatgtgctcatggtccatctcccctcatggtggcttcctcattttcttccattcttcctctttcctctctggcctctcctcattccatcaagtaactcaccttcctctagtccctccagtaattggctatagccaattttatgtaaccaatagtattaaattaagggacaaggttcccacaatcaaagcttgtaaatgtgagaactcactcataggcctagactttggggtacaaaatttagcattacaatatatagcaagagatcaaacctcaacagcaacccgggcattttaataagagaaatctttcctatagatggaagtcccagtgttagggtggagagggaggaaggaggaggtgtagtgcatactcagaatcaacagacttaacaagagagaaagccatccagttgttctaatgtttcagccttaaaacctgaaagagtgatataaaaataagaaaatatgaatagaagaaattatggtggcctttgcctccatacattggctactctgtgaattccagaaaacactatcatatcccctaaagccataatccaatcactcttcttggcatctcactgctcaaagcagaacccagtgactgactccatgatgctcaataggtgtggaaatacttgtaacataatttgaaagaaataagcttaataaagaattttatggttgttacaatggaattgcttacagttatttgaaaactatcataatatctatctctaaataggtatgatagtattttaaggcagatggaagagatttactaagtattttgagtgtccagagccctgccaactgtggtcctttccctgttatttgctttcttctctacaatcgtttgtacttccccacccacagatttgactataaaccaccaagtcagctatatagtctacactgatgttcattagaataatcccacaacaaagctatatgaaacaccttaaaatagttataataatatgttcaaacgtaactttttgttttaaacaaaaagaattttcctgatattctttctactttggtaaaatcataaaatacaaaccattctttaaattttgcttctcatgaagaaagtgtgtgtagttgcctaatgatgatgttgtattgtgctttttttttcatgcagatttatgatgggtttgacattcattcccgtctgattggcacttactgtggtacccaaagagaatcctttagctccagcagaaactctctgacattccagttttcttctgactcttccaagtcaggaaggggattccttctggagtggtttgcagtagatgtttctaatgtaaccctgcccaccattgctccaggtgtgtttggcaatatagtggaatttttttctaggaatggtgtgtgatatgttgtgttgtgttgtgtatgtttgtgcacttgcaggccagaagagagattgagtttcctgaagatcgaggtggttgtgagctgcatgatgtagatattgggaatagaactagggtctcttggaagagcaggacatgcttttaactgtgtattattctcaatcccaatgtgcagcccctttgaagcacttctaggacaagtgcttaaagacgttgtttttcatttcacaggagcttgtggagggtatatggtgacaggagacacccctgtcttttttttctccccgggttggcctggaccatatggtaatggtgctgactgtatatggataatttatgctcctgattctactgtggaactcaacattctctccatggacattgaagctcagctatcttgttcctatgacaagctgatcataaaagatggtaagaaacattgtagaaaccactccttaaactctgaaattactgttttatttttatactagctccatacattttgtatagaatttcatagatactataaccaagaaagccatcaaatagaataaatagctacaatgtttagagaatatagggcgagtattaaattttacctataccaaaatgtcagggattctacagagaaattctacagagaaaaaagaaggccctttgagtgagataagtctggaattccagactgtgctaaatttttgatacaatgaaaatagtcattgatatttgtacctatagctttaagatacaagtgaaagaccaaaaagtatccaaggcaggtaatatatccatttctcattatcccgagaatctgtggatagaatagatagaactgagaatgttgtagtgtttctatacaatgaaaaaggggcatgaatgagactatacaatataggtacaattgcccttcacactctgtatgggttaagtacaaaagggcaccaggaaggccacatcctccatatcagtgtttctcagtggatcccagaacagcaatgttagcatcacctgaaaatttgatgtgaatggagattttttttttaaaaaaagcaaagctgtttcactataatattcaagaagttgctttcttaggatcccatctctatcaaaactcccagcaagaaacatcactttgtagagactcatctccccatctgtagaaggcactaagaagccctcaatcaatcatgccaacatgatgtgatcataaaccttttgtcctgtgaacaactagctttcagctcatgtacagaatacctccccttttcaagacatccctggagacactaaattttatttttatagtgtaattcaatggatgcatcctgttacacacaattctgagtgtccacaatagagtggaaatcatttagaaatcttcaggagggagtggaatcaatggagtagcttgcttgttctctaaaatcaccatctactgacttgccttttgtccttttagtaaattgccttggaaggctggactctgaggtgtattccctttcttctaaatgactttcacagcctgtcttatcatctgagaaagagataaatgctgctcttggggctcctcctcctcctcctccagcgtccttttgagtatctgaaaaagcagtaaatgtaagattctaacaaaagtctgagacttttaaagacagataattcagaatcctttcagccttattttatttatttaagtatacacagctgacacattttatccattttcttgctcatagggcaagttgaaagagctcagaaattgtgccttgtgccaaaacaacaaaagcattttatattgctagggtgacaagtggatatgggtcctttttatttgcagccatgaatagatggcttatagcttccttccttctacatctcttggattgttcaaaaaagcctgggttgagtgcttctgtcaattgctgggtgttttgaaaattttgtccactcacattatgttaaaattctttgaaattaaaatttactcattattttatttatttagattttttgacccacttgttattttgcttctgattagtagacatgcatggcattctgaagcaaatatctaaagttcattgaccacaaaacagtcagacagatgtcatgtgcaattggtcagtcctcataggtccttggcacttggccatagtgtggctgtgaccattcttgagcagcccaggaagcagcaatcttgggaaatatgtcagagccagcctcccatctaggattccttttttaattatttaaaaccaaataattcttttcagtcaatacatatcaaattttatatactacacatactgccgagatctcatagaactatcctgagcatagatgtatttttgaaagaagagaaagtaagagaaaagaagagaaagaataaatggagggagaaaaggaagaagaacagagaggcaggtggaaattatttgtgaagtcagtaactctggactgggatatagctcacttcataggttacttacaatccccatactcaggaagggtcaaaagttccaggcatcctctgctacttggtgtgttcacagtgagcctggaatactcaagaccttgtttcaaaagcaaaagtaaatcaatcagcaatttcttttttgtagtcctgtcagacatatcatcatgtacatcatgtagaggaagtgtggagtatctagagttaatctaccagggttacagtcattgttgacttctgtgcccttgaatatgataaccaaacttgtatccctctcaagattctttttctaagtattataataatacctaccctacaatgttttgtggaaaaaaaaaacaattagaaaccaagtgtaaggcacatatgagggttaataggttttcataatcttagtacctgtttcacatctcctagacagttgggctagcctgaggaatcatcatcctgtcttctagaccagatactaatggttaccagacttcctaaccctttagatatggcttctaggtctaaaattgccatattaaatatttggaaatttaccagagttaagtttggagactagaaagatgagcgaagaatgaactattttataagcattgagttatataacaattaaggaatgaactaaacaagcaatcatatagggctaagcattgcttcacccaacaggttggagtagtacctagaaaataaataaaattaataggtcaagcccaggcttgctgagaagtagaacacgcattgatatgaatgaaccaaaattttgtagcttttataagtacagaaaaagtcatcaaaaatactatatgaaatgtacattaaaatagtgtaacaaagtcaacaagtgagaaaataatttaagaaataaatttcatttataaaaaagcatgagtttacagggatggaagatacctaaattaataaagtgcctgcaactataaacacctaagatctcagtagccctgtaaagaagctgggtgcagtggtgcaacactgtaattctgaagaagctgggtgcagtggtgtagcactgtaatcctgaagaagctgggtgcagtggtgcaacactgtaattctgaagaagctgggtgcagtggtgcaacactgtaatcctgaagaagctgggtgcagtggtgtagcactgtaatcctgaagaagctgggtgcagtggtgtaacactgtaatcctgaagaagctgggtgcagtggtgtagcactgtaattctgaagaagctgggtgcagtggtgtaacactgtaatcctgaagaagctgggtgcagtggtgcaacactgtaatcctgaagaagctgggtgcagaggtgtagcactgtaatcctgaagaagctgggtgcagtggtgtagcactgtaatcctgaagaagctgggtgcagtggtgcaacactgtaattctgaagaagctgggtgcagtggtgtagcactgtaatcctgaagaagctgggtgcagtggtgcaacactgtaattctgaagaagctgggtgcagtggtgcaacactgtaattctgaagaagctgggtgcagcggtgtagcactgtaatcctgaagaagctgggtgcagtggtgtaacactgtaatcctgaagaagctgggtgcagtggtgtagcactgtaatcctgaagaagctgggtgtagtggtgtagcactgtaatcctgaaaaagctgggtgcactggtgtaacactgtaatcctgaagaagctgggtgcagaggtgtagcactgtaatcctgaagaagctgggtgcagtgatgtagcactgtaatcctggagctgagcaagcagaggcggctggctctctgggcaaccagagaccaagtcactgggaaaagacttggtctctaaaggcaaagtgaactgttcttcctgaggaagaactatgcgcacacatgcatgcacacctatatacaaaaaaacttaaataaatagatacacacacacacacacagagaaggaaaagtgcacatatacagatgtaagacactgaagaattctgttccaagcttcttgaaaaacttcatatttataactgccagggtattgataattacatggaaaacagaaactgacttgtcagtattcaatgaatgtgtgcgcacatgcacgtgtttgtgtgtgtgtgcatctgtgtgtgtgtcatgaaaagagcatgtttcctcttgtctcaaattctatcttattttcaataagtttgaattatgtcaattttctgcctttagaagaaaacaagtatttccccaggcaaggatcctgagtctgctataatcccttttattctgctcagcttctgcctgaaatagctgatgtcccttggtgtcccttcctggggctacacttgctgggatcatcttttctcagcttccatgtaacagttgtcagtttacaacacaacaaaacaatatttaaaaagaaccccctgagtgaggaaacagtcatacaaagcttttggaccaccaggtgaatgatctctgattgtgagctcagagactgagccagcctctctctccttcagatatctgaccttcagccatcatagtaactgagatcagagcctctaacctccactcacttaaacatggtcttgatccctttccagcccatcattctgagatttagtgccaggaagacctggcaggaagttttagaaagacaggaagacttgcctcaaagatttttattgaaagggcaggcagaccatggcaagctggagccagaatgacttaaagctggctgctcctcttgttgagaacactattatctcctaggaacgtgtgtggtctgagaaaaatatgtgagcagttttggcttggctgaaaatgatggtggaatagattcttaagaccatctttttacgctgacatttcccttctttggtcacaggagacagtagattatcccagcagctggctgttctgtgtggcagaagtgttcccggacccatccgctcaactggagaatacatgtacatccgcttcacatcagatggcagtgtcaccggagcaggcttcaacgcctcctttcaaaagagtaacatggccaagcatttgcccttttattccctcctccctcccctcccccatctccctccttcatctcccttttcctcctctcccctactcacttttctctccattatttctgtcctcttctttgtaaaaaatgtctccctctgccctctttctccttcccttccctttcccccttctatcttctccagatttctcttctccctacttcttcctcttttgatcctcccctcccctcctttccccttcctgtctctccttctattccctctccttcccactctggtgttctcttttttactttctccctaatcactcacctcatcttctcatatcaaggcacaaagtataaatcaaaagacacaggcacctgctatgacatggagcccgctactaagtcctcacacaaaccagagttatctatttgtacaagagcatctcttacactgagatatctgagtggtacctctcacttccgtgagaggtgtgctcatggtagacataagaaagaaacagttctttgagaataacttttaccctagctaagggctaggcctagaagataatactcatagtttccatcaaagaaactatggatacatgctgtctccagtttaagaaataaccagtaagtaatgatacagggtacaccttcatgaaggcctcagatgaaattaatcgacttgagtgtgatttgctcttgaaatagagacttgtttagtcagaaaatgtgtgttgtatatgaaatgctctaatgcataatagcattgagatttttcaaaacttgacagcatgtgaagtctaataacttcaaaggtaagctagattgacattaaagaaattgtctgtggaattttgagaaacagtcatgtataaataacttaattttactgtgggttcttgacctaatactgcagttaatctagcatttccttcccagtatatatgtagcaatcaaaggaaaatgatctaccttatactcagtggaagcaggctgtgcaggggttatgagagtgggcttggaattagagctgaaacaaatgtctgtctctgcagtttgacttgtgtgaagtttctgctacaagctgcctagtatctgacaatgataacataaggcctgctttatcattccctttcttcaactcatgatatcaaatatagaaatagcccatcaaatatagatgacaaataggcagagagataaatggtgataggtgtgatagatagatagatagatagatagatagatagatagatggatagatagatagatataggtaaatggaaagataggtatagataggtgataggtaaatggaaagaaagaaagaaagaaagaaagaaagaaagaaagaaagaaagaaagaaagaaagaaagaggtacatggatatatagctatatagttatagatagatgataggtagatagatagacagatagatagaagatagatagatagatagatagatagatagatagatagatagatagacagacagacacacaggtgacctgcaaagccttcccattcttacacagtatgtaggtcctctctgctccctacctaacctcaccaagctactttctgagttgctcaggctacctcatccattccgagtcccagcgatgttcctctccccatcctctcaagtcttcatacagttttctggactgagcagttttcttccccatgctcacccagtctgagcccttttcccatccagatctctactcaggtctaaccccgccccccaacttcccaagccgcagaatattactccttcatttttatttattggattcacagctttttcacatagtagacatgcgtttttaacatgtcttctgcctctgtaaagtcagcctttgtgaaagtaagtgctctttcctctgtggctcagatcttaagcaccacaccacgccgtgagtgtccaacagtgtgtactgcttcagtggttgggcctctaatcatttctttcaaatttctcatctcctgcttacattttgagaagtcccctatttgggggttggggaaaagaaaagaatagaaacctcattgtcaatattatttaaatagcttacctttctttcttcctggtaaggctgtggtggatatttgcatgcagaccgagggatcattacatcccccaagtacccagacaactaccttcccaatctcaactgctcctggcacgttctggtccagagtggtctgaccatcgccgtccattttgagcagcctttccagattcaaaacagagactcttcttgcagccagggggactacttggtggtaggtcctgcgtgttattctttgtagttactatttctacagatttaatctaaaatttttagtatgaaaattgataggaattttaatcctattttacagcataaaggatgttatacaattttaatgtctttctagctaagaaatggaccagataaccactctccaccattgggaccctctggaggaaatggtcgtttctgtggaatttatactccatcaactctcttcacctcagacaatgaaatgtttattcagttcatctctgataatagtaacggtggacaaggatttaagatcagatatgaggcaaagagtttaggtaagcacttaccctgagaattatatctgtattttccctgagattgtttggcgctgggattttagaaaacaaatacaaagctttctgaggtaaaagtcacaggtgtgaagtacagctgcctgtgatctaggacttagagcacactttggacaacagctattcagcatggggcttcttaaagaatgtattattctttctactttaaaggttagcagaatgaggctttgaggtttccatgttactgtttgtttcgttttctagttaatggtgaaagtgaattttccatcggtagcaaatgaactgatttaaaagggccccggagtcctttagtttttccatgaggaaatgtctaagttaaacctagtgacagtagcatggtaagggctgggactgctctgtacagcactgctgcgtttttgctttatagggaacactaacctatggtcctattattacttatttaattattgctcatctcattatatttcagtggcaaactttatgcaaagagccttacttatgtttaattatgattgtatttgattctattgcagtgatttgttttttttttttttgtggcatttactttctaacattatttaactaaaagtcagcggagagtaagcagcagaactaaatctctacttgttcccccaaattcaatattatgtgaccttaatcccagattctcgaatatgcatcaaaaggtatattgatcttagtaaagctgtggaggtttgctgttgttgccattgctcctgctgctgttgtttgaaatcaggtccgctatagcccaaggtagcctggaatgcactgtgtagttgaaggtgaccttgagtcccttatcctcctgttttggcatcccaaacgctggaattctaagtatgtccctccatgcccaacggaaaccgtgttataatatatatgatctcaaatgtgagagaattcagaatgtcatttcttcacctggaaaaaggaaacaaaaacctctattaatcaattattccccaaaccacttattggcttgagcaaggcccaagataagcagtgtgtttagtcacctcttagtgcattgaactcaggccctcaggagctgttagcagctctgagggcagctgtctgtgccactgatggagattggcaacttctctggcatccctgtcctcatgctggcatccacagtgactttgaacaggctggtttgccctccttcaagacccactttcctactttgttaatgcctggatcaatcttaactcagtgatagttcagatgtacctaagtatattttctttttagttcctttctaggcccaccagtcatgcatggccactatcatctctctgtcttttctcacacatatgactacccttaatattaaaatcaaacaaaggttttttgattttataagctatcttagggcagccataagcaatatgattgtgcttatctcttctttcttgctaagcaagacttctccctggatctcttcctttggtatctacctcataccatttccatgtcttcaattatcttctgagtgaatagctcttggcatcacttgctgagctttataccatatttctttctgactatagctgattgagatttctgtggtcctgtgctagatgtcttctattctattggcttgttaattagttaggtaaacatttataaagaactttatactacacccactaccttcttttttaaaaaaattttattaggtattttcttcatttacatttccagtgctatcccaaaagtcccccataccctccccccccaactcccctacccacccactcccacttcttggccctggcattcccctgtactggggaatataaagtttgcacgaccaatgagcctcataatcagcctccaaacgctgacaccattgcatacactagcaagattttgctgacaggaccctgatatagctgtctcttgtgagactatgccggggcctagcaaaaacagaagtggatgctcacagtcagctattggatgggttacacggcccccaatggaggagctagagaaagcacccactaccttctttaaaagcatccctctggacatcatctatctctcttatctatctatctatctctctatctctctatctatctatctatctatctatctatctatctatctatctatctctaatacctatcatctatctgtctgtctatctctatctctcttacctctgtcttattcattctgtcttgttcattctctctttctcctggtctgtctgtctgtctgcctgtctgtctctatatctctctcatgaccctactccgagactgccttttgctctattccctcccccaataaacctcttgccttagatctgttgtgtggcatggtagctgcacaccttggccccagatcctttctgactttaccccgacaaacacagtaacactatcatgaagcttttgtagtaccagcacaaaagaaagtcataggtcaaggcacttttcaaatgcattgctggacacaataggcaaatagtttataataaagcaaggacatctctattggcctttgatgctaatgatgacattcttagccattgggtttaaagctagggatctattagtatatatcacaaggatttacctaatagtcatgaaaatggatgctagatcaaacacattggaacaacaaaggactattaaggaaagctaaatatagcccaagactgcaacaatcctttctataatcctgaaagttctaatcagttaattctccttgtagaacatcagctcacatgttcatgtgttgctgaaatatgctttgtacaatcatcattttgttagctttaatgaaaaaaaatccaccggaatagataatttggatatcagcatggtgctaagtgtttataatcctagctcatgggaggtagctgtaagaggattaacaattcaaggtagcctcaataacatagaccagtgaggctcatccaaggctgcctcaaaaacaaacaaacaaacaaacaaacaaacaaacaaacaggctggagagatgggtagtggttaagaaaattagctacactggctgcttttcgagacccaggtttaattcctagcactcatttggcagctcacatctgtctataactccatttctaagggattggatgctttcttctgacctcaaatggcactagacatgcatgtggtgcacagacatacatgtaggcaaaacactcatacaagtaaggtaaaagtaaaattaagttaaaaagtaaaataaaattaaaaacaaacaagcaaacaacactcccctcctacacacacattttaaagcgaagcacctgacctaacaaaaggcagaacagatttatttgacagaataaaaaaggacatacatggtagctccttttcttaggaaattcaggatttatttgcttaaaaagaacatgaagataattctgatgaaaggaagttgggagggaaaatacagaaaaagtgatggtagagactgtggtagctatgtcctcattcaccagactgcagattgatttgattgtttcttgacagcctgcgggggtactatctacatccatgatgctaactctgatggatacgtgacctcccccaactaccctgccaattatccccagcatgctgaatgcatttggatcttagaggcaccttcagggagaagcatacagctccaatttgaagatcaattcaatattgaagaaacacccaagtaggtcacctccattttaatgttcctccaacccaaagttaatatttttttaactgtcatgtctcaagacagtttatttcctctctgctcagcagtacctgctgcccagaaaaatgtagggacaaagagatgagttaatgcctgaagcctcaaagccttgcctgatagctgttgccaccagctacatagattatgtgtgcaggtttctgtcttcaccctcaacacatcctccaagaaacactgggagtgatggtttgagatttatgtcatttgttcttcctctcacaggaaaaatacaatctctcttagatgagagtattttcggtctagctgcatattccgtgtcacagatgataaatgtatctgcttaacaaataagaattcgtgtggtggggccatagaggccaccagtgcccccaaacaggactgaagcaatcactctgcaatgtcccagtcttggttgcatcaggattcttgaaagatcatgattcacacagcatgtgtgactgtgctgaaaaccaaggaaactacatagtctgtgaaaccaaagcaaaactaaaagccgaagctcacatctatattatcttctttatcacttgtctgaaacatccctgtatttgtgtgaatagatgatggcacagcagagcttctgctcagcaggttttgataccaaatatgatatgataccaaataagtatggatggtctggttcaacttcattaggaaacattagtaaaggcttgtcctctaatagtcacagtcatggaacttctaagagaggttgatctttcgcctatggagtatattcaattatcatgtctgacaaattctactctagctaaatccatagttcatctgaaatgacttttatgtttctaaggcaaacacagaacaaggaaggaactatctccaaaggtaaacgctgtctgcatcagtcattcatggatagatgtattgtcattagacaaatgtatgacatttaaaaacacctggaagctttatgagactcactcatgttctcttatcatccagaaatgataattaagtaatgtccttaaagaaagaagtcttttattaacaaaataagtaaaaaaaagaacagtttttaaaagtttgatcatttctttctgctagctgttctgcaagctatcttgagttgcgtgatggagccaactcaaatgcacctgtgctttccaaattgtgtgggcacactttgcctcgaaactgggtatcctcaagaggactaatgtacttgaaatttcatactgaaggtggttccggctacatggggttcaaggctaagtattctataggtaatacatatatttttttaatcaggaaagaagtgattcaggggagcactacaggtttgactaggggagcactacaggtttgactaggggagcactacaggtttgactacaccataccttccatctgcctactttaagattaggacgaagaatgccatgtattaacgcacaaagttgctaccaattttgttattttatattatgctaaatgcaatttttactaaaacattagtattgtatattgtccatttgtgtataaaagtattttcagttgtatcaattttttgtttcattctcttaccatgaaataattacaatatacttacaaatgataaaattccttagtgatacaacaactcatttgagtaacgacttggaatattgtacagcatccatagaatggtcagaccttttccttctgaatctccaatgccaagccagtcattcaatgaaaagcacattgttcccttggagtttgattcctttattttaaaaaaaatgagctataaacagataatattgaagatttgctccaagtatataataccacatattgcatataatttagtgtctcatgggtctgaacactctcaaaacaaatatacaaatcagcaaaaattcagaaagtctagtttaacagtatgtaatctatacagtttaccttttagccaaagttaaattgtacataggttaatctagctatcacatccatatgataaacaataatgtaatagtattttcaagccctaatagagtatttactaaaatgcaatgtgtacttagtagttaatctagagtggtagatatttgcttttgccagccaaccactgtgcccactccagaggagtgtggaccgtgtttgggatcatcatcagaagctaccaagccttcccattctgccagttgcttcctggatggaatttacatacaagcaatagctcttacatcctgcccctagagaatgaatgtggcattacagaatatgacattccacagttgtcttccatttcccattactagataggcttacggtatctttctttccacccataacagattccaaataattaggaaaactttaatcaacattttcagattgtacaacttctttcaatattcactaggctcctaaaagttttaaattatcctggattaatcagaaaaagaattcataatagaatataatttgtgtatgtgtgtgtgtttgtgtatgttgtagtttcgtgcggaggaactgtctcaggggacagtggggtcatcgagagcgttggttacccaacccgtctatatgcaaacaacgtgttttgtcagtggcatatccaaggcctcccaggacactatctcactatccgttttgaagattttaaccttcagagctcccctggttgtgcaaaagactttgtggagatctgggagaatcatacctctggtcagtgaagtactgctttctttttttttttttcattttttttattaggtatttagctcatttacatttccaatgctatccaaaagtcccccatacctccccctactcccctacccacccactccccctttttggccctggcattcccctgtactggggcatataaagtttgcaagtccaatggacctctctttgcagtgatggccgactaggccatcttttgatacatatgcagctagagacaagaggtggaacaacaatatgaactaagaaatactgctttctttgtgggtgtttacttcttaatttatccagtctcagaagcatcttcacttctgataaaggcaaaagtttgactgatatctttgaaatgtagatttcatgggctctgggcaagatcagtagttgttctctttatgattctagtggatcacaatggatgctcagtatcccagtagccattctatggccatcttggagagcacactgaaagagccttgcattgagaaggcatcctcttcctatggagacctctcagtgccacatgtggatactggaggagcctcctgaaacataagtagagggaagggcagtggatcccatgttacagtagaagaggcacttggatcatttctttaaccatgtgagcaagccttcctcaactggctgagatagatttaccctaattggttcccctatttatacatctgcatatatttgaatatattgatgtttgttcatgattttctcagcagtggttgccatttcttcattgacaaaagatggcctcataaatttggttttctttgtccatgcaaaacagtttaagtaaagattaacaaaaaatcaatcacccaggcatatgcataactaattatttgactcttacaggtattttgctggggagatactgtggaaactccattcctagcagtgttgacacttctagcaatgttgcttcaatcaggtttgtcacagatggctctgtcactgactcaggatttaggctgcaatttaagtccagcagagaaggtaagttcaatgacttgttagaagtggtactgatctgttacacaggatatacactatgcatggtactctcatggcaatgatgtgaaaaagaaaatgtgatgctctcttcttggctcttacaagataaaaggcaatgctaataaacactcaccaactaatgaaaagttgccactcggaataaaagccaaaaggaagtaacatgtatcatgggagctgcagagagccttgcctgcaaggcccattttgaaaacaatagtccattataatgccctagagctatcaagaactcacattcctaaatgccctgacagaccagggtcaaataaaaatcttgtctaaaatacatagtaatgattttagttttcctaagtttgctatgtttttttgtcttttatatatattctgggccctgataattatttaaatgttgccagtgaactgttttctatggaagaaaatgttaaatattgatagagacaagagttgaataccaatatagatataagaagtcaagattgaatatagatgagcactctcatacatgtggaaacaaaaattatgaccaataactttttctagatgggtcattaaaaactaattttaaatgcagaaagatattttgactaaatgcttttctttctgtctttcagtgtgtggtggggatttacatggccctactggcacatttacttctcccaactacccaaacccaaatcctcatcccaggatctgtgagtggacgatcaatgtacacgaaggaaggcagattatcctcacttttaccaatttgaggctaagtacccagcaatcctgcaacactgagcacctcattgtaagtgttccctggaggctgggctctgtgttctattgagtatgggatgtgttcacacagacgtggtagtatgaaaactcagtcaaactattaccacctatgcaaattcacacaaattcagagtattttagacagaaggaaatcaccataaacttctttcagagactgacatcaataattgcatgcacccaggttatatgttggtttagttttcagaacaaagcattattttttatatttatatatttattatttattggttattttattatttacatttcaaatgtcatcccctttctcagtttcccctccaaaaactccctctcccatatcccctcccccttgcttctatgagggtgctcccccacccctacctcctctctgctcctgtgacccagccaccctaatctctcttctgtcccttgattatgtgcagtgctccaacatcatgccttaactgctgatatgacctccatctagactgtccctcccaagatggctgcctagttatcttttcatgtcccttagacctccactctagtgactgacccccaccacctcattataggaccctaaatgaagcaagccccccttgacctgttccttcatgtgttgtcatttcacagtacttcacaccagcttactgagagcgagaactagtttcctttggtgaatcctagtggtctatattcttggagataagggtttgatgaatgaattggggaaataacatgattacctttttttaaaaaaaaaagctatttttgttgtcagtttagttgtctgctgctcaatccgaaatcccaaattaatgtttgcaatttattttgacatcccatgacatcccctcatcacttgcaagtacctcaacatggccttatttagctttccgattattgtctcaggtctagtatctgaagtactgaaatgtttcccccagatactcagtatagaaccactgtggttttcttacatttgagagccagagaatgctgggtgatgttcctgttttctcttttcctcctccttcttaatgcaactactctgggactctaatcccttctaagcatttacattattgtttctagctaacatttcctattttgcacctctttagttcgttttgggtctcatctagccatgtcccactataaaaactgagaaattagcttcctcccttgagaagtgcacacagggaattcagagtacacatattctgtccacttccctgtttcagtcacacatgtcacagtttccatgattggtccacttgggtgattgtggaaactacattcaggctaagccaggcagtatgctgtgcccacgtttccatttgctttttcaaataacaataacagttgtactatttttagattctatagatgttagtcacgaatttttctacatatcttccatcaaagacatgcatgtctatttttgtcaccagtatccctgtccatctgcagcaagccatctgggaaccattgttttgggattttcctgccccattgtgtctgtagtctcttcattgcattctggactggccagctggctccatgatgctgtacatttcctttcttagtcaatttcctgttttcactgaggtacatgctcttgtaactctctaaggacacgaatatgtacagcaacctttgagtacctataagatttctgctttactagaatcatttgaatgtacatatttaaactattatagaatcataatttgaagtttcatgtagtttctttcagtttgcatctctatttacattggtctctgaatttcacattggatgtttccttagagtcctggttgttcttcattcacgttttaaaaatctgtgaaaaagctgattgggagctctgtgtacatgcctgagcctggaaactggcatttgtggaagtacctaagacagacctttacttatatttattttcaaatatcatggcttcagatcttttctcacggggaggatgaaactccatcaaggaatcattttgggaattcatttctgtaggaggttgtttaaattccattttttaaatcatttttatgcattggtgtttactttcctcctctacactccaaacaagtgcaggaattagtgtttacccaccctctgtgtacttgaatgcttgtccgaaaagagggaaacaaagcccaagatctacaggcagcatggctgagctctgagcatcctgttacttgctgaacaccacacccagctggactgtgtttgaaattcctacaaacccagcaaccaatctgatggccaagatggaggaaaggaaaggctgcaccacacagcatatggggtcatgagacaaatgtccaaatttgttccacgtcatagcaattcttaaatattgactgccatgtgtctgctcccatcttatgtcttctgaggcttgtagtttctgactacagaagatcttaggagatatgaggtcacactctggttgcttctaaacacagaaagaagtccatacactaactggttgactgcacatggtttactcattacaattctatgctacccctacctaaagatgcagaaagaggcagtagagaccattgttcattgcctccaacacagccttgttgcttataaattcttttgattctgagaacacattacccattcttgtttatagtagcatgaaatatgcattgtcttctcttgctttgccttgtgggaaatttggatccaaattcaattattcctagttcttggattttaacagactgtaaatctttgtagtgtactgtctgcatttggaaaacggagtcctactgaaaaaccaagtaggtaattagcagagtctgggttcgtatctgcacaagaagtgatggggacatttcctgtgttcctgtaactagaaggcattttaaaccagaaaccaccaagcagctgagttcagtcattaattactgtaaatgaaaatgcttgcatccctgggagtacagcatgtcctacttcaaccaagcttttagtgctattatatccaatagtgatccattcaaatcctttttaaaaataggaatatcaatcaccaagtgagttgctatttatttcttagaattgtttctgcattctgaaaagtgttcacaagccttgtgcagaagcactcactcttcactagtcataactcaagcaattaattgtattttgatgccagtaataacacagtttttaaaagccagatgagtatgagcacacaaattggttgtccagcaccaaacagaatgtcctgaaaacatatacaaggaacgttatacagactcaacgagtgatatttaagaatgtatacatacatacatacatacatatatgcatgcaataacaattagtaaagaaaaaggaggccatgaaaatggggagttgggagggctctaagagagggttcacagggccaaagaggaggaagaactgttataattctattataatctcaaatacaaaaagttaagtcaaatgattaagaatgtagaagctttaaatccataaataattaagaaagagccattatagttacacaaaaatagattttttttccttaagttacttttcaaggagcactggctcagtggttaagaacatgtaccaattttgcagaggatggagctaagctcccagtacacacattggacatagcgacaactgttgctccagctccaggtaatcccaatgtctctggcctcctggcctcctggcctccgcaagcacctgtgttgacatgcacatggccataccaagatacgcacaagcacacctaattaaaagcagcaaagtaaaaccacttaacagtacttttcaaggtatttagaatgactacatacacttggaatagcctaatactaacattttcatttcatgtgttacagcttccaaggcacaactaagaaaatccacagagtctgtgaactctgtgaagtataaagaaggctatgccggggcctagcaaacatagaagtggatgctcacagtcagctagtggatgggtcacatggcccccaatggaagagctagagaaagtacccaaagagctaaggggaactgcaaccctataggtggaacaacaatatgaactaaccagtacccaggagctcttgtctctagctgcatatgtatcaaaagatggcctaatcagccatcactggaaagagaggccctttggactaacaaactttatatgccccagtacaggggaacgccagggccaaaaagggggagtgggagggtaggggatcgggggggggtgagtatgggggacttttgggatagaattggaaatgtaaacgaggaaaatacctaatataaaaaataaatttaaaaaaaaaagaaggcacagtggcatgtttacctcagacatagagcagggtctccacttgcaaactgtgcagcagcctctccctgtcacacataagaggaggacatacttccaattttttcatttgctcaacattgattctaaggctgaaaataacactcagtgtggctctgtggcttgtggtcctgggagaggtgtctgtgtaccaagtgactatggtctctttagaaggacatgagtctgggctgagaatgctcatcccctgagggatgttcagtaaggtgggcagcatagctacaagtcaaactatttttctaacaggtattcaatggcattagaaacaactctccccgactacagaaactgtgcagccgtgtgaatgtgaccaatgagttcaaatcttcaggaaacacgatgaaagtgatatttttcactgatggctcccggccatatggaggcttcactgcttcctacacctccagtgaagatgcaggtaatgtaggatgctgcaaactcacctcctctgggtcagactcattcagtatccccataaacactaccccaagcagccaagccttttgttttctctgtagtgatcaaaagtatacccacaatcttcaacacaagagcaacatctaccacaaatagaacatctgtttgggggatacaggatcagggaggaggagaaatcattgtagtttcaggggggaaacccttgcattttgattttttaaaaaaaatatttatttatttatttatttatttattcattcacttatttatttatttatttattgtatatgcatatgctgttgttcgcttcagacacaccagaagagggcattggatcccattacagatggttgtgaaccaccatgtggttattgggagttgacctcaggacctctggaagtgctcttaaccactgagctgtttctccagtcattgacttttatttttttacaacaaaagtttattagattattttctagcacgattccatgtaaagacactgctaggagtgactctgaacccaccctagctgattcattattttgtgttagagaaaacatttatcttctagttaacttattaccaaagattaattaatttcaaacaaaactgaatacacgtcattatttttgttcatctgcttatatgtatattttcagtgaaaataataaaggggttgcatttaatacagattatccccaaattaagcaacatgcagcctggatttaaagtctcctcttccttttagggctgctggtattttctaagggttttatatctcaggaagaatgaaaataaacacatctttacatttttaaaatttattttattggtataacagacatttgttaccatattaaaaatagtgggtttgtcaacactttagtgttacagtatctatttgatgcagataaattgttgaaccaaatgggaaattgttcatgaaaagccactaggacctagcagcagtttgtgtatttttctaaattatgtattaaatgagtaatatgtccagttttggagaaactgatgcacagtcaaaccacagccatcttcaccattccagaagggaaataaaggaactttgtcttgtgtatttttccttcataaacccaaaggcatttctcctatagtttttatgttctactagcctgactacacctagaagagccaatcaacacgtttattctgtcactcattgtgcctcgattgttggagttgtctgttataacatggctcttactgctttttctctgccttttgttgccttagtgtgtggtggaactcttccaagtgtctctggtggaaacttttcttctcctggctataatggaatccgtgattacgcgagaaatctagactgtgaatggactctcagtaatccaaatcgggaaaattcatccataagtatccattttctaggactttccctcgaaagtcatcaagactgtacatttgatgtcctcgagtttcgagtaggttagttcaatgaaataacacgctttctcatttatgtgcatagtcttcttattcttggacaacagcaggagtcaaatggctactatttcagtacagaagatacaaaggagctttgtcagtacaatgctgaaatcctgtgttcccatataggaagcatgacctatgaactatgagtgaagcaggtccttagcaaggaaagcctcctgtctcaggtttcctgtatgggaggttcactcgagtttggttctggagagtctctgtcttatcagtgtgctccactggtcctacgagactaagctcagtgtggtcagactgccagtagttcccagaaccagaaggattcacagaaggtggttcaattctttttaggccttagaagtttaaaaaccctccacagcataccaatgaagagaagcacatggggctatttgggaaattatcctcaaagacatctttcatctttttttcatgatacaaaaggatcaaggcatcactgatgaaccaagcttctcctaagatttaaaaacaaaaacaaaaacacaactctgtgttcatgaacagttgattctagctctttcttacagttcaggcatagttgatctaactctgctgtccccattgtcaccctgttgacataagtatgttcacagaacataagtatgtagacaacagatgaagaaagtattataggtgacctatactgtcaaatgatggttgcattctccttaatccccaattctaaagaaaagaaggatgaaagcaaaatggggcagacagctgtaataatcagtagtggctgcctgtttttattattgtcatttggttattgttaacatcttttattttaggggagttatttttcaaagacctcccataaacttttggatggtagagactaggataaaatacagaggagataaacagtcttaatgtgactatgtaaatgctattaaatagcaagttagaatcatttgtgtctatgcagaaagtaatattttaatatcatatgtagtgtttataatattgtagtgttgtcaggctatgtagcaagtttaagaaatcaaaaaggttaaagaatgtatttcacctctaaaaatttaaagataatttccattcagccttcatagcagccccacaccaaggccaaaattgagaagacctgtccagttagttacccatggtcccttttgagaacatagaagacagagtttttattaagggctttgatatgatatgatgtggtaacagatcagggatttttgcaagagaattctcccagctctctgaggcaaatgcgtctgaaagtggccatggccgttagagaatgctctccatgaaatgccataccattcatggaaataaggagaatggctgtatattcaattttagtcggttacattcaatttcctctttattcctcctgatttacagacagatagtagaaatactcttccattgatttataaggtcaggggtgttcttctgacaggataaattgggagcagataaatatgcactctccaggaactctgcaaatattaatcatatttccgtgagaagcgattgtcatgaaacctattcaactccgcactgacaggtcttggcctatgtgccaagtgttctgttcatgttagatgatcaaaggcaaagaagactcttaagcagcttaggcaattatcacctctctcctaagagcatacttatttattatcactgtcagcattacatttcttcctcctttacaaagcacacagctgaagggagtattaagttggtttcaactctgcttagatatgtgaaagtatgtatgaagacccaagctggaacaaactggcactgataataaaggtgtttctacatccaaacaacatgtctgagaactctgtccagtgcaattggcaatgattatataggaatttttttaaatgcctgctactgtaccaggattgaaataaatcaagaagtgctttttcttattgttattatttggtcctgttaatttaagatatttgtccaaaccctgtaaccatgtcacttgctatactgttttgttcaggtaatgctgatggacccctaatagagaagttttgcagcctgtcagcaccaagagtgcccttggtcatcccctaccctcaggtgtggatacattttgtcagcaatgaacgtgtagaatatactggattctacgtagagtattcctttacaagtaagctctgaaacataccacatatagatatatagatttacatctaggtatataatggtttcatttttaatttcaatgaaaatttccaggttaaatttttaaccagttgttactgataccaagaaaagaattttatggttttttatatattttcctttattctggagaccccactatattcttatggttttaatactttgattctcgttcatttctttgtgtagacaattctgtcttcttcaaactgctttcttttcattttgttttatatggtttggtttagttcctaagtttggtcaacttgcattgacatattttctcttgtaaaccaatcttgaattttaggataaattctacatggtcacagtttatgttttattcagattactgaatattacttataatttgtgttggatatacatgtgtgatattcagagtttatatgtagaagttcaatcccaggtaggtaacacaacttcttgtcttggttcacagatgatttttttttctggcccctttcactaacatggtaattctctcagatttgtgaaaatgttcccttgtgtgaaagtctgaagttatacctcctgtatctgccttgtctccagaacattagttcccaccctaagcccatgtcttgggtttgttttttctatttatgtatgtatgtatgtatgtatgtatgtatgtatgtatgtatgtatctaatgtatatgagtatgctgtagctgtcttcagacacaccagaacaaggcattggatcccattacagatggttgtgagccaccatgtggctgttggtaattgaattcagggcgtctggaagagtagtcagtgctcttaatagctgagccatctctgcagccccccatgtcttagtcttaactgtcttagtcagccacactttctgtttggcactgctcctctgtgtttgagtgcatttcttgtttacagatttttagaaacccactcttctctctgttgagtttgactgtgatcaacatgttttgctatagttttgtatattgttatctgtgttataacaaaattcatggttgaaggagggaataagctcaaacataatattcatgggcaaacctttcatccatctgttgtttttcatcctattggaagaagaattgggcaaagaaacaatgttgtttatattgaacagcagatcatatgattatacagacctgtaccatcttttcaacctgctataattatctaccctttgaaacccaagcacttgttatgaaatgatgatatatttgattgtggggcagatcatttcttcagggtacctatagtctcacggtctggtgttctcaagaaaagtaatgttatttatactttctatagcacattcttagctacataatatggataattagtctccatatacagtaaagacaatctcctttatcctgttaagttgaggctctctttactgtggaaatctgtttgatgtacaccatttgggagtcagttcatttgctcctgttctagccaactttgatcttgctcaggtttgggttcatgattgattgcttgactgatcatatttttaccagaaagtttgataataataattaagaattgtgtcagctctgtgagatttttcttctctcttattagaggtttataaatctaatttcagactgtggtggaatacagacaggtgagaatggagtgatctcaagtcctaactatccaaacttgtacagcagatggacccaatgttcatggctactagaagccccagaaggacataccatcactgtgagttcttacaactgggttaaatgttgacaggactgaatcagggaaatggtgtgtgtgtgtgtgtgtgtgtgtgtgtgtgtgtgtgtgtgtgtgtgtgtgtatgtgtgtgtgtgtgtgtgcatgagtgtgttgtgaaagtacatgtatatgtaagtgtgcaagagtgtataagagtgtgagtgtgtgagtgtatgtgtgagtgagtgggtgtgtgcatgcatgtgcatgtgtgtatgagtgtatgtgtatgtgagtgtgtgtgaatgggtaagagtgtaagtgtatatgtatttatgagtgtgtgagagtatatgtatttatgagtgtgtgagagtagaagagtgttaaagaatgtgagtgtatgagtgtatatgtgtgtgatatgaatgtgtgtatgagtgtatgtttatgtgagtgtgtgtgaatgcatagattgtgagtgtatgtgtggttatgagtgtgtgtcagtgtaagaatatgtaagaatgtgagtgttttgtgtgagagttggtgtgtgcatgcatgtgcatgtgtgcgtatgtgtatgtgagtgtgtgtgaatgggtaaaagtgtgagggtatgtgtctttaagagtgtttgcaaaagtgtgtaagagtgtgtgagcatatgtgtgtgtgagagtgagtgtgtgcatgcatgccatgagtgtgtgtatgtatgtttgtacctgtatatgtaagcaaccagactttgcatttataatcaaatatatttttctataaaattctttgtttaaagtacatatttttctctacaattaatgtgaagaatgttatctttttcattactaaaaattagtagaagataatttagcctccaggaaagagatggattcagtaatgacaggagctgtcgttttagcctaaatgactgcacttcttggacaaaactaaactatttttaaatttacaagagaacttttaataaggaaaacagtgtgggcatgagagaatgaaagaaccagaaatagaaaaccatctgacttacaaggaaatcaaatcttctgtagaaaacttgctgcctggaggcagggtgactccttttagggtgactccttttagggtgactccttttagggtgactccgtttcagctcatggggactcatcatgccttttctcttctgcagctcacatttagtgactttagtgtggagaaccatccaacttgcacgtcagactcggtcactgtcaggaatggtgactcccctggatcacccatcataggacgatactgtggacagtcagtccctgggccaatacagtctggttccaaccagcttgtagtaacctttaacacaaacaatcaagggcaaagtcgtggattttatgcaacatggaacacaaacactttaggtaaaaagaaaaaatatatcttctctatacttaaccttctttttttttcagtgagacattttttttcttaactagtttaaagtatagccattcctgaagaggagtgggttccaggactccactcagtacccaaatctacgagtgctaaagtttcttgtgcaaaatgatgtagtacttgtgtgtaatgtatgaatgtcctccagaaaacattctctctctagattatttgtaatccataatatatatatgtgtgtatatatatatacacatacatatatgatgtatatagtcgcaacatatcatattgtccaggagacaatgataagagacaaacagtcttactctcagaaaacaggaaggatgttcaaagagttaagacagggtctatattatgaagagtcttgattgatgaattgccccctggagatatggcatgttaatgagtagtttgaggagatatggcatgttaatgagaagtttgagggtaaaaacagatatacttagtgttttagaataaaaataaaatctgctatggattctgaatcaaaagaagacaagggatgtgattttttaaagtagcatcgtacctatgaaatatgaatattatgaaaggtctcagaaactataggtgcttgtattggatagttatccaggatgttagtaaatcctaaccatccaaggacaattcttcatcccagagttggttaagatgaagatctctatagaatgagtccaactcctccttaaaccattagctttccctgagttcaccatagagaagaaccgttggctccagagcaaaagatcatgcaatgccccttaatttaatttcattctgttctaaattcatatttttctttgttatctcttaggtatatgttttaagcttatgaaaatcatcctagacttttctttctttatatccctacgagttattccgaactataaatgagtttcaatatgaatgagcaagactattaagtaggaggagcttctcaagttttttttttttttttttaacattttctttagttcagtgtggtaaactgaaatatcaaaggctcatagaagtgtactctcatgtgttagtgttaagaaaatgcagagtgagtgtagtctggctaccttcctactacacagtcttaaagtagaaaaggttgattgcttggagcagaatgggagcagactatctactatgatttgaaggctcagatcgaatgacttcagatgggttaagtgtgggcataccaaaatggtgatagtcatccatttaaagcccttcacataatgggctcctgcttattccatgcccccaaaatgagtcagatataagaaaagatgagttgtgatctcacatgtagaaatgttctctagccatctttggtttccaaagttgatattttatcttgaagactgatttttttttccttatggaaaatttccaggttgtggtggaacacttcactcagataatggtacaatcaaatctcctcattggcctcagacattcccagaaaacagcagatgttcctggacagctgtcactcatgaaagtaaacactgggagattagctttgacagcaatttccgaatccccagcagtgacagccagtgtcggaacagctttgtgaaggttggtgcacacctttgtttaactcgttttgtgaatggaagcattttggctatagagaactggaagacatttctcaaagagaagagggtacagttttgttgcttgaattgtttagatgtaaaatgaagaaacctcagctttagaaagtaaggtttgaaccctggagtacacactgtcctgtagccttccatctgatgatcagggcagagcaactaaattaaggacattttcctctgaccttcttaaattgtcatgagcattggtggatggtttctcctttcctttttcaattcttccttctctccttcccctccatccttgctctttctctttctgttcctatttttgtcttcctatccaaaaggaagttcagtacaaatagtatacggtttcatcacaaggcaaatttaacatatgctatgaaaattacaggaggttggagtagctaattctggacattgagagtctcaatggtaaaacaaccatgaaagaccctcttaaaaatgatggcaaacaggaaggtagacaggcagctatcctctggagcagcttctctgctcactcaacattgattggcactttccacttacatgaccataactgtattgtaagttcactttagctgtgctatcttgcatatagtctcatggggagactatgccttttagtggagagaccaataggctcaagtgccatttgcagggaatatattcatctctttcatacttaacacccacatgtatttttatgattcaatttaatattttggctctaactataaaatgaagagattgatccctacttcagtagagttgttttaaacattagaagtaatatgccataatcacataaatactacctagtactttggaatataaaagttgcctaatgaatgtaaatgtccttttaaaaatcagtgttatgatttcatattatctcccaaattgttttatattacattgatctattcttcctatttaaatgaaactctaatacttacaaaatatgcacataataaaataggtttaatatacacccctcatttgcattttcccatgaagtaagagagctctcttttcacaagacagtcaccacagtgcagaagcttcagcgaagtcttcttagtttctgaatgggaaaaagttaatctaagaaaccaacttgggatcacagaagttcctctgacagtgtcatataagcccagggccaacccaagttgagatcaattagtaatattgccaaaataagtaacagaagaaacactcttactgagtgtgagacttctcattggcaagattataactgtgttatgaagctcttttttattccaaaggatacttctgtatagatggaagtcatgagtaaaggacccagggataacaaactctgtggagtgagcaggtccttggtgactttgagtcagagtctattttctttgtagagacaataggaaaggtagagagaatggtcaaagtccaaaacccttctttgttctaaaaatcagagattctgatccccttttagggtactagtagggaaatactactcaatactttctctttgatggagaaaagcacagaggtgaaaacacatggctggaactatatagacctaggaagtattaactagtctaggtaggactgactttacatacatataaccctagcatttaaggggtagaggtatcctttcatcttcactccaaactttgtctctgaaactccttccatgggtattttgttccctgttctaaggaggaatgaaatatccacacgttcatcttccttcttcttgattttcttgtgttttgcaaattgtatcttgggtattctaagtttctgggctaatatccacttatcagtgagtgcatatctagtgactaattttgtgattgggttacctcactaaggatgatatccttcagatccatccatttgcccaagaatttcatgaattcattgtttttaatagctgagcagtactccattgtgtaaatgtaccatattttctgtatccattcctctgttgagggtcatctgggttctttccagcttctggccattataaataaggctgctatgaacatagtagagcatgtgtccttattaccagttggaacatcttctgggtatatgcccaggagaggtattgctggatcttccggtagtactatgtccaattttctgaggaaccaccagactgacttccagagtggttgtacaagcttgcaatcctaccagcaatggaggagtgttcctctttctccacatcctcgctagcatctgctgtcacctgaatttctgatcttagccattctgactggtgtgaggtggaatctcaaggttgttttgatttgcatttccctgatgactaaggatgttgaacattttttcaggtgcttctcagccatcccataatcagccaccaaacccagacactattgcatacgccagcaagattttgctgaaaggaccttgatatagctgtctcatgtgaggctatgccagtgcctggcaaatacagaagtagatgctcacaatcatctataggatggaacataggaccccccaatggaggagctagagaatgtacccaaggagctgaaggggtctacaaccctataggtggaacaacaatatgaactaaccagtaccccccagagctcatgtctctagctgcatatatagcagaagatggcctagtcagccatcattgggaagagagacccctaggtcttgcaaactttatatgccccaataaaggggaatgctagggccaagaagtgggagtgggtgcgtaagggagcagggcggagggagggtatagggaacttttgggatagcattttaagtgtaaataaagaaaatatctaattaaaaatagttcaaacccttaaaaaaaaaaaagaggtagaggcaggaggacgagggtgccaactcactcttggtgacgtaagaagtttgaggacagcctgatccatatgagacactgtctcaaaaaataaaaggaaggaaatgtaagtaacatcccagaagtcccataaaaactaaggtgaaaaaaagtataccacagatcttcagaaaatccacttcccattagaaacagagcccaggaatatgtgcaagactatgcactgaacataaaccatgacattgttctggaataaagcaaggaaataggactcatagccaactaacttaaaaaaataatatacttagatcacataaagaggatacttatttaatcttatgggctttttattgaatatagttattttcaagcctaaacatggtaaaatattgacaggtgaaaactgttagtactaagtcatattttgaccccaacaggtctgggaaggaatgttagagaccaacgatgccctgttagccacaagctgtgggaatgtggctccaagtcccattgtcacattaggaaacattttcactgctgtcttccaatctgaggagatgccagcccagggcttctctgcatccttcattagccgtaagtaatctacactgttgaggaaggatggggaatagcggaagagccacatcaagattggcttgatagggaagaaacattggaaagccaactcatgctgaaggaatatccttcctttatagttagtgagatacaggcatggctgtccatgcctgcatcttcataaggcaaaggcagggaaaattggaatgtgaaattagttcagaggttgtcatctgtgttctttctttacgtgaactatatttaatctttgataatttatcttcttaaaacattatgagatttgaagtgtattgtgtggcaaaatatctactacttagcatcctcatgatattctaaaatgtttttattttgtgcacatgttgacttagggatcaaagactccttctcttagtgctcttcttccatttgaagtctcgagtatctctagagacttcataaaatggaagtcatatctttttatgaaataggcactacagacgataatgaatatcctgatgatagtttttattctcctgtaggttgtggacgtacattcaatagctctacaggtgacatcgtctctccaaacttcccaaagcactatgacaacaacatgaactgtaactactacatagatgttgcaccacagtctctggtcatcctgacgtttgtgtcctttcatttggaaggtatattcattctttcccaaaaagtaatgttaaccaataaaaaatcatatatctacagtgttggcacagggctttaataaaggttttggtaaaggaataggttgtggctatgtgaagctagttaaaatatctactaacatatttaaaatgtcttgattgtgagaatatgtaatctattttcttagcaatattaaagtatataatgcattcttaatataatctccaggctatacagaagattttctgaagttattctttttttcacaataaggttaagtactgtgacctttgataggcatctccccttccttacatttagtaaccagtgttctgctctacaagttcagctttgttagatttcacagagaaatgggaatgtgggcagtttttctgtgtctggtttctttcgtttagcataatgcttggaaatctatccatgttgtaaccaactacaatatgtccttctttgtaaggacaggacagtattctgttgtgttctttcatctgtctgtctgtgtcattcttttgattcaccaggcaaaggacatttgggttggcttcatatcttggctattatggataatcatggaacaaacatggaaggatagatcggtcttcatttcctcggggtgtatgcccaggagtagagttactggataagatcataagtctatttttaattttttgagacagctctcttttccataatggctgaaccaatttatatgcccatgtatccaccattactgaactcttatcttttgataatatccaaggattcagtttatctcaagcaaattacaaataatcaagcagttaatgggagaaatgtaggcagagtggtctaaaacctctacttgaagataataataaacatcttctgaaatgtaatggaagtgaaaataaaattacatccttttatctccatactgaggactgaacttggggccctaatgcatgagcagcaagcactctacaaccaagctgtagctacaccctgttatgttttattgtgaaacagggtcttattaagttgtccaagctggttttgaattttgatgtaaatcaagcatgcctattactcctgcttcagtctgcagagaagctgaggccataggcctggcttccttctcttttttaaagaataccagtaccgttttatatattccatgcataactgaaaaaaatacagtaactttaaaatcataggcaccacataaattgcttaaagaagatgcatctgaagcctgttccattttaacagagcatcttacttttcaagcacaggtgattggactgagggatggatggacaccaagcttggcaagtgatctgccactaagttatctgcccaggcctatttcatttttagttttgagacagagtctggctaaactactcacattagccatgaacttgctctattgacttggttggcctcaaacttgcaaaatgcctcctcagactcccaagtagctgggattccaggcctgtgccatcaggccaggtccatagcttttaatgtattcatttgcatctattctcagtacacatgcatgtaaacacatacctacaatctctgtaaactagccaatgagagaagcgatcctacaagtcagaatgggcacccagtccatattgaataagtaagtgggtggataagattaggatctgctctactttcatgaaatagcaccatgggatatcctttcatatctgttcagtgaacattatcccccatgttcagattcctcagtggcaacgtttctaagcacacacactgctctgctcatttctcaactccaaggacagggctgtttgtccagtaaggttgctagtgtgagtaaggctatggctactactacacactaaatgtttagtgaaaacaagaatagaaatcccttcaagttggtgtgtgttttcacctactcatggtcatagtcatacttcctcacaaatcagctatttataaacttcaattaatctgtaattacactaatatgtttctgtattttcaagtcttagaggatacacacacacacaaaaaaaaaaaaatcaggcacattgacctaatattgagacgcagaatcaaatccagaattggtaatgtttcccggaattgtgtgattttcagtttaacaatcttatacatttttgctaactaaagaaaattttatagtcaatgtggttgactgaataaaacaaaccaaacacaaaacattgcatattctgtgatttcatttgtgagaatagtctagaataaagaaatcacacacagagaaagtagtctcatggggccaggaccacagttcagatagatagggattggttgccaatggacacaggtctctccataggatgctcagaatgtagaactggaaagactatcaaatctttaaagtgctgtgggagtgtcagcctttggggaaacctggaaagcactcctgcctcatctctagtaactcaaactctacaagtttgttctaacaaatgagaaacttcaaatatttttatacaatgatgcatcttttacaatatgtttagctacaagaatactgaatttattgacccaaggttcaggctttgactgaacatgaagtggtaatttttccattagaacttagtgagtacattagcaaaatgttttagagagctacctacaatgactaaagccctgaaattgatgctctgcgtgaacattggaaatgattgtcaggaaatatcaagggatttttcagattctgctcatagtcactcttacctgtatccaggttctgtgtaaaggttttcttaggagcagcaatgttgacattgtggactgcatgggtttgggggtttgtttgtttgtttgttttgtggcaggaggtctcagtatttgggtacggtcccatgtgtgttcaagcctgtttcaaagcttccctgtcctctatcccattctccaaggtgacaggcaaacttgtcttcagatatcacaacacatatcccctgggagacaagctgcctctggttgataattcctgggtaaacagaatggttctatacagaaacggaattctgggtaacaactgaatttactattatggaattctgtctgctttctcttgtctgcccatgttttgtctcttggagaaatacttcatgtggagctgaagttacacatagaaaagcatttcctaattgtgtttgtagtttctggatcagttacagaatcatagtattttgtctgcatttctgctctgacgccagttgttgtgtactctatgtagatcgctcagctgtctcgggaacctgcgattacgatggcttgcatatcatcaaaggtcacaacctctcttccactcctctcgtgaccatatgtggttctgaaaccttgcgtcccctcaccatagatggcccagtgatgctcaacttctattctgacgcatatatcacagactttgggttcaagatttcctacagagtcgccagtgagtaaccgtgctgctgtcctttggaattttcttgcattgtgtaacaaacatatgcagtttttgttattattcatcatatgtcaccaacttgaaggttaagaaacattaaggctaaatatgattaactaggcacatggtacaaaagtaggtatttttctttaaaataaacagttggaggctgcagagatgactctgtggctaaaagcactcactgctctctttcaggggacctgggtttgggttccaccactcacatggcagcttaaatgcccttttcattcctctgtgagtattatatgcatataatacagagaccagaagacatatacatatgtgcatacattttaaaatatattttttaaaaataaaataaaaattgacatttccccctgaaatttggctaaaattaccctatgaacataaaacagagaattgagattgattttgtgacagaaccttatcctacatggtcacttcagtgaaacaggcacataaaaccatccctgaatttgttctgtctttgcttaaccacatgaatggctaacggaaggaaataaagtagtttctcttcaaataaagtacttcttccatctacagagaatacaaacatgtatttctccatgaaaagagtcttatgatttgttcttagtagctggtgtctagttcctgaccctcagttactaaaaagtatgattctctgatacttttttctgcatcaacagaataaaatgcgtcttctcttatgctcttggatgaagagaaaggatttgctttattcttttagttaactaattaactaattgaataatttgtataattaagcccttgatgtatattctgctcttttagcctttagtttcctttggtatgaacatggttcaattcctttttgagtcttattttaagattatcattactactggcttcaaatcttggcaatgtgtggagatggacgttgtttgggcactgataaacattgaagaatcatgtaattaacctcaagtaaaatagagcagttgctacgcaagctgacatttaattcatgagctgtattcagggatctgaatgcataaggacttttggcacagaaaagattttgcccagtaaatggacagagttgaggcaaaaccaaataagcaaaagccttaaataacagccacaaaatttgtctaatcttggagatatgttagtagagtgtgttcattggtaaccatagaaacataatcaaaatgtacaaacatcatataattttagtatcataaaacaaataaacatgctcagaagcaaaacagcctaagttgggaatatctgatccttcctagataaaatccatgtaaaaacaataccttagtagtcatattggaacattattatcatagtgattacaattgttgattacggggtatagcaaagggctgttaatggctggagttagagcaaagagtggaccaaaactcctcatgcttcttgaacacaagccatcttccctatgaagggagcacaagtagggttctgcctgctgtctttgatcatcctcttgccatgtcatatctctgtcaacctgtgacttagagtgaagggacagacacatcccaacacacgaagtcttccttcttgttgctcttacactgtttgtcttagatttattaccttcatgtgccttaaaatattcttctacatttctcttccctggagaagtcgaatttatttataaacacagtgaaggaggtttaggtcatctgaaaaacaatcaatatgagttctgttaggagacggtaaacgatagcttagattatccccaaatgatttgcctatgttgtgagtaataagcaccctctgtacccttgtcttctgttccagactgtggtggaatctacagtggaacctatggagtccttaacagtccttccttctcatacaccaactaccccaacaatgtctactgtgtctacagtctgcaagttagaaacgacagattgatactacttcggtaagtgataccaaaaaggggggtggggctacttaagaaaacaccttcagctctgttcacaggaaagctaccttgctgacagagactatgagttctcatggtggcttagctggaatctagagaaaagcagaggggtcccacatggcagtaaagcctacaccctacacctgttccagtagagattggggtgaaaatagaagcttcaccagttaaaacagtccttgtaatttctcaacagttgtgaaggggcatcttacaatagctgtcaagttacaagcccctcttaaaaccaaagaggatataaagggttagaacaaagagttgccatttgttagacatgtcctatacatgagaagcttcgttcaacactttacttgaatgttttattgtactgttaaaactgtcaggagaaatatacatgtgtacttgtatatgtgtctcaaaaggtctcacatcttctcaaaggtaacacatatttaaatgaagaataaaaatctggattctcatttactgtctcccaaagccaatgtccgaaataacttttaccacctcttttctcctgaagataaacttaatcccataaagtttatttttatttgttaatcaaagcaactctagattgttgctttatgtgatattgccttggtttccattgctgtaaagagacaccatgaccaaggcaactcttttaaaggatagcatttaattggtgctggcaaacagtccattatcatcatggtaaggataatgcagcatggcagcatccagaccgacatggtgctggagaaggagctgagagctctacatcttgatcaaaagatagccaggagaagactaactcatgggctgctaggaggagggtctcattgcccacccccacactgatacactccctccaacaagaccacacatacaccaacaagaccacatctcctaattgtgccactccctgtgccaaacatattcaaaccattacagatatgtcacttgtaaattaactctctaattctacttattccaagcaagactgataaagaaaatgcagcccccattacccagaaatataaagtgctagttttctttctcctaagatggtttatttccatctcttcaatctcactgatacctgaaactactagcatgtgatatgaaatctgataatagtttatgagaatacagaattttctacatagaagcttgacaagctgggacaatacctactctgtcctctatttgtgacttatggtttatgaactctaaggcttacttatagtgtttgtgtgaccattttagaagaaagagacaagagactggaagaaccacaaccaaactatatgaaaccagaatttcttccacttttcttaacgtttttcctataaagaatcaaacaatactgtcactcatcatacaagaaaaaaaaggaataatatattttaggagagactgaaagtatctagcatgttattgaggtaataacatagaccatcttgtcaaacttgattttaggagctatagacaggtaagatatgctgaaagggttcaggtttctttaagatacaattgccaatgttaaaatgctaacctccatccatgctctaaatgtggtagaacacatcaaaacagggcatggaggtagtagggtgacttgatggaaacaggaaggggttcagtaggagagaagtgggtgagagacaataatgaggatggatgaggatcaaaaatatgatcaaagcacattatgtagacatggaattgtgatatctaaaaattgaaatctgttgaacataggcccagattatcttgaagcagaaaaccgtatcttattcatttttatatccccagtttctaccacagttcttagttataatagctacctaaaacatactggcttcagtccatcagtaataccttatttacaagattcccttccaagagaagcttgagtactgtgttgtcaggtttttgcattcttcttttataagaacctcagatatggtttaatgggcacaaataagacataagtagtaaccgggtaccctttacaggttcaatgattttgagattgttccctccaacctttgctcacatgattacctggaggttttcgatggtcccagcattggaaatcgatctattggaaagttctgtggttccacacttccacaagttattaagagcaccaataacagcctgaccctgctattcaagacagattcttctcaaacagcaagaggttggaaagtatctttccgggagacaataggtgagcatatgagatgtgaaagtatttttctggtgacttcttcttttgtgcttttaaaaattactcctgcccccagataaacacagttgatcttcctataaacatctaggaggcccaaacagaaggcctcattggctatggtccatttattcttcagtaaagagtcttgggaattctaagcactgactttatgactgttaaaaaaaaaaaaaaaaggagtgcttcaagaacccaatacctaggaaaagaacttagtacagaggtcttgatagaaggctttgactgccacacatggaaatcgaggtatagaaaataccaaagccctcaaaggtctttagtaggcaaaatgtatcagatgtagcatccaaagcttgatgggacactactaggggatgtaagttgagaatgaagtcttatgtgaaatttgttgaccaatgataccttagtctatattttccagaaagagtgttgtatttagtttgccatatttgtatctggcaggcctgccagacacttcagcggagatatctaggagatagctgaaaaggcatttggtctggaaatggtggtctcagagtcatgtgagatggccaggatgactaagagtggggataaactaaaaacaagagccaagctcatggtctctgtacatgaaaagataattatctacctaagattagtacaggaacacccatcatttaaaataaaaggcagctaatcaggtctctgtttgcactaattgcttcaatcgtataatttctatttgactctgcaaagtgttttgacttttccttgaatattgatgtgattaatgttctgagatctaatggatcctcaaacaaaccccatactctgagaagatgcagaaaggatgtgaggaatttgcctcaataaatcatctgggctcttatttccatactccactctgtctattcaccttcatccctgtgacctgaaaacaaagaacatttcaaacattttgttttccgtgttatgctttcctggatttatttgaaagatttatttaatgtatccatgtgcagatgactctatgcatgtgcctgtgtgagtaaatatgcacatgtgtatgcagatgtccacagaggccagagaaagaagaaggtatttggagatttggagatgcagtcattgggtatctgtgagctggaccatgttagtgctgggatccaaagtctgcttcttgagttcttatggctgagcagcaagagatcttggctgctgagccatctctccagcctccttaaaacagctctggaagggagttatcaggcagacatttatctcttataagctcctcataaattctgacaattgtatcataaagaccttttgccacctacctttcttagttgtcatgacaataacttgaaagcaggtctcataggacacagaatgaggcctcactagaatggtatatgtgaagtgacatgtaaaacacagaaggctattttaaaaggaaagcccactttcctttgaatgcttcaattttgcacagaggctctcttgtgttgggctaccactgtgcttcatacgaatagttttgccactttcccatctgtataaatgccattgtccacttgaagatgctcaagacataattcaaatgattgcatgtgcttttgggtgagaggtcaggtattataatttttaattgggtctcatgaagatattttagcccaaacaactaagtgtcctgaccagtctaagtagctttcagctttgttttgttgtttcatgtggtatgaaaagaagaagtaataaatgtagttttagggattctggaatcattcattacagacttgctaaaacataataaaaaaccaaaaggtcagacttggctaaaagcatacaccttcttttctcatctcatccatttaagccactccatcttttctataagaagataactgctctgtggaccaggctgactactcatttccaagagcatcagtctgcctggagagcaacacttttccaaagtaaatagatgcaaagaggagacccctgtagcccttaatatttctgtctagttttatattagctaaatctttaaatataccttttgaagctttgctgtttaaattatataattggcagtaatttataaacatctgctttaatttttgaaaagccacaacagttagtgtagcatctccttgagtgttggctacatttgtatttctcattggcagagagaagtacagggaaatattcagagtggataattagtaaatagataatgaagtgagtctcccttttgtgtggaatttctgttcagtgtgagaataaggaagggcaaagccagcacccaggatctaggatccatccagaacataaaattttctcataatcccattaatgtcaacaaaacatgggtggctgatcctgaaagaagagaagttagaaattattgtactgagcttccaggatccatgaaactgaaattatataagaagatgaacattttttttttctggattgagtgaatttgcatcctttattagcccacagatggctctgagatctcacccattccttgggatgatgtatgtcaggatcctggcctcctgctgatcacagcaaacatagtgacaatgggggcaactatctgtcttccttcacctggcttatgagtcagttagagaatgagtcaggtggcttcaaggtcaaactctggagctgtggtgagaggaaggcataaatacagaaaacacatgtttagcacggacagaatgaatcacaggtcaacaaagggaggaatgtggccaaaggggaagaactctgtaccagaattcaggtacccaggatgcaggtgtgatgctactactgcctgcgacggagcactagaaaaaccctaacctctctacattcaatttttacctactaaaggagatcagcttgaaatattagcccctctagtaatctgttctaggtaaagtagatcagatcctggaacataccgtggctatcctaaagtatattttatagcttaaatcagaaccctataggaggaacaacaatatgaactaaccagtacctccagagctgtgtctctagttgcatatgtagcagaggatggcctagttggccatcattgggaggagaagcccttggtcttgtgaagattatatgccctagtacaggggtatgccagggccaggaagcaggagtgggtgggttggggagcagggtggggggagggtatagaggacttttggagaggaaaccagaaaagggaatagcatttgaaatgtaaatgaagaaaatatctaataaaaaataacattaaaaaagaaagttaaaaaaaaagcatattccagtatcatcaacatttttatgtctctgaaatggactaggccatcctctgctacattttctctgagtctgtagagtaaatgtctatccttcagcaaatatccaaatggttttttagagctatgtgatgaaattaatggtcagataaggtaataagatgaaaagcattcaggatcaaaagagctaagaagcagtgattggatgtgcctgaagccacacaattctgtaaaatgcagctcagcatggtctccaataactggatgttcaggataagttattataaccataaatttcctgtaatcatccttccttacattgggttggttttgatgtagtgttctcaggaacataaaagcaaaaatagaaccaataaaatttaaacagtctttagctaccaatgagtcattcagaaatattgagagttctatgggactgattttctctttgatcttgcttgagaggagtctgctcacttggtctggtaatttcatattctgtctactcacaagaaatatgtcacaaaagcacagaacataatgagagcccgtcaccaaccacctccttctctagactgcttcatccagtccccaggactacctgatgggccaggaatgaacacattttacaatggaggaaatgataagtatttattagagattaaataatttgtggtcaaaccaaacattgaactaggtttgaccatttcctaaacccacactttcctaattggtctatgcatcctctagggcaattgatagaaatagccaaggctaaaggcaggtccctggaaggtttcctaagggagagttagctttcctctccctctgtgatagactcattctttccatgatcatcttctcgtttgagtgtacctggttttaagtcataggatgtcattcctgaatagaacattttgttatacatatatcataaatagtatataatctttatatatttcatttcacaatttcacatttacatgttatacagtgtatgctataatatttaaataaatatgactcttattaaactttatataaataacatcatactttaaataaaatttatgaaatttagcatgtaattataagcataataagtatacatgttgtgtagagatgaatatatgttgcaaaaattacttttggtgttggtagagaaatatcatatctgttcttctggctttgcatggcatagaagtgaggtggtagcccaactaagcacagctattgggagtatatcaatattataataaaggataataaatatgtacaacaaaaattagtagctccaaattatgagcttcaatttagtgaaagtttttaccttagcattcttaaggatttagatgctatattctgatggtggaagtctggttgatacacctgtcaagtagtccagtctaaaagtggaggaagtaagtcacaaaggaattaagagacctatcaaggacacttagcaacttctgagcagaggagaattgacctctgtcaccatcaactagtacctgccaccagggtagtcaaaattaaaatcagcagtatacttggtatgaggtttcaaattaatgaaaacaaaaccatttcatttccttatttaaatcattattataaaactacatctaaattttataaattccacttttatattatcatatgttttaagacatgcaagtaacatatgactacttatcttgctctctttaaacagaatgttttccactttttaaattcctgcttctgtaattgtcgatatttagtaaaatcatatccctttaaagagggagtatgcttgttaacgtgtcctaaattcttcaaattaatggatgtgctctacctgatgatatactatactatcagtacactatacagtacacggacgatatactgaatactccgagattcaaactccttatcagacctggcatcacttgttgcaaagaaatattttcctactatgagactgcccattaggcaaaatagtcactattttggatcttttgttgaaatttttactactgttctgctaaaatatgcggtcaaaaaggtcatgaaaattacaaaaattggctttgaaaataggctaacattgctaaaaagacattttgctaatgtgtgtgtacttgtgcataaatatgtttttataataagcaacaattttatgatcaagatttaattataaaattatttaataataaaagttatcattctaaccctttactagacaaatctttacaaagatccatctaatcattatttgttttctatgtattccttcactgttttttatattattttttattttatattatttcctagctaattactatatgggcagtgatttaagaatgcaaaagtgagtttagcaaggtcctatgcttgacaaactctaaatcagaagtcaacatctccttgtaaatttggtatgatacctctcttttgctatgaaaatggctgtcctgaatcttggtgtaggctttggagtaccagacccagtttctaatcttaacaagtttggcttgggcaatatacaaagctatgctgccttggtcttctattctataaaatggacacatttatctttgtagaggtctgtagtgttgattaaactagataaacctctgtatttatttgacaactgagtacagctctaaccagcaaatttgtcttgagaggttgacagagactgggatccatactttctatgaagaagaacaatcatgcataactactgtgtcctcctgggagattaattcatattgttatgcaataacatctgaaaatgacttatctatgatttccatttttcttgatttagaaatacacacacacacacacacacacacacacacacacacacacacatatctcatcatccttttcgaccaaaaagcatttggttgaaaactctaattatacatgtacacatgtatttgcataacatatttgttgaccattttgcttccaaagagtatatttggtgtttggctttttcttccaattggagaatttaacatttaatacatttttgtgcaacagaattactgatgttgcctgatttcactcaacctttgtgctcttttctctttgtccttcctctttgtactctttgtatgttcccttagccatcctttcttgcctttaaatgttttattgcatttaacttgccacttatcgtgtgtgcatgtgttttggattgcgtgtcacagtgcccagaactttgcaggagtcttcctgctgtgtgggtctcggggactgaaccccattcttcagcctcggggcgggctcttttcgtctgctgacctacctctctcactccttttctttgcttcttaaaaaaaaaaagtaatcaccttttatgttatttcacacacaatctgttattttagctcttaccttatagaccatactatttatctgtggcttgaatttctttgaattagtatggtgcctacagaatagctcatagagttcatctcagtgaagacagtaagaagtgaacaacagtccttggctttatttcttgagagtggccacaccccaccaagcccccttttgatatagatctaagtatacagcagaatgaatggaaacctgggcttaggctgctacctagtgttgacaaatcagaggtgcctgtgcacaaaacagacaaagccagtctctgtaccgtctttacaggcacagcattctgtccttatagagatcctgctggtcttggcaaacgttgaccaagggaaggaagagttgtcatgctgcggtttgatgcctagactatttaagaagtagcttttgtgaactgtagttactcaactgagatttgaaggactagtcttaccacatcatccatgactcactataatctaatttaaaaatagcatttttatcattttatgatcagttcagtggccttagaacattatgcatgtgccttcatttaaatgtgtacccagatattccatctcctttagtgattacaaatgatgtgtttttcagtcttttccctctcttgcacattgctaatacatagaaatgttacaggttttgatgtgctgttatacatattcagattttgactgactgtattcttgggtctaagaactatcatacatattcaggttttgagtgactggattcgtgggtctaagagtgtatttgcatatccctcagaattgttctataaggagaagaatggcatctgcaaacagtgacacctggattccttcctttccaggcttttgttcccttaagtattaacggccaagactttaatagtgatgattaagagttgtaagaaaaccaccatttcttgtcctcatcttgaagggctgattaactgtttacctttacctttgctactagagactcacaggatggcttgctcatctgagtacttgccatgcaagttgcaatcctcagcacacagataaaaagccaagcacagaggtgtgcatctataatctcaatgctgggagttagccaggaagatccatagtgtttgctggccaggctagccaaattagcaagctccagattcagtaagaggctctatttcaaaatataatatgaagaaccattgaaaaagagactggatatcagcctattgctttcccaggcatgaacacacacacacacacacacacacacacacacacacacacacccttctttcaaaagtttgctaatagctctaagttctacaggtattctttatcaaactgagaaatttcccttctaatcttagttttctgggaggtttttaacctgaggttgtgcagtattctacaaaatccttttatagaaatagagacagcaagttcatcagaaaccacgttgaatccttaagcagattcataacgctggagcagctgacacaacagctgtgaaagtcccagtgaggtttactccaactaaggatgccgaagcccaagctccacaatctgaagagaagccaccgtgatgtgacacactctgtctgatgagggcactgcttttagatgcatctgtgttacaacgcccccagtcacagatgttcctgaaagacaggactatactaaagtcagggtgatctttatcttaagtgcagctgctccctaacctccagagacaggcaaagacctcaagaaggtgctgtcagtcctcaaaataacttcttaataagcagtctccctccactaaagcagctaagatgtttctcctagatatggcagatatttcttcccttatcagactaatgctgccttcagcttcactctgaagtttaatctttcaggattcagttactgactcaattaaatagatctggccgaatctctgctgaatatgggtttatacctccaggaggtctcccagctcctgccccacacctctgtgcaaacatttttttctcccaaccgaagaaatagctcctgatagttaaatacagaagaatgctatagtgatatttgttcttgggtacaaggtatgtcatcaaagtggttctggtagagtctgactggtgagaaaggtgctggtcactaagcattttctaaatgaatatatatatatatatatatatatatatatatatatatatatatatatacacacacacacacactgtaacaggaaacatgatcaatttgtgatgttgaagcagaacaatgttaggatatctttaccagaaagaaggaacttcaagttagcaattcagaaaatacaggtatacatgggactgtaccctagttattatttatattataacttggcactccaggtatgtgggcacagagatgtggccttcactctttgtagcattgctccctttttctgttaacattactgtttacatcctccaaaggcacacacttgcatttccatctgccttaggaaaattggaagcacagagaagctgcactctgtataaatactaaaacgggacactttctaccatcttcatttccagaaccctgcaaatccccatctgctcacgtgatactgtgtttctttcagttacttggctattttggccaaagttatctgactgataatattggttaacattaggtgatattagctttccattttctttattctgtattatatgaattgacttttttacaacagtaagacaaattctctctctctctctctctctctctctctctctctctgtctgtgtgtgtgtgtgtgggggggggagggggtatgtatgtgctgcaatggtgacactgtatagccagctgttctgatatcagtagcttataacaaaagcatttatgggtactcagagtcactagcctgcctccataccaggcatatctacctcatgacactacttttattagtagtggtattgctaccacggtatggtaagtgtgcataatgccatttactttgagacaagtcactgttctcttattaacttgttggcaataattaacacacaaatagtgttaaaatctacaggttaattttttaaaagcaacagttcatttcttgaggctgatatattaatggagtgatgtatgttaagttcaaactccactgcctcttgctaatccagattggatattgtagcagtggtctcatctctgacgttagctcccctagtcagcttttcctgtaatatgctactaccagattcaatttcagttcaaatgatactactactcctgtaatcaaaaatccttccaagaggctgtagacggcttaagggttaactacttttctagtgtattaaagctcattcacaacacacagagaggcggttcacaatgcatacatctccagctccaagcaatctaactcttcacccttctggccttgacaggcactcacacacatgtagcagttgctcacacatacagttaatgatgataataataataataataataataataataataataataataataaatattccaagtggatcctcactatccataggacaaaatcaaaggctttttatggtctagttttgagctctattatggtccttcatttgtctcatagttttcagatcaaaattgtgccttcctatgctcagcctggtgtgatcttgctggggacaaagtgacatgcttccttctcctaggacagagccctgcagggagtgagtctccaccagtgtccatggctgctatgggcataaggtttgtttgtatagcaatgtacatattttctggagccagtactagcagtggaggactctcctcctgaagaatgccctccctgttaatgttaatgacttcataataattagaaacatcactagttcaggagttgagggtgttgctatgtctcagcaaaatggtagatgctgggaccttcaggacagccctcaaggctgtggaaaataactctgaaaccatgagtttaaatatatatgatttttttcaactatacaaaaatataaggatgcaatatgaattatgaggagcttcatgaatctaaagggacaaaggcagctacactatgagccagcctatcagaaagatgcaaaggcagatagatttccgagttcaaggtcagcctagaacaaagcaaggttaggcccagatgtggtaggaaggtcaaaaacagaaaataagttgtgcttgtgtctagtgcaaggctgcagaccattcatttgtgtactaatttaatattatttttgttgtgattactttgagtttaattcaacctgaccctttctttagaaattggcagcttttcttcatttcatgttcgtcctatgtcatttctgagatacccgttatgctgtggagtaaatacatcctaaatccagcgggttttgtttctgttctttcctgcagtagacaaacactcatcattaagatactctgtattctgtaatttgtaatgcatgactagttgtttaatttcagtgtagatagtttttacctagtggatttcttttattctttagtctcctcctgacttggttttggaaaagataaaaaataaaatacaaagaatgtgatttaatgtaaagtaggagtcagagctgtctcctcacagcctctttctgtcaaactatttaaatgaaaaactagttgagaggtaatttttttagaagtattggataaatcttcataaattcaattttcagtgttagcagtgttcacaaaagtagaacataaaagtcaggcatgcgcacatttcccaccagctttattatgcaaaaaacatcgattttcagaaaattgagtttttcagggttggaaaagcttgaataaatcgcatgaatagctctacagaggcacatgcatgcaccccagtgtggttactcactctctcaggcatctatatgtgctgataaggaggcgactcagtgatgggaaaaaagaattagcaagaagccaagaaaagctgagaaacacacgtgcacactccctagttttcggggacctcttgataatatttgcaagtctgtgggagaaaatggaacctctcctctttaaaatccttccacagtaatgtgaaggtcgttttgttcttctgcacaatgatgtatctttcgtttgacaggaccacagcaagggtgtggtgggtacctgactgaggacagcaagagctttgtgtctcctgatcatgactcagatggactttatgacaaaggtctaaactgcatatggtacataattgcccctgaaaacaaacttgttaagctcaccttcaatgcatttactctggaggaaccatcgtcgccaggaaaatgcacctttgattacgtgcaggtaagactgctacaccttaacagtctactctaacgaatgggattttagcttactatctacaagccttgaaaatgagaacactattgcttacagtggcttcaatatatattgtagttgctagcctcctgttcaagttcatctctgatatcatcattcaaacatctcaagtgacttctaacattagcttcaagattcagttctgtcttgctaagtgccttgttatgaagcgatccatgggaagattagtcggacagagtgaggttgtcagaggactttcacaattcctaatgtaaatggtatctgaagtgcaaaaatacactgtaattggtctgtcccttttatttacgtagatagcatccaaagcttcctaaaaattccaaagaaacatttttttaagacagtgtgaagctagacggccaaactcccatcgacgtctaggaagggtgccaaggacaggatgcaccgggaggaccaaagatgaagggacgaaaatggatgactgagaaaagcttgtgacatccaggaacagtgtggtgcatggaagtcaggggaagatgcctttccaaatgatgtgtgggtagccagtggtgttaagctgtaggtcacagacaaagaaaagctgagatgaagaaagccattccattgggtgacaaccatcttaataagacatggggctagaagccagccattgtgagggagttcatgaggggctagaggtgacaaaatgtgggacaaaagtgttaattcaagttcagtccttctctaaaatgagaccaagtagccagaactacttaagaggttatttaaaaccagcttctctgggttcctgaaaagtagtaagatttgaaggcagatagtaagtagtcccacagccagaaagcacagagggatcagttctgacactcagctcatattttcctttttattcagtctagagtcccaaatcatgaattggtactgcccacatttagggtgggttctttcaaattcagttaacccaatctcggcactttctcacaggcatgcccagaagttggtcccttggtgattctagatcatgttgaggtgatatcagtatttactaccccccttttaaattgttaaatgttgtggtaaaatgacattctatagaagctaatgacacagctctataagtagtgtgtaagacagattataccagttccattgctgagttatgcctactcccttcactgctgtctttgagagtgtttactaggggaccaaggggggacatctgctgtagattaatgaactgtggctgatcaatgactgttgaaaccatcgtcacatctgtcctatggagttgtttggtagccatggtacataatatgggagatgtggcagtgaacgttccccaaggagatgtaattcattgggattggggggggggggagactggcctgtaaacagatacattatacaacatgaaaacagaagttagatacccttgacgtagaaaaggagatcagaacagagtatgtcgggcttcttagatgtgagcatgccatggcacttaacagcatcatgaaagctcacacatattgttgcctccataaaatggagaacagtatcaacaaggcatatccacaagaaagacatgaccaaaaataaggggaaaggacagtgctgtgtactacctaatctccaactcttggttagttcagtcatccttgtgttgagcaacagtaaggtggttgagggcatcaaaagtgtggtcctcctgcttcctctacctggaaacatgacactggtggaagtttcccaaggtttcttcctcaacttggtgctcttggttttggcagatatattttaaagtttccagtcccatctgaagagaaaattccctgtacttactatcctatgggattcagaaatgtgacttctaaacactaaatgcttcaaattattgttgtaaggccaattataaactcctgaacatcaaacttgcataaaaacattccctagagctttctgggagcccttgtaataactcactgggcttaacccttctgcatattatcaggcactggggaagggtgtgtgcctctttagggacaacatcagcagaccctaggtgcattggttaggagatagcactgccactaagcattcatgtacttagttattcattaaataagtgtgaatttcagtctacctcattatagatattagctcaaacatttaaaaatgcataaagagtaaataattattactgtgatactttgaatcttacatgacccaccaaagcacagccgttaagaagacatggttggtagcatgggagtcagttaggaaggtaggttactgaggacactgccgtttgaaagatacctgagtcccaaccactcttttctatctgcatcagtgcttctgtgaagtatataacccccaccccctgtgtgtccttctgtcatgaccttaacacagtcctagaacaacaaagctctataactgtgttgctatagagattagtcgtgcaaagactgagtcctagagacaaagtatatcttgagttgactattataggcattttgtcacagtgacaccaagaaacaaggcttctagaaggcaaggtgtgcctgagttagtgttcagacactaactcaccacagacatgcagtccctgctccagtgttgttcagggtctacccacagcaagagatttggtgttggcaaggaacagaacagagaaataatttcaggtttgatcatacaggaggctagtagtcatgcagtttgtaactatatattccaatcagttacgctaactcttactttaatgtggttggatgaatatagtaccagcacagggccaccttctacccagccctagcttgtccttgtcctgcccctcacatctaccagtctctaactgacgttggtcttgtaaagtaagacccaggctcctcggcatgaactgggtggtcttccccgactctctctctcttttatagtatgaatctccttgatattatttgacagaattaccttttcttttctttggtttcttttttatatttttccatgcatatttgtagatatatctgtaaacagcaacacacacacagacacacacacacacacacacacgcacatgcgcgcacatacgtttatatttagctctttcttctcactattttatgagcaccttgaaggtacataaatgctcttatgtctctccatatacacactacccaacacaagccaggtacatgatacaagtgaaagcttgtatagaccacagtggttgtaatgaaacctcacttagcagaaaaagtatgttgtctttaacttggcaactcttctctataaagtgagggtgtttgactacagaacttcacttttctgtgctcctcgtgaattcatatagaagagacagcaccatctagtggtcagttttgtttcattttttaattttgaaatttatcatgttcattttataacatcagtggccacactactctgagatttctgatctaatgtggttctgttatgaactcatattcagggctacagaaacacagaaaatcattattaaagtacaataaaaattaacaacatagacataaaaatgaaaacatactatattaatttatttatttatttatttattttttagtaaagtgtttgagggatatacaaatcctcactatttctttgggtgtttgtaaaaatctgtgaaagccatcagtagttctggatgctagagacacttctgagcataactccgtttctcttcctgtgaaactcacacttgtgcagagggggcgcccaatcaaagtaaataagcattacattgattgagtttcatcacagtaaaataaaacaagatggtattggaggagggccccactgtgtgggattagactctcaggggaggtgacatttgagtaaaaggtctatgactagggattatcagtccttcaagaaagactatgtctccaagggaggagactgtcagaggcagcaagcactgggaagggagagaagcaacagcattgaccagggcttgcaagttctgcattgggtacaaggtatagttttgtaggaagaatagacacatactctaggtcatcaaacacctgggcactacggtgcagaactctgtgagtgctctgtgcaattgatctgtgagccatgttctgaagaaactgtgtcacatggcattgatacaatatatttcgaaagtggaacaaagtggggatgcttatcatgggaatgggagagttgagtatgactggaatttagacttgagctgtttattgagatagagtagactcagggagaatattttagggaagggtgatgctgtggtgtgtacatatcactcaagtacctgtggtagaaatgtaaaccttatatccatatgctaaaggtatggggggctttgaggtataactggggttagatgaagtcatgagagtggggttcctatcatggggtgaatagtatcaccccaggagaggaagagattgccgagctggcatgctcctgatgatcttcttaggatgctcatatgttagaaggcaagaaggccctcatcaaagtctgccccttgaattctgaatgttcctcaatcctcagaaatatcacaattaacttacttgtgtataaatgacatggtctatggtactctggtacagcaacataaaacaaaccaaggcatgtgggtcatagggaagggtcaaagcacttaccaagaagcgagtaagcatggtttatgcattacacactcttaaggtctggggcgatatggcggaacagaataaaattctgtgcttctgtggaatgttgtattcattttagaaggaaaggcaatagaattggcaagttaaatgtgtaacatgttgacagtaatacttgtcctgaggaaaggagtcaggggatgtgggcagtgttcactttagggaaggcattgctggtggatgatagaggaagagagacctcaacagactccatgaataccagcaagggtggtctgggcaaaggaaggcagatgcaatagctgggaagctagactgagctggggatgttcaagaatctcaatcaagcagagcagacccctgaggtctgtgtgggaggaaaagccattccattaggtctggatcactgttgtaatggatgtagcctttgtgttaagagggtaggaagcagttaggcagctcctggtctgactttatctttttttttttttttccattttttattaggtatttaactcatttacatttccaatgctataccaaaagtccccccaaatccaccccacccccactcccctgcccacccactccccctttttggccctggaattcccctgtactggggcatataaagtttgcaagtccaatgggcctctctttccagtgatggccgactaggccatcttttgatacacatgcagctagagtcaagagctccggggtactggttagctcataatgttgttccacctatagggttgcagatccctttagctccttggctactttctctagctcctccattgggagccctatgatccatccattagctgactgtgagcatccacttctgtgtttgctgggccccggcatagtctcacaagagacagctacatctgcgtcctttcaataaaatcttgctagtgtatgcaatggtgtcagcgtttggatgctgattatggggtggatccctggctatggcagtctctacatggtccatcctttcatctcagctccaaactccgtctctgtaactccttccatgggtgttttgttcccaaatctaaggaggggcatagtgtccacacttcagtcttcattctccttgagtttcatgtgtttagcaaattatatcttatatcttgggtatcctaggtttggggctaatatccacttatcagtgaatacatattgtgtgagtttctttgtgaatgtgttacctcactcaggatgatgccctccaggtccatccatttggctaggaatttcataaattcattctttttaatagctgagtagtactccattgtgtagatgtaccacattttctgtatccattcctctgttgctgactttatcttaatagcaacctgttagaggtgggaaggttggttctagccaggaagctttaaaaaaaaaaaaaccaaaacaacaacaacaacaaaaaaaaaccgtggtgataattcaggcagcagagagaatagcaatgggtttaatgactttgaggccagggggcttttgttgttgttgttgtttatttcaattatatattacttttcctaacagaaaaatatatgatgggcatcactgaaagtcattatagcattatcaatataaattaagactgcctataagaacacccacatatagatccgtaatccatggtctgtctatcaccatagatatatggtgaactcataggtaagttagtgcaaaatagcaattcccttattaataattaactactataaactactttttcttccagatagcagatggtgcaagcataaactcatatttaggcggaagattttgtggttccagtaggcctgccccttttatttcttctggcaactttcttacagttcaatttgtctctgacataagtattcaaatgagaggatttaatgcaacatatacctttgtggacagtaagtattctgacagattatgaaatacatatgtccttatgcacagacaagaatgcatgcatattacatgtaaattaattacagttttagcggattattaaacacaagagctagattgcctgccctcagtttccctttctttgacaacgtctcactaagttgccaggctggccttgaattttatccttcagcctcaagcttgcatgaaggtaggattgcagccctgtgtcaccacgacatttactaaatccttaaaagaatattaacatgtttcctaggccagagaaagatgttaaagacagtatgtataattagagatgattaaaacatctacattattttctttctccctcttcagtgccttgtgggggaacatataatgcaacttcgatgcctcaaaacacatcatcacctcagttgtcaaacatcagacggccattttccacctgtacttgggtcattgaagctcccccacaccagcaggtccagataactgtgtggaaactgcagctgccctcacaagactgctcaaggagctccttagaacttcaggattcagaacaggtaaagatgccaggatggtggccgtcgtatttgcagacactgcaagtaatgaagccatgcctaaataaagtcctgttacttctagaattgttttttcagtaggagacaaaacctcccttgctgacatactaacccatttaaatgtagtcctgtcgcaagatgctttcaaacagtcctatagctaagaatcatctgggggtcttgttaaaaatgcacattcctgaaaatgtcaaactttgtggagctctttcatttactattgtgcatttaatgggtatgtaatgtgtcacaatggacacatgccatatgagcatagagatattgataggagaacaaccatctgtctcccagcatgaatagaatatatgtagtagccccaactttatgtagactgtctgaatgtgataaaactttgaaattaattggtttaacaactttatttgggacttccacaaactcacactgcaaagaaaaaaaaatcctatgactattattattgtgaaaattcttctctttgtcctggttcactttataaatgtggcctgactgacatgataggaagatttacgaatataatcatattctgatcgctttatagaaaggatgctagaagtgtgagccatgtaataaatcacttaccatcagaggtatcttcaaagatgcaaaataacccataatgaaggggaacaccatgcctataaacagtaggataaaaacttaaggatctgatttctctttaccattagtccagattgcaaaattaattcataaaaataaaaagatttctcagtgtaatgaatgtggttaaaaaaaaaaagaagtaaaaagacataagaatcaccccctaaaaaatgcacattcctaggcccccctgcagacaccgattgatctgcctaacatgcattaatcaatgtttgatgagcatctcttgtattctgccataatcccagagctctatgggccacacctggagaactacatctgtagctaacaggctatgtacaggtgaaatggagggacccatacagaacacaggaaaaacagctaagagaccatttcatgcctatctagtagggctacaattgcggcaaactgagagaataaaaaggggaaacagaagctttctgggctcaaagagataaatagtggaatcttagtttcccatggggaaagatggcacaacagctggtgtgagaaggacccagagatctgagcatgatcatctcctcaattggtgggcagaatggggagagcagtaaggcgaccaaagaaaatatttcaattcaggacccatagtctgagctcataccctgaaactattggagtctgcagttgggtaaacagttaacacacttactctcagaggccatatttgaatgcccaaggcctggcttaaatggagctccacctgtcaccttctgggttttcaaggccctccttgttataaagctgggctttctcactttttccaaatctctagctcagtgacaaaagtccagcttgactcgatgtggagggtcagagatgcacatgctggagaagagctgagtgccgcatagatcctagagaccaaggttactctaaggatcccgaggtggttgagaaacgaggttaagcgtcattcccctagcagtggttgcagcacagaattcctgtaccccaatggaagccccagtggaagaacttagagtgaagtgcaatgagaccctttcactcaaagcactttgagtttcctatcactttatgaataacgcaaatcagggcagattcctcattagggcacaaaaataacatgtacaggcagctgtggtacacaagagcagctggattggctgcaaatactacaattgaggatgtttagtgtgctgtctataaaaatactcaaggcctctaaagcttcagaacacatctgggacatagaaaattattatgagctaagacaccacagaagatagacgccataatgaacaacacagaagagcccaccccactgtcttgcactatgtttgcagagtaagctgtggagcaaaccttcatgagctgctggatacatgagagtcacataaggctacaaagttgaaaatcttgggatataaacactagggggaggctttagcaattcagttaaagtttaaaggctacatcagacaaacttaggacaaacttaggacaaaaacaatatggaaggctaagtaggtcaatgagacagagtaataactaaggagtctagaaacaaggctggagcatgtgccttcagacagagaccaagaactacatgtacttcagtcataagggtaatgtgacaggggctgttgttcaatgcctttgggatacttgcttgtacgtgtagaaattattaggcatttaccctgaacatttgacaggggatgaggactgccaaagtgctgctgaagagaataaggccattattacaggtaccaagtgccagggacaactgaaggggaagctcaccagacagagtacttccacctctgcctaacctaatagaactctagaacagggtaactagaggaagaactctagacctgtagggagttcacatgccctggctctgttcccacacacactttcactctgatatggctcaagagggagcagctttgatttctgtggagacgcgtctgctcataattttagcggaagctgggttccttatgtcccacacctctagggaggcaggacactgctcaattcccaggttaatgctaagtgtttcatggcatctgagactagagctgttgaagtcacatgctcagtacagtttactatctggtgtagctttactgtcctgaagccaaatctcatgcaacatggcttccatttcatttcagactaatggaaaccaagtgactcagttctgcggtgcaaactatacaaccttgcccgtgttctattcctcaggaagtaccgcagttgttgttttcaaatctgactttttaaacagaaactctcgagtgcatttcacctatgagattgcaggtgagcctaaaacctcatgtttatcggggaaaagcagctttgatgaccatcattgttggagataagtcttgtgaacagataagttgttgttaagataaactatctccatgtgaagtaaggttgaatttaactttttggaagctaagctttatcaaggtataacgtatataaagttcacagttcagtgacttttggtgtggtcacagtggtgggaatcactttaccttaggaaattattttgtaaatgaccacggtgccttgaaagaaattacttgatttcagtgaatggaagtgtgtccagaccatgtttcttcatgtaaggatggttttttaccttgatcaaaactacagcagaatttgatttgaacatagttacttttggttttggtttacaaaaaaaagaaaaaaaatgtaaaaagaaatatgtgaattgaatcagaaggaacagtttagcaatggaaaccctacacagctgatgtctgggagggtgagctttgggtctggaaaaggtccaactgtcaaccagcaactcttcttccatgtaagcagaagagttcagaagatgctggggtgctcttcaaaggggacttgtactcccactctttacgagggggcatgaacaagtcatgtcacggaagctgctgtggggggctgcccacatgaggaagccgctgagcctgcacgtgggggctgcgcatgcgcaagccgctacacagcaactgaacatgcgcagtgctcagcatctctcaggtccctgttctcttatacaaggcaagaggctggagccctttctgaatgttgctcagattcagtggactgtaaaaccactgttgttatcaagactactaaatatttggacctgcacattaactatgaatcctgtttttctctaagactgcaacagagaatacaaccaagcatttggcaatctaaagagtcctgggtggcctcagggctatgccaataacctggactgctccatcattctcagagccccgcagaaccacagaatttccctctttttttactggtttcagctggaagattcaagacaatgcatgaatgacttcttggaggtaatacatatttgcatataatttaaatggattacataagaacatggatggatcactaagaatttttttctcaagatattaattcaacatctctattttattaagctagtcagtattctttcatcctataaatgcgtactgagcagattccagctacagcactggaagcatggttgggtggcagtgtcaccgtctgtcatggcaccactcagcaatgggacagagatttttcaaaggaacatggatctgagttccaacctgcaggctgaatggaatgtcatgggcaagggccggttacctgcaaaggtgtttacacactgttccccgggcagtgagcaagcacagcatcttggctctgctaactgagtcgacagattccccgaggctctctccattggccttatggctctacaggaaagactctggaagatgtccacagcttccactcctgactcagagtttcctttcttctcaaactgcctctttgatcacatccttaaatgcttaatcactattttaactgagcatacgttggggtgcagtatgatattccaaacacatatataatatgtattaatcagttcagagtagttaatatttccatatttagttagctttattatatttattccaaatatgttctccagaaattttgtgggataaataacttccggattcacgctacccctttcctggtaacctttcttttctgtcagccttttttcctgctactttgtaatgctaacagatttcctgtctttctggtcaccagctcatctccagtggccttgtttctggcccgctgtcccctgtgtagaggactacctggaggagaatggagttccagtagatggtctctgcccatgtgttcagcttccacaggcttcctcttaccttactatgtaggaaagctcccatctcagattgaactgaatctgctgtcaaatggaatccttatcgagttgtgaattcccggggaaagctcgtgattcctcttggggtactttccatggcaggagatgagaaaagggaagaaatgaagacacagaagctgtgctgtttgtgctcgtcagggagttaagctcggatttacacgcttacacatccacaaaaccagatgtttgtataaaacagatgtgtgcacaaacaaaaagagagggatgtagaaaagggctagagtcccttgctaaccccgagtcatagtcttaatccatccctaactcaaggtactagttactggccccacttaatcttggccgtttgtcatctggatgctggaaagtgaagacttactttttaacattggatggtgacagccacaccagccagacatcctccctctttccacagaatgatgggaagttctgttacattagcagagagaggaagctactacacaggcctcagaaacacatctgcctctggagctccaggagagactctgaagggagccctggtgttctattactttagctatggtgggaatagaagtcttccatgaggattctagtgcatttctagcagggagggcatggctaggccctacctgtgaatatgcctccaactcccctctccaatgtacatgcttctgcataattcatgagctatgcctcatccttctcagaaaagtgaatgtggtaagctctaagcagtggatctctcctcccccgatctcgcagaagtgatttaagagaggatccccaaggaaagaaactcaatgttgagagtatggggggcgggagcgggtcaagccttgtagcgttcttaaatgtgtcagctatcccacgtactgggagggaactgaccagtctgtcctagccagagatgttttgtttaaacatttaagagaagaaccaagagtgcatcacttgccattgcctaggtatagaaagagcctcgccagctcagatgcccaagtaaatgtgcacttctgcagactgcagtgactctaaaggctagccagattctggactatggaacgatgaagggaagtggggtagcttctcacattgaacatgtacacgctaacagcagctcttcatgcaggtctacagggtgaggaatattataggcacatggagccatttacttttcccacaaggaaaagatttgtttttgatcttcggtgttctttgttcattgtggccactttaagctttccagtgggaagcatccttcccccggcccccactgtgatcccaggaataaagtacaactggaaacaggccaaacagtggtgccccttcccccttgaaagtccactgtgcattcctcaaaatgtgtgcacacataacactctgtaggatcatggcaccggctagtatatcacaagaatgtcagtatttctgaggctatactttatcagatatttctaaatcccaatgcaaatggcgagtgctgtaaattcttatatgtcttcatctacaaatacttgaatatgtaaagccccatttcctattctggagtctgagtggcctgacaagaataatgggagtctnnnnnnnnnnnnnnnnnnnntgggctagcccaagctagcccaagctagcccgagctaagaaggtgatactgtctcagaaaacaaaaccaaaacaaacctactggatttacctcacgtgttagtgatgagctgaaacagaggtgatcggatgggtaaccaatggtgggttttcacaggtaagaaatggcagcagcagcagttcaccactgcttggcaagtactgcagcaacctgctgcccaaccccatcttctctcagagcaatgaactgtatctgcacttccacagcgatgactcagacacccaccatggatatgaaattatctgggcctcctctcctactggtaagatgctcactctgagggaagctcctgtgggctgatggggtgtccaccacaggaaataacattacaggaaataggaatgcggccttcagcacattaggtctgcgcctgatgattttctgttaaagacgcagatttcttaacaatgagagtactgaattttcaaaatcctacaattatttatcatttctttgatgtaaaagactgaaattttcatataaaaggtctgacaatgtaaacattccatgtaaacattatttttgttcttcggatggaatacccaggagttctctttgagaattcaggaaatgaaatcacaggacaagtcagggccaaatctgtgtgtgtgcaggcagctggctctatccacaatgagcagcgggctgcacatgtgaccgtgtgtatgcacgtctcatggtatgtgtctatgagaagctcaatccttcatggttcctatcatttggtggcagtcctgtgtcgtaattgctacttcagggtgataaatgtcttcttgaatttttggtccactgttcattaaatagcagggaatttaagtcacatgaacacatttagatcgagaaaagagggatacctccaatacttcaattttataatatctgggaacctacaaaataaaaatcatgaaaggaatcttttaagtatattaagggataagagagggtcccattcaataatcacagaaaacaaaatctacacacggaaggaagcccagtcattaacttccctgattggtgaaaaggaggaaccgatgaatgcattggccatggccgcaggcctgcacatgagggagtgaagccgtaagccactctgacctacatagtaagaactgatcttgaagagagagggagagagagagagggagagagaaggagagaaaactccatgctccaggaaacatggctaactctatctttacacgggaagttggttacttgaggagagactttgatcttgggacccataggcaccctgttgctattacacaccagagcccccacagaaaggtgaccctgctcaaggcattgtaccagatttagaagttgagaaggtcttagaactgctagagtgggcctgatgagttttgttgtagcatctaagctgtgacgtcagacgtcagtcgtcagtctgggtgtgccacagaatgtgagttgattttcgcagtcattaatattttctatgctcagggagtctgctgtaccctcaaagcatgcagatggagacttttctcttggggtaactattgtattgttttccagtttgttcctagcttgaggttagcaaagaatagtcccgggggaattaccttgggtcacagccactgggaaaggactatccagtggggatgggcccggaggggctctcaaccaagaggagggtttccatgttgggcgctttctacctgtgtgggaaagcaagctggatgctaaatggaacctttgtccattctttctttgcaggctgtggagggactcttttgggcaacgaaggtatattagccaaccctggctttcctgacagctacccaaacaacactcattgtgaatggaccatcgttgctccttctggaaggcctctctctgttgggtttccctttctcagtatcgactctccaggtggctgtgaccagaactacctcatactcttcaatggtccagatgccaactcaccaccctttggaccgttctgtggcatcgtgagtaaacaaacaagctattttacatttccacatgtaaaatttcacatgtgattttttaaacagtgacggtaacggtaactacaggcacatgcaaaccaaaaaaagaaaaaaaaaagttgtaattcagtggctttctattttgggagtatgagcaccatctagtggcagatatgtcatattacagttaccactaaaagctacagaatcaaaccttaccagggagttagggcactgtttttaatttttctcctctttattcgcacggccctttgaaccaaacaaggcaagaattatatcactggatgtctagagaattaaaaaaatataaaacttattttaaagcttgtaagattttatttttagaaacattagaaagtacatcgtaagtttaaaagtttgagaattctatgtattcaccacttacctttctttgaatacatatacacatttgcatatttgagcacacgtattttcatatctgaatgcatacacatatctgcatcttttaaactgtttataacttaccgatcctccactaacaccttcccacattaatgaagaaacttttttgatgtattatttcccatgtacctgagtgcagcctggattactaaacaaagcctctgggtttcgaaagtaacttctccccaactatatccaccattacagctctggggaacatatcttaatatgggaaaatcagttacatggggaaagaatttgatcttgggaccagtaggcaccctgtttgctattatatgcaggataaaatgagagataactttgttatctttgtatggctcctgtgtgtagatttgagtaccttccaagcagtcagatctatttgaagccacagttggcagcctgtgctgcaggaagagttcactctggactttgtagatgaaggacagaggcgctggaaggtggatgactccctcttgtagctcagtgtcatctcaaatccaaggagataatggatacgctgtatccattatcaaagtatactcctttccatatgtaatgagttttccatttattttattaacatttcacaatgttaacctatcatataaagcataagaataaaagaaataagaactaaacgctaaggtaaagcgccagcagcctggcggttgtgtgtgggtctgcatgtgctaacaccagcagcctggctggggtggtgtgcatgcgctgacaccagcagcctggctggggtggtgtgctttatggcacagcactgatgcgtgccattgttcacattagttcagatacacagaagataaaagaccagtgaggcccaccattacctccccaaccatcgccttgcagccttctgtctctggaggcattctgttgtattaattaatgcactaattattggtgtgtcacagttagaaatatatgttgcttcactcttagaacttctatagagtttctataggtaacactttaagtatgctgatatttctagaaatatgtttgatttaaaaaataacctttcttcccctcctcctcaattgcaggacactgtggtagcaccctttcatgcttcatcaaatcgggtcttcataagattccatgcggagtatgcaaccgtttcttcaggatttgaaataatgtggagtagctgaatcgggagagctgtgtgtaacccctctggctctgccccgcgccgtcagacgcaacccgcaaccctgcccagaactctgtggttctcatccccatctctgcccacgccatcaaacacggactgagcttctatggcctttacaagagaaagtgtatgaccaatttttttacatttggtgttctgaaggcagagcctggtggtgttccactcaggtgtacatgccatccttactggatgcaccatttagtggagaccttttaaaacgttctttaaagggtagaaattatcctggcacactgatgtacatttctaaaagttggtgatacaaatagctgtatggtttccactatacaaaagtcaaagtacgggtaataaacatttcttaaaaccatacagttccattgtctccatttttaacccattgcgatcaggttttcactgtgacgtgcgctcgaagatttattgtggcctctgaaactgcttcccaacacgaactccgacttctcctccttggatttgtttccatcacactgaaaagggcatggtgggccatgcagtaggagcatgtgcagtaccactcacttggcagaaaaccaggaagtgaagcactttagcgccccagttcctcctgcccaggcttttatggcctccccaaacagcgccaccagctggagaacaaaggttctgcagccccccaaacggctacaccagctggcacccaactaactgttacaatccaatagccatgagggggcggggcatgtcagattcaaaccacagcacactaaattttcagaaaaaaatcagccttactctccattgcacagcgactgttcctctctttagctttgcacacacctttctcacacaactcaagccctggtattctgcatagcatactgcccacatcatacagaaatgcatcatacttccagcctggtagttacaactcacacaggccatcagttcttattctatgtgtactttatttaacaacttcatgttacctttcaggccttatttcaagctactgccgtaacagacaagaaacccatgaatatttggttgtaaaagctggctgtctctgtttaaaaggtgttagtaaaagcaaattctcaaagaaataatgttccaagaaggatcatgctctagtcctgaagcatattttgtgtatttctattcaagttaagccaagaacacagagcatttttgtagacagttatattattaacaagcataaaaaatgcacagacccttgcatatgccagctcgtccctgagcggtggggatcacagtgtggtgcagttgtgtatcagagtgtgtcacctcaggtgccctagctctgcagctttgtcaggactgagagcatcctacagcatgttgttgcctccaggtgggtaactaagagtggtacccactacttcacttccaggaggaaaccaagtgctttcagagattgccaccgtctccagcagatcagacaacttcacagaaagaaacttagtacaggttaatcacgctaagcaaagtcttagagacttgcgctgaatgagagtgttgcttcagctgacttcaacactcaaatactgaagaaattgtttctgtagggaacagagcggcaccaatgaagtatcatcgtaaacagctctgcttcccattagctatgcatatatctaaagtgtgtggataatgctgtattggaaatgtggtaaagcaatgggtaacatcattaaatccaaaagaccccgacaagctgaacaagggaccaattgcaagaagaccatggtgtcatccatgcatgaggccatattgatctggcttctgggaacttctcatgtcttaagacagagcaagatcactcattcacccccacaaagagagcaagcacaaccagggttttcttcctggtgaggagtcctttgaaaactcagagtccattccccctttgctgtgcatacagagcttatgtttttggggtggctactgtctgaccacctaagtatgtcccctcaggcctagacgtctacctttgaaatattgtagagctttgcctcttttttaaaaaaataagttttcaactttagaattacatgataatattgagtaagcgttcttcaattctatagtcacacttcctggacatagtagtgtgcatcttggaaaagcatggatccttctcatagatacttcgttctgtggaaaccaactgagataaagctctctctctccagggaggccctatctcctattcgctaggacaggagcctgtgagcgattattcagattcaaataacaagggctataaaccccgagtacagtccgagaatgaacttagctagaggaaatggatttgacaattttatttatagccagccctcagaagatctgatgataacccatttacaacttgagatttgtgaacacctggaatgcaggagtcttgggcatgcgctgaggtcccctacttgtgggagctgatgttaactgcatctgtacagtgtcggaattgagataaactgtaggacgcagctggtacctgctggagaatggtttgggatgtggaaatggcctcctccagcaagttttggcagtataatgtgttgaatgttataagagtagcaaaacacagtttattttttccttctctccaacaagggtaaaactaatttctagaaaattcagagagtggatggaaatgtgttgataaaggtgttagcattctatctaaactccaccccacatttacctggtaacagccaagtatgctcctccccacagttacctggtaacatccaggtaggcttgacccactataaaaggggctgcttgtcccctcctccttctcttgttctcttatctcttgcttctctcttgctcttccgttccccattcccttccattacccatctctctgagtgctcatggccatgggccagcctctacttctcttctctttctcttcctctctctctctttctctctctctctctctatctctctgctactctcttaactctcctccccataccttgaataaactctattctatactataccctcgtgtagctggtcccttaggggaaaaggatgcctctgcatggggccactgagacaccccctgccccccatgcctcaccacacccccatagaatataccccctttttctttatctttttataaacacatcaaaggggacttgtttccccagataatttcaagacaggagcacaacggagatgggaattgctggtccaggagttgtttgtgtgtgtggctgcctgttgcagtgagagatggtaaggcaggaagtaggggaagtagtatagctgacactcataactgccattcccctgcaccagcaaaggcaggttggggatgactttctgcacagaactgtactcttgtctctaaagaaacgtaacaaataactcagggagaaaaggatgcagacttagacggaaacaaatccacttacaacagtgagagggggtcaggaaacaacacaaatcatgcagaaaaatcagccaaggtcttcaggcttgaacatgaaatgttaactaagatcaattaccaaaaaagactcttgcctgaggagccaacaaaagtagactgttgaaacaaactgacttagcaaacagaggtaaggttaaacttattgtctttagagctgctgagaaaaagaaatatccattagaggaagaagggaaggtcatgatgcaagagatctgctgtggtcatcatagctgcgtggaggatgaactgaactggggtgagggaaagtaatgtgagggtgcaaagaaaggcggcagtctccaggctaagggggcagggtaggggtagaagacatcaaatcttcctgcatttgactttgggcttccagccttcagaattatggcgttttgttacaccagccctaaatgatgctttaaacttatatagtaaaactatctccatcagaaacagccagagaaaaactatcagtaacctttcaaaaagcactaataaatattgatgctttgggcttagagggctcacagaaactgaaactgcatccacagcttgtatgagactgtgctagatcagtgctctcagcaaatgtctagcttaagaagtgatgaggcaagccgggcgtggtggcacatgcctttaatcccagcacttgggaggcagaagcaggcggatttctgagttcgaggccagcctggtctacagagtgagttccaggacagccaggactatacagagaaaccctgtctcgaaaaaccaaaaaaaaaaaaaaaaaaaaaagtgatgaggcctggacaatgcaagttgcctgcattgcaagtatcatcgtttcatctgaagtgtgtttaaggagaaatttctgctttcaaattcaaagtgccgaatctttttctagtacctgcttggctcattgcttatatatgtgtgtctaaacttctgcacgtctgtctgactgcttatctgtcatgtacctaatgccagaggaataattctggaatgatttcctatttaatagtgtgaaattgtcactaagattaagttttttactgggtcatcaagatctagtcattaggaggtagaacccagagggtcagcagaaagtttatctatctatctatctatctatctatctatctatctatccatccattctatttgaagaaagtgggagagttctaagagccaagatttcacggttcatgggtgtaaacaccaactcagacttctgacatagtcgtggtttactgttagcatctaaccctaagggagatagattccagttcccaagaccaaaaggaacggagcaaaacagttagatacagaaacctgtgagttaccagctgaggacataagtttcgggcggaatctttgtcttcagaatctttaccataatccagacctcatacctccaccaggtctgcgacagccaggggcacacgagggactcacggtaacaactctccgtgggaggggaccggcaacgaaagacgcaggacaaaagagagtacctgacttgtggatttctcaggacggaactccaaatccctcaacacaagctgcattctaagagtctacctcggtaccagcgaccagcttagaatcccctgcttccgcccacagaactttgtccttcagctagcttactgagcatgcgcagaatctagatcacatgcacttgctgagtccaattcaagttccaaactcaagaagatgggcgttcctcagcgtagggcggagtctctgagactaaaacgtgtacgattggtccgcctcggggtccactttcttcagtgggcagagcctcgcctggagccacagctgggaaacagttctcctaatttgggaagtgtcaggccgggaggggcgtggggttggccggattttgtgtgcgcctgcgcgatcgctgggacagggtgtgttcctgctgcgggatcctgttttcggctgatccagttcatcgctctccacccgagtttcccttgcaggtccctaatcacacccaccaggtgttgctcgctgcggtgagtgtgcggggtccaagtcctccattaaggactccatggtgatacccattctcccctaggcagccctggagaattcagcctgggcctctgctcctttcctgccttaacctgccccacaacccccaggctcccatttttgccatcatccacgtgctttgttgtcctttgctacagaacatgtccaagtcactgaagaagctggtggaggagagcagggagaagaaccagccggaagtggacatgagtgacaggggtatctccagtatgttggatgtcaacggcttgtgtaagttctcttggacagttgctaagtttgtaagtaactgctctcttgggaggcgagtttcggaagcctgccattccacctttgctcgtcacttggtcacttgtcaggagcttgcaaaccacagttagttctgctgggactggtgaaccagatgagaacgtcacacgaggtgtgctgcagttccttctcagcgggtgagggagcttcatagctttgaagtccatcttccatgtagtgtcccaagtagccatttttgtttgtaatttggaagtcacgttttactctatgaatcatgagctggtggtactcaaaaattacatgcatagtaagaattcttgtgccagtagtattttcaacattttccttcattacgtattcctgggtcattctcccatttgtgttcaggcattgctcaatcttgtgatccaagctcagcacccgtttaatcagggtgttgctttcagctgtgaacttatatgactcttactttattgtttttttctcatctgtaaaaccagacagggaactcagtacaagtgggaatggtcataaactccattgcctgtgcccttctcatgggcatctcctcttctccacatggagacggttatccccatgtgtaaatgctgcatcactatcgccagattttgtgttgagaattctagtgtccactttttcatgatctttaaattctgcaaactaattctggtctttgaaaacactttttaagtaagtcaccacgcttctgtaggttcctgtgacttcatttggatcctctgagagcttaactgttgagagtggtacccccacattcctcagcgggacatacaaggtctgattctgatcataaaccgatcccttccatgcattcattccaagcgatgttgaataagctccactgagtgaccctgagcagccagatcttcctgacttgcaagtctgttgtctccttatctatatgcctttccacctgacgtcccttaacttaactgccaagagtcagctcagacatcatagcctatgaaaaacgttctctttctatcttcctgtgtgaacccacctttctacaaggcacagattgcatagcctttaattaattaattttttaaaaaagatttatttatttcatatgtgagtacacggttgctctcctcagagacaccacaagagggcttccattacagatggttgtgagccaccatgtggttgctgggaattgaactcaggacttctggaagaccagccagtgatcctaaccgctgagccatttctccagtccaattaatttatttttaatccagtagactctcttcctcattcgaataccaagagaatatgcaatgccatgcttgtgttcttgagaatagtgtctggaacacagtcggcactctaaatgttgataggagtcagagtaggatgttagaacatcaaccagaggggagctgtacagagaccttaaagtcagtggatagcttcctaggcatgaagactcttgtctgttcttggagtacaggctgggatggatgttgacacattaaggccaaagtggactgcagacatctagctatcatgaagagtcctgctttgacatacccttagcatcttgataacttcttggtttgggtgacatgtgttggtctcttgcagtaagaatgggtttgtggtgatttttgacactgaagtgtctgccgaggatctagacactcccattgctttggctttatttcggtttccactgctgtaaaggaagaagaggctaaacagagagcaggggaccaggtgcatctgcgccctgaacagcacctagttctctgcctgctgcatgcctccctatgggctgaagcctgagcccacagtggtctgagccatttgtatcattctggaagatgaagacccatgtaatattaacaaatgacaagagtagctctgctatttcagttcagctccattatctctttgaagccttggctcttactacaggggaaaagatagccacttgcttcctgaaggggaaaaaaaactgcttctggtctaatactgggggataaaaagcaaggtcatttctgtagttgctcaaaccagaaaccaagagacaacattggtatttcttggaaagatcagcggaagtttaaaaatctcactccctctgctggtgttggcttaaggaagggctgggtgtattgagtccttgctgtcaggactcctaagaacctggaagactgtagagtgttcactggaagcctgaccctaaactggctttatcagccactcactggattggagctcagtggtggagcgtttgtgtagaacatgtgcagttctggggttcatctcaaacacaacacaaataaatttaaaacagcaatcagttggcatccaatgtgggtgctatatgataaaattacctcgagtattgtgtaagaattctcttcttctcttctcttctcttctcttctcttctcttctcttctcttttgcttaggtttatctgcagctatgacatttagaatgcaagcatcctgattaaacacaggaaaccattaacttacatgcagagagaatgactgtgtcttgtaccctaagctttcctttttttgcatttactaatttaacttcttaaaaataatgtaatgatttggctttgaagatgagaagggaggatttgcatttctttgaagcatttgaaatgccagcatttctgcttgggggtttgggatgtatgagcacaccaaagtgtttccatagatgaagagatgtgagttaccttctattttgttgagacaggatctcatgtagacctggatggccttgaactcgttttgtagtgaggaggaccctcctgcttccatctcccaagtgctgggatcacaggtgtgcaccaccacaggctaccagttaaccctgcattgggagctcctatggagaatgcagttatcattctggcctgttttgggggcaagtatcagtgagactcaggaggaatgagtgtattctagcaataacctactcacatctccctccccctttttttcctcctgtaagttggtgctgaggcccagcttggggtttgaaatgtgaaggagtcatttctcgttgcccttctgttgagtctttgccagttaacactgttgaaggaattgagagcgtacctgtctgtgactctattcttgggtcaccatctctgggaggcttctcaaggctcttaaattttaacccagccccctccagcttggccagcttgtctctcctgcatccctctgtctggcagtgcctggaaagagtttctggagtgaagactatcactgcttttagttaagaaatccttatttgaaaagcattttatacaatacattctgattgggcttttcctctcttctgtctcccacctatcctctctgcccacccaactccactccacaccctttctttctctttaaaaaacaaacatacaaaaaaaaaataaaaaaagaaaactgcagaaacaattctgtacaacagcctccaacacacacacagaaaacaagaaaacaaagtgtacaagccaaagaccaacaagacaaaaacatccaaactaagcaataggagacaaaagatctacaaatatagcattgagtttgttgtttttgactgggtactcctgaacagggcatctaccctaagtatggctaatatgacccatggaaaaccgttggagaaaactaatttttcctttgcaagcttgagtctcatccggcttgaacctgtgctgatgctgtggcatgctgccacactctgttgtgtcctgttgtgtctggcgttctccctcccctctggctcttcaaatcccgctgcctcctcttccccatagctccccaattcccgagggcagaagctggaggaggagacctttaggactgaatactgtgaatctctcactgactgtacactgtccagttgtgggtctgtgtatcagttcccatctactgtgagaagacgtttttctgaggacgactaagcaaggcactgatccatcagtaaagaaagagtgtgccattaggagccattttattgtatgttcttttagtagagcaccggtatttggtttttccctgggccatggcttgtctactctcaggctcttggccatccagtggtcaggcatggtttccatctcatgggccgtaaggctcgttatctgtgtttctgacaccagcatatttcctgggcaggtcactgttgaaggttgcaacattgcagctcaattgatgatgcctttctcatctggtaggtagcatacagagtactggaatgctattcagtaggggcacaggctctggtatggcagcagcacgccttctccatgttcagtgagagatgtgggtgttctcttcggcaatagggccttcctgtcagtttgtggagagcaaccaatggcctgagatattcgtgggtttacagtggggatcctttgccattctggcactggaagttttacctggtggtgaaaggtttttagttggggcactgtctcccccattctttggtgattctacgtatctctctttcatacatgtatttattttaggaagcttccgca

SEQ ID NO: 447 - DNA, 10461 bp, Mus musculus
tattttgctgatcaaagagcaactggctgcaagcagccctcaaattctggactcagctggccagagtggtctccctcttgccggcgaggtgagcgggggagctgcggagcatggcctcacattttctctggggttttgttactttattgatggtacccggattagacggtgaaactggaacaccagagcagaagctacagaaaagaattgctgatctccaccagcctcggatgactacggaggagggaaacttagtgtttcttacaagctctgcccaaaacattgaatttagaactggttccctggggaaaatcaaattaaatgatgatgaccttggcgaatgtttacaccagctcgtggatcttgagagagattttcaaagcttacagcagaatgtggagagaaaagtttgcagtagcaatccctgccacaatggtggcacctgtgtcaacctgcacgactcctttatttgtatctgcccttcacagtggaagggtctcttctgctcagaggatgttaacgagtgtgtactttatgctggaacaccctttggctgccagagtggatccacctgtgtgaacactatggggagtttcagatgtgactgcacgcctgatacgtatggacctcagtgtgcatccaaatataatgactgtgaacagggctctcagcagctctgtaagcatggcatctgcgaggatttacagcgagtttatcatggacagctgagatttaactgtatctgtgatgctgggtggacaacactgccaaatggtatctcctgcacagaggacaaagatgaatgcagcctccagccttcaccttgttcagaacatgcacagtgtttcaatacacaaggttccttctactgtggcgcctgcccaaaaggttggcaaggaaatggttaccaatgccaggatatcaacgaatgtgagatcaacaatggtggctgttcccaggctccactggtcccctgcctgaacactccaggatcattcacctgtgggaactgtccagcagggtccttgttgcctgtctgcacctgtcctccgggatatacaggaaatggttacgggtctaatggatgtgtacgcctcagtaatatgtgctcaagacacccgtgtgtaaatggacagtgcattgaaacagtatcaagttacttctgtaagtgtgactcaggctggtttggacagaactgtacagaaaacattaatgagtgtgtgagcaacccctgtttgaatggagggacctgtattgatggtgtcaacggcttcacctgcgactgcacgagctcctggactggttattactgtcagactccccaggcagcttgtggagggatcctctcagggacacaaggaacctttgcctaccagagcccgaatgatacctatgtccacaatgtgaactgtttctgggttgtcagaaccgatgaggaaaaggttctgcatattaccttcacgttttttgatttagaatcggccagcaattgtccccgggagtaccttcagattcatgatggagactcctctgcagatttcccacttggtagatactgtggctccacgcccccccagggggtccacagcagtgccaactctctctatttccatctctactcagaatacataaaacgggggagaggctttaccgcacggtgggaagcgaagctaccagagtgtggcggcatactgactggtaattatggttctattacatctccggggtaccctggaaactaccccccaggaagagattgtgtctggaaccttctagtcagtcctggctccttgataacatttacctttggcaccttgagcctggagagccacaatgactgcagtaaagactatttggagattcgagatggtcctttccatcatgaccccattcttgggaaattctgtacttctctgtctaccccaccactccagactacaggtcccgcagcaagaattcatttccattctgactccgagactagtgacaaaggcttccacatcacctatctaacgacaccatctgatctgtactgtggtgggaattacacagacacggagggtgagctcctccttcctcccttgactggacctttcagtcacagcagacagtgtgtctatctcatctcacaaccccaaggagagcaaatagttatcaacttcacccacgtggagctggagagccagaggggctgttctcacactttcatcgaggttggagaccatgagagcctgcttcgaaagatctgtggcaatgaaaccttgttccccattagatcaatttctaataatgtctggatcagactgagaatagacgctttagtccagaaggctagtttcagagctgactatcaagttgcttgtgggggtgaattaagaggagaaggagtcattcgttcacctttctatcctaatgcatatgctggacgaagaacctgtaggtggaccatctcccaacccccaagagaagttgttcttcttaacttcaccgactttcagattggaagttcttcttcctgtgatacagattacattgagattggtcccagctctgtcttgggatctcctggaaatgagaagttttgtggcacaaacataccatcatttataacatctgtatacaatgttctttatgttacatttgtgaaaagttcttctatggaaaatcgtggcttcatggctatgttcagcagtgagaagttagaatgtggaaaagttctcacagaatctactggaatcattgaaagtcctggtcatccaaatgtctacccaagcggtgtaaattgtacctggcatatagtagtccaacgcggccaactgattcgtttggtattcagctccttttacctggagtttcattacaactgcgcaaatgactacctggaagtttatgacactattgctcagacgtctcttgggagatactgtggaaaatccatcccgccttctcttaccagcagctctcattcaataaagctgatattcgtgtctgactctgctcttgcccacgaaggcttttccataaattatgaagcaattaatgcatcatcagtgtgtttatatgactatacagataattttgggaggctctcctccccgaacttccccaacaattacccccataactggaactgcgtctacaggatcactgtgggactcaaccaacagattgcattgcatttcacggactttgccttggaggactattttgggccaaagtgtgtagattttgtagaaatcagtaacaagctatggctaaggtttaagagtgacacggcactcacagcaaggggtttttcagcttactgggatgcgtcatcaacaggctgtggaggcaatctcaccacccccacaggggtgctcacatcgcccaactacccgatgccctactaccacagctccgaatgctactggcggctggaagccagccgtggcagccctttcctgcttgaattccaagacttccacctggaacaccaccccaactgctctctggattacttggccgtgtttgatggcccgagtaccaactcccgtctgataaataaactatgtggggatacaccacctgctcccattcgttccagtaaagacattgtattgttgaagctgaggactgatgcaggtcaacaaggacgtggctttgagatcaactatcggcagacatgtgacaatgtggtaatagtgaataaaacctctggcatcttggagagcataaattacccaaatccctacgataaagaccaacgttgtaactggaccatccaagcaacaacaggcaacacggtgaactacacatttctggaatttgatgtggaaaattacgtaaactgctccacagattacttagagctctatgatggaccacaacggataggacgctactgtggagaaaatatccccccaccaggagctacaacaggttccaaacttattgtagtgttccatacagatggggttgactctggagagaaaggatttaagatgcactggttcatccatggctgtggtggagagatgtctggaaccatgggctcctttagcagccctgggtaccctaacagctatcctcataacaaggagtgtatctggaacattcgcgtggccccagggaatagcattcagctcaccatccatgactttgatgtggaatatcatgcaagctgcaagtatgacaccctggagatctacacaggtcttgattttcactctccaagaatagcccagttgtgttctcgatcaccatcggcgaatcccatgcagatttccagcactgataatgaactagcaatccgatttaagacagacagctctttaaatggaagaggtttcaatgcctcatggcgagcagtccctggagagtgcggagcccacatcattactgactcttcagatagcatctcctctccactgtacccagccaactatccaaacaaccagaactgtacctggataattgaagctcaacctccattcaatcatattgctctctcctttactcactttcatctgcaaagcagcacagattgcacacgggactttgtagaaattttggatggcagagactctgatgcacctgtccaaggccgttactgtggtacctctctgccccatcccatcatatcatttggcaatgccctgacagtgaggtttgtctctgattctgtgtacggttttgacggtttccatgccatctactctgcatcaacatcagcttgtggtggaaccttctacacgggcgatggcatcttcaatagccctggctacccagaagactaccattctaatacagaatgtgtctggaacattgccagctcccctggaaatcacctgcagctgtcttttctatccttccagttggagaactctctaaactgtaacaaggattttgtggaaatccgagaaggaaatgccacgggccacttgatgggacgatactgtggaaactccctccctggcaattattcatcaatcgagggacataatctgtgggtcagatttgtctctgatggctcaggcactggaatgggcttccaggccagattcaaaaatatatttggcaatgataatattgtgggaactcatgggaaaatcgcaactccattctggcctggaaattacccacttaactccaactacagatggacagtaaatgtggattcttctcatattatccatggtagaatcttagagatggacatagaattgacaacaaactgcttttatgacagtttaaagatttatgatgggtttgacattcattcccgtctgattggcacttactgtggtacccaaagagaatcctttagctccagcagaaactctctgacattccagttttcttctgactcttccaagtcaggaaggggattccttctggagtggtttgcagtagatgtttctaatgtaaccctgcccaccattgctccaggagcttgtggagggtatatggtgacaggagacacccctgtcttttttttctccccgggttggcctggaccatatggtaatggtgctgactgtatatggataatttatgctcctgattctactgtggaactcaacattctctccatggacattgaagctcagctatcttgttcctatgacaagctgatcataaaagatggagacagtagattatcccagcagctggctgttctgtgtggcagaagtgttcccggacccatccgctcaactggagaatacatgtacatccgcttcacatcagatggcagtgtcaccggagcaggcttcaacgcctcctttcaaaagagctgtggtggatatttgcatgcagaccgagggatcattacatcccccaagtacccagacaactaccttcccaatctcaactgctcctggcacgttctggtccagagtggtctgaccatcgccgtccattttgagcagcctttccagattcaaaacagagactcttcttgcagccagggggactacttggtgctaagaaatggaccagataaccactctccaccattgggaccctctggaggaaatggtcgtttctgtggaatttatactccatcaactctcttcacctcagacaatgaaatgtttattcagttcatctctgataatagtaacggtggacaaggatttaagatcagatatgaggcaaagagtttagcctgcgggggtactatctacatccatgatgctaactctgatggatacgtgacctcccccaactaccctgccaattatccccagcatgctgaatgcatttggatcttagaggcaccttcagggagaagcatacagctccaatttgaagatcaattcaatattgaagaaacacccaactgttctgcaagctatcttgagttgcgtgatggagccaactcaaatgcacctgtgctttccaaattgtgtgggcacactttgcctcgaaactgggtatcctcaagaggactaatgtacttgaaatttcatactgaaggtggttccggctacatggggttcaaggctaagtattctatagtttcgtgcggaggaactgtctcaggggacagtggggtcatcgagagcgttggttacccaacccgtctatatgcaaacaacgtgttttgtcagtggcatatccaaggcctcccaggacactatctcactatccgttttgaagattttaaccttcagagctcccctggttgtgcaaaagactttgtggagatctgggagaatcatacctctggtattttgctggggagatactgtggaaactccattcctagcagtgttgacacttctagcaatgttgcttcaatcaggtttgtcacagatggctctgtcactgactcaggatttaggctgcaatttaagtccagcagagaagtgtgtggtggggatttacatggccctactggcacatttacttctcccaactacccaaacccaaatcctcatcccaggatctgtgagtggacgatcaatgtacacgaaggaaggcagattatcctcacttttaccaatttgaggctaagtacccagcaatcctgcaacactgagcacctcattgtattcaatggcattagaaacaactctccccgactacagaaactgtgcagccgtgtgaatgtgaccaatgagttcaaatcttcaggaaacacgatgaaagtgatatttttcactgatggctcccggccatatggaggcttcactgcttcctacacctccagtgaagatgcagtgtgtggtggaactcttccaagtgtctctggtggaaacttttcttctcctggctataatggaatccgtgattacgcgagaaatctagactgtgaatggactctcagtaatccaaatcgggaaaattcatccataagtatccattttctaggactttccctcgaaagtcatcaagactgtacatttgatgtcctcgagtttcgagtaggtaatgctgatggacccctaatagagaagttttgcagcctgtcagcaccaagagtgcccttggtcatcccctaccctcagctcacatttagtgactttagtgtggagaaccatccaacttgcacgtcagactcggtcactgtcaggaatggtgactcccctggatcacccatcataggacgatactgtggacagtcagtccctgggccaatacagtctggttccaaccagcttgtagtaacctttaacacaaacaatcaagggcaaagtcgtggattttatgcaacatggaacacaaacactttaggttgtggtggaacacttcactcagataatggtacaatcaaatctcctcattggcctcagacattcccagaaaacagcagatgttcctggacagctgtcactcatgaaagtaaacactgggagattagctttgacagcaatttccgaatccccagcagtgacagccagtgtcggaacagctttgtgaaggttggtgcacacctttgtttaactcgttttgtgaatggaagcattttggctatagagaactggaagacatttctcaaagagaagagggtctgggaaggaatgttagagaccaacgatgccctgttagccacaagctgtgggaatgtggctccaagtcccattgtcacattaggaaacattttcactgctgtcttccaatctgaggagatgccagcccagggcttctctgcatccttcattagccgttgtggacgtacattcaatagctctacaggtgacatcgtctctccaaacttcccaaagcactatgacaacaacatgaactgtaactactacatagatgttgcaccacagtctctggtcatcctgacgtttgtgtcctttcatttggaagatcgctcagctgtctcgggaacctgcgattacgatggcttgcatatcatcaaaggtcacaacctctcttccactcctctcgtgaccatatgtggttctgaaaccttgcgtcccctcaccatagatggcccagtgatgctcaacttctattctgacgcatatatcacagactttgggttcaagatttcctacagagtcgccaactgtggtggaatctacagtggaacctatggagtccttaacagtccttccttctcatacaccaactaccccaacaatgtctactgtgtctacagtctgcaagttagaaacgacagattgatactacttcggttcaatgattttgagattgttccctccaacctttgctcacatgattacctggaggttttcgatggtcccagcattggaaatcgatctattggaaagttctgtggttccacacttccacaagttattaagagcaccaataacagcctgaccctgctattcaagacagattcttctcaaacagcaagaggttggaaagtatctttccgggagacaataggaccacagcaagggtgtggtgggtacctgactgaggacagcaagagctttgtgtctcctgatcatgactcagatggactttatgacaaaggtctaaactgcatatggtacataattgcccctgaaaacaaacttgttaagctcaccttcaatgcatttactctggaggaaccatcgtcgccaggaaaatgcacctttgattacgtgcagatagcagatggtgcaagcataaactcatatttaggcggaagattttgtggttccagtaggcctgccccttttatttcttctggcaactttcttacagttcaatttgtctctgacataagtattcaaatgagaggatttaatgcaacatatacctttgtggacatgccttgtgggggaacatataatgcaacttcgatgcctcaaaacacatcatcacctcagttgtcaaacatcagacggccattttccacctgtacttgggtcattgaagctcccccacaccagcaggtccagataactgtgtggaaactgcagctgccctcacaagactgctcaaggagctccttagaacttcaggattcagaacagactaatggaaaccaagtgactcagttctgcggtgcaaactatacaaccttgcccgtgttctattcctcaggaagtaccgcagttgttgttttcaaatctgactttttaaacagaaactctcgagtgcatttcacctatgagattgcagactgcaacagagaatacaaccaagcatttggcaatctaaagagtcctgggtggcctcagggctatgccaataacctggactgctccatcattctcagagccccgcagaaccacagaatttccctctttttttactggtttcagctggaagattcaagacaatgcatgaatgacttcttggaggtaagaaatggcagcagcagcagttcaccactgcttggcaagtactgcagcaacctgctgcccaaccccatcttctctcagagcaatgaactgtatctgcacttccacagcgatgactcagacacccaccatggatatgaaattatctgggcctcctctcctactggctgtggagggactcttttgggcaacgaaggtatattagccaaccctggctttcctgacagctacccaaacaacactcattgtgaatggaccatcgttgctccttctggaaggcctctctctgttgggtttccctttctcagtatcgactctccaggtggctgtgaccagaactacctcatactcttcaatggtccagatgccaactcaccaccctttggaccgttctgtggcatcgacactgtggtagcaccctttcatgtgagcttctatggcctttacaagagaaagtgtatgaccaatttttttacatttggtgttctgaaggcagagcctggtggtgttccactcaggtgtacatgccatccttactggatgcaccatttagtggagaccttttaaaacgttctttaaagggtagaaattatcctggcacactgatgtacatttctaaaagttggtgatacaaatagctgtatggtttccactatacaaaagtcaaagtacgggtaataaacatttcttaaaaccatac

SEQ ID NO: 448 - protein, 3387 aa, Mus musculus
AGELRSMASHFLWGFVTLLMVPGLDGETGTPEQKLQKRIADLHQPRMTTEEGNLVFLTSSAQNIEFRTGSLGKIKLNDDDLGECLHQLVDLERDFQSLQQNVERKVCSSNPCHNGGTCVNLHDSFICICPSQWKGLFCSEDVNECVLYAGTPFGCQSGSTCVNTMGSFRCDCTPDTYGPQCASKYNDCEQGSQQLCKHGICEDLQRVYHGQLRFNCICDAGWTTLPNGISCTEDKDECSLQPSPCSEHAQCFNTQGSFYCGACPKGWQGNGYQCQDINECEINNGGCSQAPLVPCLNTPGSFTCGNCPAGSLLPVCTCPPGYTGNGYGSNGCVRLSNMCSRHPCVNGQCIETVSSYFCKCDSGWFGQNCTENINECVSNPCLNGGTCIDGVNGFTCDCTSSWTGYYCQTPQAACGGILSGTQGTFAYQSPNDTYVHNVNCFWVVRTDEEKVLHITFTFFDLESNCPREYLQIHDGDSSADFPLGRYCGSTPPQGVHSSANSLYFHKEYIKRGRGFTARWEAKLPECGGILTGNYGSITSPGYPGNYPPGRDCVWNLLVSPGSLITFTFGTLSLESHNDCSKDYLEIRDGPFHHDPILGKFCTSLSTPPLQTTGPAARIHFHSDSETSDKGFHITYLTTPSDLYCGGNYTDTEGELLLPPLTGPFSHSRQCVYLISQPQGEQIVINFTHVELESQRGCSHTFIEVGDHESLLRKICGNETLFPIRSISNNVWIRLRIDALVQKASFRADYQVACGGELRGEGVIRSPFYPNAYAGRRTCRWTISQPPREVVLLNFTDFQIGSSSSCDTDYIEIGPSSVLGSPGNEKFCGTNIPSFITSVYNVLYVTFVKSSSMENRGFMAMFSSEKLECGKVLTESTGIIESPGHPNVYPSGVNCTWHIVVQRGQLIRLVFSSFYLEFHYNCANDYLEVYDTIAQTSLGRYCGKSIPPSLTSSSHSIKLIFVSDSAHEGFSINYEAINASSVCLYDYTDNFGRLSSPNFPNNYPHNWNCVYRITVQQQIALHFTDFALEDYFGPKCVDFVEISNKLWLRFKSDTALTRFSAYWDASSTGCGGNLTTPTGVLTSPNYPMPYYHSSECYWRLEASRGSPFLLEFQDFHLEHHPNCSLDYLAVFDGPSTNSRLINKLCGDTPPAPIRSSKDIVLLKLRTDAGQQGRGFEINYRQTCDNVVIVNKTSGISINYPNPYDKDQRCNWTIQATTGNTVNYTFLEFDVENYVNCSTDYLELYDGPQRIGRYCGENIPPPGATTGSKLIVVFHTDGVDSGEKGFKMHWFIHGCGGEMSGTMGSFSSPGYPNSYPHNKECIWNIRVAPGNSIQLTIHDFDVEYHASCKYDTLEIYTGLDFHSPRIAQLCSRSPSANPMQISSTDNELAIRFKTDSSLNGRGFNASWRAVPGECGAHIITDSSDSISSPLYPANYPNNQNCTWIIEAQPPFNHIALSFTHFHLQSSTDCTRDFVEILDGRDSDAPVQGRYCGTSLPHPIISFGNALTVRFVSDSVYGFDGFHAIYSASTSACGGTFYTGDGIFNSPGYPEDYHSNTECVWNIASSPGNHLQLSFLSFQLENSLNCNKDFVEIREGNATGHLMGRYCGNSLPGNYSSIEGHNLWVRFVSDGSGTGMGFQARFKNIFGNDNIVGTHGKIATPFWPGNYPLNSNYRWTVNVDSSHIIHGRIMDIELTTNCFYDSLKIYDGFDIHSRLIGTYCGTQRESFSSSRNSLTFQFSSDSSKSGRGFLLEWFAVDVSNVTLPTIAPGACGGYMVTGDTPVFFFSPGWPGPYGNGADCIWIIYAPDSTVELNILSMDIEAQLSCSYDKLIIKDGDSRLSQQLAVLCGRSVPGPIRSTGEYMYIRFTSDGSVTGAGFNASFQKSCGGYLHADRGIITSPKYPDNYLPNLNCSWHVLVQSGLTIAVHFEQPFQIQNRDSSCSQGDYLVLRNGPDNHSPPLGPSGGNGRFCGIYTPSTLFTSDNEMFIQFISDNSNGGQGFKIRYEAKSLACGGTIYIHDANSDGYVTSPNYPANYPQHAECIWIAPSGRSIQLQFEDQFNIEETPNCSASYLELRDGANSNAPVLSKLCGHTLPRNWVSSRGLMYLKFHTEGGSGYMGFKAKYSIVSCGGTVSGDSGVIESVGYPTRLYANNVFCQWHIQGLPGHYLTIRFEDFNLQSSPGCAKDFVEIWENHTSGILLGRYCGNSIPSSVDTSSNVASIRFVTDGSVTDSGFRLQFKSSREVCGGDLHGPTGTFTSPNYPNPNPHPRICEWTINVHEGRQIILTFTNLRLSTQQSCNTEHLIVFNGIRNNSPRLQKLCSRVNVTNEFKSSGNTMKVIFFTDGSRPYGGFTASYTSSEDAVCGGTLPSVSGGNFSSPGYNGIRDYARNLDCEWTLSNPNRENSSISIHFLGLSLESHQDCTFDVLEFRVGNADGPLIEKFCSLSAPRVPLVIPYPQLTFSDFSVENHPTCTSDSVTVRNGDSPGSPIIGRYCGQSVPGPIQSGSNQLVVTFNTNNQGQSRGFYATWNTNTLGCGGTLHSDNGTIKSPHWPQTFPENSRCSWTAVTHESKHWEISFDSNFRIPSSDSQCRNSFVKVGAHLCLTRFVNGSILAIENWKTFLKEKRVWEGMLETNDALLATSCGNVAPSPIVTLGNIFTAVFQSEEMPAQGFSASFISRCGRTFNSSTGDIVSPNFPKHYDNNMNCNYYIDVAPQSLVILTFVSFHLEDRSAVSGTCDYDGLHIIKGHNLSSTPLVTICGSETLRPLTIDGPVMLNFYSDAYITDFGFKISYRVANCGGIYSGTYGVLNSPSFSYTNYPNNVYCVYSLQVRNDRLILLRFNDFEIVPSNLCSHDYLEVFDGPSIGNRSIGKFCGSTLPQVIKSTNNSLTLLFKTDSSQTRWKVSFRETIGPQQGCGGYLTEDSKSFVSPDHDSDGDKQCIWYIIAPENKLVKLTFNAFTLEEPSSPGKCTFDYVQIADGASINSYLGGRFCGSSRPAPFISSGNFLTVQFVSDISIQMRGFNATYTFVDMPCGGTYNATSMPQNTSSPQLSNIRRPFSTCTWVIEAPPHQQVQITVWKLQLPSQDCSRSSLELQDSEQTNGNQVTQFCGANYTTLPVFYSSGSTAVVVFKSDFLNRNSRVHFTYEIADCNREYNQAFGNLKSPGWPQGYANNLDCSIILRAPQNHRISLFFYWFQLEDSRQCMNDFLEVRNGSSSSSPLLGKYCSNLLPNPIFSQSNELYLHFHSDDSDTHHGYEIIWASSPTGCGGTLLGNEGILANPGFPDSYPNNTHCEWTIVAPSGRPLSVGFPFLSIDSPGGCDQNYLILFNGPDANSPPFGPFCGIDTVVAPFHVSFYGKRKCMTNFFTFGVLKAEPGGVPLRCTCHPYWMHHLVETF

SEQ ID NO: 449 - DNA, 325876 bp, Homo sapiens
catctcatcctttctgccattgatgacaacaccttaaatcttcccacagatctatgtggcacttcaattaacaaatcccctgggaatgatgcccctttgtaaggcatcagccttgttaaatcactcctctaaccgtaaatcacatccgtaatgcaaagcttcctctcacaagataaagatgcctgtgtgtactgcttctgcgtctatcttcccaattaaaggtacaagaggcagagtctgaagagtgccaggtatccccaaactttgttttctttttcttttttttcattttccttcccagaagagaaccaaactgtttttttcttccccccatcggtggtgacatcctcacctctcttgctctcctcccctaatagaacacaaaatatcatcacaaagatgtactttccccttttcctaagatcagatccaatataagttgtttgcagttatttaccacctacatttcttctgtcattcatgctgaagtctgagtgcaatcagacattttcctttgattatcgtatgaatggtgtctaaatatttaacttcaccgccttgtttggggaattttaggggtcaccaagtagaaaactcattttgtcctttttaggttgatttggaacaggatggcaggagggttcacctatggtaaactccgcttcattgcttcacaccttggaaaccaagcttggattaatccaatggagctgctgaagtccccattccgggagctgttggaggtagagaaagctctgttgatttttttactagcttttggagcctttaatcctagcaattagtatctcctctgctatggctgatccttataatgatgcgagaccctccagtgcatattttatgttttctgtaacatttgcttgagttacaattaggaagctgtgtgtgcacacgtgtgtatacatgtgccacgaacacccctgtgctcctcctccaaagccctattcccctattgcgtttgtccctctggatttgaatttcgttatttttttctcattgtttatgaagggattatattacttaaaaaaaaaaacttgaaaaaagtggaaaagttctccaaactctcaacaatctgctttctcaggaaaagctctgccaaacctcagcaatttaaatgttaatgattaactcataattctttttcattctactcaaagataattgtagtcattgtaataatgagcatggagaacaaatgtctgctttatgtgccttgagccaagaccacactgctttcaaaaagatcagttcatcacagtagtagacttggtaatttcctacatggtaatgcacttcccatgaaatgagcaaaagaatagttttaaatgtaccttgatttccatcattattttatgtaatccttcatggaaaatgaaagaattggaacaatgttatattgccctgaaattttgcagaaaatcacaaaactgacatatgtaaatgtatcttttaagcaatgttacgtccctgaaaaagagaatgaattaagtgtcatgaaggttaaaagatcgttatattcacaaatgtttccattaatgactaaaaaccagattaattctacagtgttctgttttaaactgatatgaaaatgaaaagggactaaaaaaagcacaaaagccagattgaagctataacatgtaatgggagctagcattaggggtgtgagaatcttgccaatttgtccatcctccaacgcacctctgcatctcaaccctctcctcatttttatgactcccacattgatccagtcctccagataaattcagctggcctagcagaaatatcacataaggattattgcactcaagataaaagaacatccccctattaaaaagattaaatcaacattctttaacctgccacttaaggccttctgtcgatgtctcttcctttacccagccactttccttcaaggtcaccctgctggacaagtggaacaacctttttttttttttcttttttttttggcagagtttcgctctgtcacccaggctggagtgcagtggctctcggcttgctgcaacctccacctcctgggttcaagcgattctcctgcctcagcctcgcctcctgagtagctgggactacaggtgtgtgccaccatgcccggctaatttttttgtatttttagtagagacagggtttcaccattttggctggtctcaaattcctgacctcaaatgatcagcccgccttggcctcccaaagtgctgggattacaggtacgaggcactgagcccggccagtggaaccactttctatagtgtgcccatactgggccttggacatctttcctagtttggtacctgctgtttacttaacagcatgctactgtgtatctgtgccatcttgtcacacttgtctttgtaatgttgcctaactctggctctccagatttgtacattacgactttattgtaaatcagagaaggtcaataaatttacttctttcaaatttcccccatggtcaaggacttcgtatgtcttcactaaatgcttattaagcctctaaaacaatggaatttagataaagctggtaggaataaaaagtgaacattggtataaaaaacagcagtgaaatatactaatgtggcaatgagatgctcttcaagaatttggagaaaaatacagaaaataagagggtaagtaaagtctgtacacttagtataaaatctccagtcacctctactagtccaggtagaagactggagaatttttttctgaacgtctccagggcaagatgccttcaaagatgggcatttggggttccccagtgaaattgtcagtttgccattcggttgctctgtggcaaagcctaccagttataatcgccacccatgcacacagagcctaccatccattctgtaatgtgttatttttaaatgtcaatgaacatataaggatccataggtatttgaggaaagcctctagcatgaattagaaagacctaaaccagcaaacaaatgggagaaaaacaacttagagaaaacagagcccatacaggaaacaagaaaacatcaaaaagcaactatctaaaaattactagatgatgttacaactacgaaacaagagcaaaaatcaaaaaaggggttttcaaatttaaaatgatagcaacattttaaaacaaattactagaaaattaaaagataaatactttctcagaaagtataacaaaacaagacaaagaggtggaaaatagaaaattatttaaaaattggagaatcaatctaagaaaaatgtagaaatggaaatgcagacgcaatggcagggaccacttgactctcgtcatgagtgaaggtgtctttgtgctcctaggtcactttaatgagtgtacagataattggcagggaggaggatctttgtaaaatgaagattctaattcagcaggttggcagtagcacctgagattttgcatttctgacacgctcctgagtgacgcctgtgctgggtctgtggaccacacttggagtagcaaggttctagtctacgccatctctacatcttccccactcccatcttagatggttaaaccacttgcagagagtgaggcctgtgaagcagcagagtggttgatattccttagagctctatgtatccaaatctgaactatctttcctccaaaatcttcttcccctgattattctcttactcaattaatgacatctctttccttccaattccaattttccaagcaagaaacctctgttcttttttttttttttttttttttgagacagagtctccctctgttgcccaggctggagtgcagtagtgcatagtgcaatcatggttcactgcagcttccgcctcccaggttcaagtgattctcctgcctcagcctcctgagtagctgggactacaggtgcccgccaccacgcctagctaatttttgtatttttagtagagacagggtttcaccatgttggccaggctgatcttgaactcccgacctcaagtgatctgcctgcctcggcctcccaaagtgtcaggattacagacatgagccactgcacccggccaacttccccctctaatagttctaatgaaatattaactacccaagtatttctgtagcctgttttctgaatatctttctcactgtctcctcatctgactgtccattgccttaaggctccccaggtcacatctctttaagtgtactctaggcgggccgatcatgaggtcaggagttcgaaaccaccctggccaacatggtgaaaccccgtctctaataataatacaaaaattagccgggtgtggtggtgtgtgcctgcaatcccagctactcaggaggtggaggcaggagaattgcctgaacccaggaggcagaggttgcagtaagccgagatcacgccactgcactccagcctgggtgacagagtgagactccatctgcggggggaaacatgtactctaacctccttaccaactctgggtctcagacatggctccacagggttgcttgtaaaatgcaaacatgaccatgttaatctcttccctaagagactctcataattctgcagtattaaaagtaaataaaatctaagctcattaaaatgatatttcaaagtccttcttgatttggcttcctgttcatttttaaaacttcatctcccacatatagacactgctgtagccctgctgagctactttctactgaaaagctttgtatacaccattactctgcctgaaactcctcactctactattctacctgggaactactcagatggactcctgggaagcctgcattccccttccaggcagagttaattctctcctccattgttctccaataaaggtctctctctctctctctctctctctctctccctccccctcccccaacctctgtttttgtccttagccatattctgattaccatgaccccttcttaaccttaaattcccctcatatgaaattctagtatactgggattaactttcatgtatgtttttgatgaccacaggaatttttatttgtgaagtctgtgggaattatttaaaggaggagcaaagaactgagcattcagaatataaagggaggagaagtgaatgtcacagaaggagaaaaggttgcacagagatatcttgaaaaacataaaaaacaggagaaaggagtagttcattctgattcttacaaccaccttcaggtggttttggaaggagggagggagggagagaagggagctaagacttcagtgagaaaggctgtggagccaggatgaggaagaaagagaaaggtgagaccatgcgacaggaccggagcagaagtcagcaggtcatgaattatggatgagcagtacactgaacatttggataccaccctcattccatgtaccatgtatggtatcagcaacaatgcaaaatacatttgcatgtgtcttgctgaagaagtcaaagagagtaaaggctgatgagtggaaatcaacagtacagcagacaccattataaacttaaagtctacaacatgccattaatgttatcagtgttctgacctaagggttttatttattttttattattttattttatttttattttttgagacagagtctcactctgtcacccaggctggagggcagtggcatgatctcagctcactgcaagctccgcttcccgggttcaagccattctcctgcctcagcctcctgagtagctggtactacaggcgcccaccaccacgcccagctgattttttgtatttttagtacagacggggtttcaccgtgttagccaggatggtctccatctcctgacctcgtgatccacccgcctcggcctcccaaagtgctgggattacaggtttgagccaccgcgccgggccctaagggttttattttaatgaatgcgtacaaatgtgcataagggttccttaggtaaactctccaactaggtgccctcctccaaacactgagcagcccccagagcagatcctccctgtccgagggctccattgctagcaccccatataaaagcttcctcaccctggttactcagttccactcaaggatgataccgtttcttttggattgcctgctcttcaaaactcttggatttaaatggaatcttgctctccacccaccaatgtggagttgttctgtgcttcctggagtcaccttgccttgttcttagacatcagttacctttgcctcacacctttaactccaggtcagcaatcgtcttcctcactcaaagtccccaattcatctctctgctctgaaatcctcttttataggagaaatgatcagacacccttgcttctccttgtacccaagattataaagacagctgtgaattctttttgtcattttttcttttaaggaatctaaacccaagagaggatacaggagggtgaggattattatatttctttacatgatattgataacagcttatatttaatgaacacttattttgtgccagtaacctaatgtgctaaacattttacataacttcagtgctgttattatctgtctgctgatgaaaaaacaaggttccatggtcagtaagtgatggagtcagactttgaacgcacataaatgagcttcaggcccgtgttcttaaccttcaaccatgtggtcttccctagactggaggcttcagagggaagaatctgcaatttactacatttcgtgttcctatcatcttatagatggctaatatgtaaagggcacatgcagaatattaggggaatgcattctagattagggaagagacaggagttttactagtcaatgaaagatagaatttcaggtctatagaatgtttaccttgggagaggagaagaagagaggttatctaccatatagatctgaaggtcatagattctaaaactactttaattcatctttcctgaagtatttctgaatagagtaagtaaacagaatgagtgccaatcccttggaaacagcaattgatttttatattgcttttcacagagtcaacatatgcagacagtctgacttgcctattgatctgagctagagttgagtgaatgagctggatgtaaaattccctaactcatcactaaaagtcagtcagaccttgaacgacggttactttcttttttttttctaacatgggtgacaatgagcaattgaatgcttagattgggagctgagagattatctttactttgttgagtaataaacacattaattaacaaaacaggaaaatcctgtcaaagaggaagtccttattaagatcatgctggaggccttttctattgcactggaaagattagctgagttcagtggtctttaagaaagtataatcatgaaaatagttacgtccagagctcagagagtttgaattatccttttgattggaagattctagcccagactattttatcctattctaaacttgccaaaaatttcatattgtcaaactttccctccaccccatgccaagttgttaagctttcaaataaacaaatttattatgataaatttcatctctattgatgtaaaggctattggatatcttttcttagcatttagtttaataccaaattaatattttgtatcatcctgatatatgaagacatttacaaatatagaagagaaataattttaatcagttttattgtgctgtaatttacatctgccaaagattatctattttaactatacagctttatgagttttgacaaatttatacagtcatgcaaccacaatcacaatcatgatacagaacattttcatcacccttaaatattccctcatgcctccttgcgatcaatctcctccccaacccctggcctctgatttgttgtctatcagtgtagttttggcttttttagattttcatatggaatcatgtgatatagaatcacttaggaagtagtcttttgtgtcttattgttgtccttgaaaaatatttttaagcaagcaaaatgacttgccacaggttggcagaaaaatatttgcaaaatacatatttgaaaattcttgtatctagaatatatgagctcttacaatcaataaaagacaaacaacaaaattttaaaaaataggcaaaatatctaaacagacagttcaccgaagaagataaacaaatggcaaatatacataaaaagatgcccaacatctttggtcattagggaaatataaattaaaattgtaatgagatacctatgttgacacaaagacctgttcacaaatgttcataacagctttatttataatagtcccaaactggaaataactcaagtgtttatcaactgatgagtagagaagcaaactgtgggatagccatatgatgaaatactactcaataataaaagggaaccaattaatgatatacactacagcacagatgaattacaaaagcattatgttgagtgaaagaagcagatacaagagacatatagaagaaattgggaaggtttaaaaaaaatttttaaaagcagtgactatttgagtatcacaagtaaagtttttttttgttttgttttgtttttgagacggcatctcgctctgtcccccaggctggagtgcagtggcatgatctcagctcactgcaagctccgcctcccgggttcacgccattctcctgcctcagcctcccgagtagctgggactacaggcgcccgccactaagcccggctaattttttgtatttgtagtagagacggggtttcaccacgttagccaggatgttctcgatctcctgacctcgtgatccacccgcctcggcctcccaaagtgctgggattacaggcgtgagccaccgcgcccggcataagtaaagaattataagctatggtacataatgatcctctcctcaaagagcctacataagtaagacacaaaataagtaaaacacaaacaggcttgtcctgaaagagcctgcatgggtattaaccaatgcaatggtaattacctagagatttttcttagaagtgaaatttttacagctctccctcaaattcagttttgtctgtgtgctcatggaaagtctgagtgcatcaatagttgattttacaatcgaaatgtagaatattttcatcactctcagtggtttctgtagtcccagcacagagtgagtggggacatcagtgctccatgtcctcaaaccatatatccagctggaagggtgtatagcgcagtgtggaaagtgggaatggattccacagccgtccataggtcccacagggatgataaaaagtaaaaagtacaaattctttgtacattctggatattaacccattttcatatatatatgatttgcaaatattttcttccattctgggagttgctttttcactctgttgatgtattttttgatgcacaaacgtttttaattttgatgtattccaatttatatcttttggttgtctgtgtgtttttctttttttgcccatgcttttggtatcatactcaagaaatcattgccaaatccaaaatccaaggtcatgaatttttgtcctattcttctgagttttatgttatagtttcagattttttgaaccattgtgagttaattttatagttttagctcttagatttagatctttgaacttttttgagttaatttttgcatatggtatgaggtaagcctcctacttcttttgcatgtggatatctagttttcctagcgctgggtaaaggtggaactcctctgcaagggaggtgaggaaggaggggaacagagaaaggtgtagataatgaccagtttacttttgttgaaacctagttacttcttaagcaaagattgtttaagtggatgttttcaaagctgcttgttactgtttcaaaggtcaaatagataatgattaagttgcgcatcacttaaggtagattttgacctctcacaagttgaagagtactgaagatctaagatcatttacatccctctggaagaaaaaataacatagccttctagggcaaagaagaaaaaactcaacagttacaggatattccatggttcaaagtacacctgcctggtttgctgttctccaaaatcccatgctcagttggttggagtggcctcactcttacctgccaacctgggaggttgatgatgaacatgtctttaccttttctttggagtttgcttaccttattaatatttgctgaagtaaatggcgaagctggagaacttgagctgcagagacaaaaaagaagcatcaatctccaacagtaagtaaacacatgggtcattcctgctcagggactaggctaattcctcaccagttttcccaaatagccagataaacaaaggtgcaatttttcttgaggaaaattatgttgagaagcaaacagggaaaaacatttagactgaggtatgaaattactttcctatgcacaaattattatctgtcattttgcaaataatctgtttgcaattgccaggaggtatctctgagaaatgtgcagagaaaaaagtggcagatgagcaggggcagttgggttgagatgatcaaaaagtgaagatgtatttggcctgtagttattcagtaagaaactttgttattttggtttaaaaattgtacttgctaattactgatgcattctctcgtttgaattatataggcctcgaatggctacagagagaggaaatttggtgtttcttacggggtctgctcaaaacattgagtttagaaccggatccctgggaaaaattaaattaaatgatgaagatctcagtgagtgtttacatcaggtaatacactggaaatatattgaagtcattttgtatatccatatacggtgacttaattgaacaagtctagattaatctgtaccttgaatcttttttaattattattttttattaatacataatttgatacattcctataatgtgtaaagttcaaatcagggtaattgggatatccatcaccttaaatatttaccttttcttcatgctaagaacatatgaattgttctcttctagttattttgaaatgtacaatagattaatgttaactatagtcaccctactggtctatcaaacactaggtcttatttcttctatctaactatatattgtattcattaatcaacctgtcttcagcctccctcccccttcctagtgtaccttgaatctttagcatagagaacataattgggcatcagacatgttcttgtaaaggacgatggcctggggttaatagtgggtagagggagtatgctaaaagatagaagctcattgtgccagacaatgcaccctagtccagagaaggcacggagggtggaactgaaactcctccacaggggatgcgaggaagtaggggaccaaggatatgtggacatgtgaccagtttgcttttgccacagaacagaattggccagttattctcctgccttactgggtgttttcatttcccaataatcactgcatatttcagtcataatgttagaagtcagcattattcagagcttactgtgggccatccactgtgcttagcaccgtatggatgttatctcatttgaccttcacagctgtcctatgaggtggcctttattgtcaccctagttttacaagaggtaaagaaaccctgaagcagttaggtaacttgcccaggacagcaataaatagctgagccaggacttaaaacctaaacagtctgcttccaagccaggtttcttaataagcaccctaaactggtattataggaaaacatacaaatggaaaataccttgatctattgttactgaaaaggataagtggaattatgctgtggctattttagcccagtgtttattacgcatggtgttgttttggtttttataataataggcaagatcttagtgcttaaagtagaatactactcaagtttttaattatgttactgtaaagataaatatgatattttcactagtgctcttcatttcttcttctttttctaaaattagatccagaaaaacaaagaagatattatagagttaaaagggagtgcaattggtctgcctcaaaatatatctagtcaaatctatcagcttaattccaaggtaagtctgacatctacgtcataagaaccgatgagttctccctagttctattgtataagtaaccgttttgtaggggatataccaactttgtgtgctctttagagatttagcatgtaactactcactgtttggttaaatgacacagctgtaatggaggctgtagaagtgatggacagaaggcaggaaatgctgtgcaagcacttgttgcagaagtaggccttgggctgggagcagtggctcactgcaagtgaatggatgattaatataaaaaactgcctgtaatcccagcagtttgggaggccacagagggagggtcgcttgagcctaggagtttgagaccagcctgggccacatagtgagactccgtctctaccaaaaaaaaaaaaaaaaaaaaaaatagctgggcatggtggcatgagcctgtactcacagctacttgggaggctgaagtgggaggatggcttgagccagggaggttgagactgcagtgagctatgatcatgccactgtgctccagcccaggcaacagagtgggaccttgccagaaaaaaaaaaaaaaaaaaagaaagagagagagagagacagaaagagagagagagacagagagagagagagaaagaaagacagagtgaaagaaagagagagagagaaagaaagaaaggaagaaagaaagaaaagaagccttgctgaagttctgagagcaatcttcttattggggaagtggatgcatcactgacatttatgaacatttccatagtcactgcctacagagaagcaatcggtcaacttatcagtgggttgtactttaaaaaaaaacttaaaaaaaccccagaaatctatgtgataggagggaataggaaggaagaaaatcctgaggggagaggaatgaagaggaaaaagggaataaaaggaggaatgaacaaagtgtgtccctagcagagggcattaggacaatatgtcaaggatataacatcacatgtgcaatgcctttgaaccagctaactgaagctttttcttccctattgccagctggtggatcttgagagaaaattccaaggcttgcagcaggtaggtctcatgctactacatacccaaatctttcacagaaaacatactagaatcattaatagagctgctattcttattttgaaggtgaatggatgattaatattaaaaacttgctttttcccataatttaattctcatcccagcatgtgcttcccaggatgcagatgcagagctgagtctaagacagatgaaatgacaaggctgaggtctccgagcctgttagggcttctgaccctgagtttgcagcccacagcccacatcctttaccatcaccctttagctgtgtgtgctgtgcttggtcagctagtgatctcccaacttgctgattctcccatcagggactggggctcggaaagcaagcatcctctctgacgctaagctcggaagtctaggtgtatcacaaaatagtccgaattttcttaaaatgacatttgctggtaattaaacttgaacagtttcttacagaaaacattgtataactgtactacatgcttgtagactgatctatgtaaacttaggcttcttaccccttttgtaggaagctgaccttttaaagactttcatggaagctgtaaccttctatgcagagaaatgtacagaatctcttcatgtttaaaattttgcataaaaatctggggattccagtgtaagaatttctgcaaaaatattcttcatctgttttgctcatgcttcaagcattttcctctacttttaagtttgatctgtcccactgtgaaggacagatacaaaaaaaaggactcatgcagattgaggcaggtcccaccattctggcaaggattgctgctgcaaacctttttgtcatttgatgatcaagttcgtgtattccttttctccacttagataatacattgacccctcagctgtcatttttaagagagtagttaagcgaaagaaaatgagtaaagaatagtgctgtggaccgtgacactgcactcaagttttgtctcctggagggcttcattatattcgctcagccagtcctcctaccctcatccctcaggaggaacgttgaatgattttcaaatgtgaatgctttgtgcctttggatagggcaaatgctctctggccaccacagtccccaccactccctattgtcttcctcctgactcctgatttcattttctactaggcccctgtaggcttttaagattttagtccccagacagtgttgcttttgtctgacagaaaacctttgaatgagtttgtggttaatgttttaaagagcattctatgatggacagagccaattgttgtgctagcacaaagagaaaaatagaataatggaataaaacagggttcataaagagacccccagacgtgtggtcatctaatttatgaccaaagtggagaaggaatgtgctttgcagaaaatggtattgagtcagttggctatcctctggctttctatttcatccataaaatgaaggaaacagacgtaatttttttttatgagtcactgtatatagtatgttgtatttgtatgtgtgtgtgtatgtatgtgcatatatatagacacatatataatatatatgtatgtgtgtgcatacatatatatgaaatgtaatcaacagtttgcccctattttaactttttaaaagcagagaattaggttgggtacggtggctcacgcctgtaatcccagcactttaggaggccgaggcaggtggatcatgtgaggtcgggagtttgagatcagcctggtcaacatggtggaaccctgtctctactaaaaataggaaaattagccaggcgtagtgggacattcctgtagtcccagctactgaggaggctgaggcatgagaatcgcttcaacccaagaggtggaggttgcagtgagccgagatcataccactgcactccagcctgggtgacagaccgaggctccatctcaaaaacaaacaaacaaacaaaacaacgataccaaccaaaacccagacaattggactatgagtgaaattcataaagtggccatcattgcataatcaagtgttccctctaaagaagttttctctggctgggcgcggtggctcacacctgtaatcccagcactttaggaggctgaggcgggcggatcacgaggtcaggagatcgagaccatcctggctaacacggtgaaaccccgtctctactaaaaatacaaaaaattagctgggcgtggtggcgggcgcctgtagtcccagctacttaggaggctgaggcaggagaatggcatggacccgggaggcagagcctgcagtgagcggagatcgcgccactgcactccagcctgggcgacagagcaagactccgtctcaaaaaaaagaaaaaaaaatcaaaaagaaaagaaaaaagaaaaaagaaaaaaaagaagttttctctgcacccaaaggcagtaaaaatcttaacaagattcaaactggtagctgacatagggtcagattccccaggttatgtagatgtagatgtagacaaaggtaggtctgtttgtgatctgggctgaaagcagtcaggtgagcaccagggtgaaagatatgtcttagctggccacatttctaacaaagggacttggagcaggagttcagtcaccttaacccatgggaggaggggcagcagcagcagatgattatatttcaaaggctcacctcgagggaccaaagataagaatcaccggtaaaataaccggaatctccattttattttctttgtgcaatagcaacatccattattatttccacacctgaaacctttactcctgtccactgaggtctctttctcaggtgagaataatacttttccaagacaaagtgagaatcttctcccctcagacttcatcccacccgtggtcaaaagcatgctgagagttaaggaataggaacaagattgataatagaaaatgctttctgttttttcacaagagaggtgatttgaagaagaacataagtaatggctttaaagtgtagaaggagacccccactgattaagagttaaatgtaatcccacgtgcacggtaacatgcgttttgttgctgctgactgcaagtcatctcattgactgtcctgtttttgtttcagactgttgacaaaaaggtttgcagcagcaatccttgccagaatggtggaacctgcctcaatctgcatgattcctttttttgtatctgtcccccacagtggaaggtgagtcatctactctttggttaagaatgatggcaggtcagcatctgtggtttccttggaatcatcaggcatatttaattctccatctaaagtttctaggattctgtggcctcccaaatcaaattgaaatataccaggtatgctaaaacccaaacagtggtgagtatgattgtataacccaccaaatactaaagccattgaaaggagaggttcacttgattggataactgcctggaagaacacaatatttctgttaacattaatttaaattgttcagcattggaaagtaccaaacaaatcttgacatacctatgcaaattttctcattttctttgtttgtttattttttctgataacgatggaaactgtctccagcatgcacataaaaaaaaaagttaagtaagtattcccagatgtagcaccactgtgaactgaggattctattatgtttagataaggattcctctcctgtgactgctgtgatcttatgaagagctcttgtgttctattaggtgaaatctgagttccagaggaagaatagccaggggttaatatcagtattattgtatttgactttatgaggacttatatactgtccacgtataaatccttaaacgtatcatgtgaatgttcgctccagatacctctgtgacctttggcacctgactttgttccttatatgatcacagggtcctctctgctcagctgatgttaacgaatgtgagatttactcaggaacacccttgagctgccagaatggaggcacatgtgttaatacaatgggaagttacaggtaactttttttttttttttttggtaaatatcaggtatatttttgaaggcctaaaacatcccatagttaagagcatcctaaattaactatctgtattccaccaaaagttggtactccatgaggaaatatttagctcttgcttaacgtctacatagctatttttacttaactgaagaaaagctcatgagtcctttactctcaccccgtgaagaaatccttgctctaacatccccaaggaaccggaagaaggctcccgtgattggcacagagagtaagcatggcctggtgcaaaaggagctgaagacttaggaagagccggagcattgaaggggagccactgaatggccttaagtagaaaaggggacaccccaccacaccagtgtccccagctgtactctttccatgtattagcaagctcatagttttgggtaaagagagctttattcaatgctatgtcaaaatgtgaccataacgaggtcaaagattaaactgaggttcaatgaatgaagtaactctctctgaccacagtcatcattatcagtacagctctatcttctcttctgacttattctgtcaagtgacttgtccacagaattctcctgctcagctcaggcatcactttctgcaggaaactttcccttccctttttaagcagagtgaggcatctcagggcctctatgttcccatcatgctctagggatatccatcgtcaaagctttgctgatgacacacacattgtctttctaaaaacgaagtccaaaaaattaaggcagatcaatgccaaacttacttttgtacagttctttgaagtcaccttttaaactagacagtgtctttccttatagtttggctggtctcttttattttgtgatttttaaaagattaataaataaattctgctatagaatgaacaaatcctttcaatgctctggagtagaatctcactggattgaagagcaattatttgctctcttactggtgtctctgctatcttgttcttcaatttccacataacaatatccattctagtctttccagcaaaaatgagtgcagtaattttgttttttaaaccatcactattttttttaaattttattattattatactttaagttttagggtacatgtgcacaatgttcaggtttgttacttatgtatacatgtgccatgttggtgtgctgcacccattaactcgtcatttagcattaggtatatctcctaatgctatccctccaccctccccccaccccacaacagtccccggtgtgtgatgttccccttcctgtgtccatgtgttctcattgttcaattcccacctatgagtgagaacatgcggtgtttggttttttgtccttgtgatagtttgctgagaatgatggtttccagcttcatccatgtccctacaaaggacatgaactcatcatttttttatggctgcatagtattccatgttaaaccatcactattaatgcacacttctaaaaatgcagtcacaaaccttctctttttatttgatacttttgtttttttgatctgatctttaaaacttttactcattccaggttataaactcaaattattcaaacttctactagatatgtctatgagttcaatcattatgcaaaagtaaaattaaccacttctgacttaaatttagtgttatgttattaaagagctttttgattccaggactctgtttctcatttaaatgaagacttttttccctgcctttgttaggcttgggctggaagcaaaatgcagtctagtctctcatttccgtgaacccattatctcctgatttctgtttatgggcatttatcaaggaggattgctacatagaggtattggtggcaaatgtccaggctcctagaacttctgctttctgaccttcctgatatctaggaatgttacagagattagatttcactcctagtcttcctttatcatcactgtcttttggagtcttgtgggccaatagagcgacaagtatgggcaaactgtgatgagatccatagaccaagataaaggctgttgctgttttcagcacgttattttttccccctgcaaaatgaaaaacaaaacaaaaacccttttactatttaccactctgcagcatgtcagaggttagagttctttatccacacacacatatgacagaatgagagctaggaggaaaggaaccatttatttgttgaaagctgcatttctaaatgacagattcaactttgtaagaacagtacgaaattctctcttgcactcttttataaaggagagcaagaatacagaagaactaatgatgtgtggatggctttggaaatgatcttgattcctagactctgcccttcatagatttgctggaggacattagagaacagagcatttaaatcagggttctttctcttgatatgggaatagtttctgaaacctcatgaattccatttcattatctacactttaagtcccgtaattcaggcatatgttggagactttttgagggaataaaagaaaatgaaaaaaggtgcatgagcataagattaaattattgctttgtggaatccacgtgtaatgaaacaagtgaacatttagatactttcttgagttctgttaattatgtgaggttaaatccttgttaatcagggtattcactgaggctagaaaaccctttgggaaatttcagcacacattagctaaaagaaaacttgagcctcagaatcatctggacctgcaaaaatgtagtcatggcatcaaagttcgctttggagtttggacctcattcagtttctttaactctttgagctcttttacttggacggaaaaaggagtctttaactggattaataatttgccattgtaaagacctctgaaaaggtgcagatactcattcatggaaagtcctgtttcatacctgtttcataggtaaacttctggtggaaattcttttttagaacaatgattatagcacaagaaacatcattttctgtttccactgattcttttggcttgaggtctagacccagagcttcagacaactaacacaattacatttcgccacttctccatgctgttactccctctttgttctgaagacgtgattcttgttgtttccctgctcactttgttttgttttgtttgtttttgtttgtttgtttttgagacagagtcttgctcttgacacccaggctggagtgcaattgctgcaacctctgcatcctgggtacaagcaattctcctacctcagcctcccgagtagctgggattacaggcacctgacaccatacccggctaatttttgtatttttagtagagatggggtttcaccatgttggccaggctggtctcaaactcctgacctcaggtgatctgcccgcttcagccacccaaagtgctgggattacaggcgtgagccaccgtgcccagcctcccctgcttactttggatttaagacagcccttgggatctgagcttgccatgcatggatggtgtgtgttgtacatttagggctcagatctagaaggctttccagaaaaacaaaaagttgagtttctctggttttccagaaacatgatgattagtaaattttatttcacttatttccattcatatcactggtagattttacatcatgcagagtttaaacaatgaggataatctagttttagctcaggtggtagttaggtattaaacttattacctttttcactcagtcagtaaaattagtattgaaccatggactctaacacaagttaaactatgactatccaagtgtgtttaacctcttctcaattgccaaaatgcacttgcagtgttttcaaagaaaagcctagatttgttctgctggaaccaagttggcaataaaaggtcatagaaaagacacttctgctatatcagtaactaataactaaagcaggaatagtagtaagttggttttaaaaatacaatatatggcttttattttcacttagggaggtatataagtaattgttcatttttaaaggccatatcaagacaccttgaaaatatattttgcctgttaaccctgttatgtttaaaaggtacatgaggctgggcacggtggctcacacctgtaatcccagcattttgggaggccgaggtgggtggatcacctgatgtcaggagttcgagaccagccttgctaacatggtgaaaccctgtctctaccaaaaaatgcaatacttagcttacgtgctggcacgcatctgtagtcccagctacttgagaggcagaggtgggaagatcgcttgaacctgggaggcagatgttgcagtgagccgagatcgcaccactgcactccgcctgggcacaagaccctgtctcaaaacaaaacgaaacaaaacaaaacaaaaaggtgcataaaaatgcagcatcttcatataactctacttatcagaatgtaagaatataacatgcaggaacaatggtgcaggagtcgggtagacctaagtgtctatttatcttctgccaattattcattttgtggttttgggaaatgttagtctgtaaaatgggattaataatacttgtctttgaggatcataggaaggaatcctatggtttacttgagtttcttcctccctttctctatcttctcacatcatctaaacttaagtgaaagaagtatactctgtagctatttagagaacagtataggattaatgcctactcatctcccagtgataatagcaaggatgaaggaagagagagataaagagaaaggatttaactgcaggtccatgaaccagaatctcctctcaaatcttatgtcattttgcaatagttaagcacttagtgataaaataaagacaatcttcttagcacttgctacaggggaatgcctgtagactgcaatatgaccataattcacagagattaccactattatttcataagaaattgaggcagagggagttagtacattgtctgggtaaacagttaacaggaaggaccaaaatttaaacctaggcaatcttatcccaggggtttccaaacactcagatctcccagacatagaaaatagaaagctagtaacagttggtttaaagattcttcagcagggtgcggtggctcacgcctgtaatcccaggactttgggaggccgaggtgggcagatcacctgaggtcaagagttcgagaccagcctctacctctagaaaagagacttctgctaaatcagtaactaatcaattggtttcaccacatggtgaaaacccatctctactaaaaaaagaaataaaaaattagccgggtgtggtggcacgcacctgtagtcccagctactcgggaggctgaagcaggagaattgcttgaacctgggaggcggaggttgcagtgagctgagatcatgccactgcagtccagcctgggtgacagagtgagactccatctcaaaaaaaacaaaaacaaaaataaaaaagattcttaaacattgttgggaggtgttgggacaggtggcaaagtaaacttttagtaatgaagtctcctggatcaaatgctcaaatatgtgtatgaactgttttaaagttccataatcctcaagagtctaattaaattctctatacaaatattctatgtaaagatgggaggacaaagaggaaagaaaacaatatgagaaggaaagtagagagagatgcggggaatataaatgtctatgggggggatggataattcaatttctctttaattttaatcatttattgttattttcctatgactttatcttagtgagccgttccaaaggcaactttggaatgctcagaaatgtcatatattaatgaatcagcttttatgtaaatatatactgatgtcgtaaattgcatggaacatatttataccaaaaaatattcatttattggaaactcacatttatttgggcatgctgtatttttatttgctaagtctggcctcccgacttgaatgcatggatggtgctccctgcattcttattctccatttctggccacactcattgctctcctcttccttagaaactgccaaaaagctgccaccccagcaattggttctggggcccaccacaggcaagccgaatcctgtgcctggaggttggttcttgatgcctttcaaacagtcaaatgctaatttcccacaatgtcgttcatacattgtcatccatgaacattactaagctccttgtacctcactgtgtcttgttaaaatagctcttttcctttgtagaatggcatgggagggaggcctggccacgcaggcacgccctgttccttgtctctgacccctggcaccaacagtcatttcccccatgagagcttttcttgccaattctgctcaagtccggcaatcggcaacctctgggcctggccctacctctccatcagatgtgccctggcatgtggggataggcttaggcttctgggactcctctaccctcctcctcccctagctcccatgctcagatcatagaagttcccattaagctgcagagataaggctaaagcagctttaacaatgacaagggcttaaaacaacattgcttatttgattatcattggacttaaatcttctagtaacaaagcacccactgctagcttacgcatagtgtaataattaccacattttgttggaaattcaagtgtggctatgaaagaaatgccactgtattatattatataactacgctttttatggatagaagacatattgccctttgtaagataataataatgatcatagactgtgaggtgtggacactggattgcgtgtggggttatataatcctagagagcattcagagttatcagtgtagcccacgttgcctgtgcttcatggcaggtccaattggacagatgatgaatggatttgctgatctctccctttaccttcttgaactaactccattacctttggcttatacacatctgacctttgaaaatgctgtttgatgacctgataacacaagaatttatagtgctaggcttaccagataataagttgtgattcaccaacattgtatttactcaatccaccacttggagcacagcagagtgattttctcccgagactccagtcagtaaatttgcattgctggctgacgattccaagttaacatcgttgatttgtaatttgaattatttttctcattgatattaagagacaggcactggccccaaagcgcatgccctgacattgtgctcttgtgtaaccaacagttgtcactgcccacctgagacgtacggaccccagtgtgcatccaaatatgacgactgtgaagggggttctgtggcacgctgtgtccatggcatctgtgaggatttaatgcgagagcaagctggagaggtgggtcccttccccaaatgtgcctccttgcagagagccatggttagtagctcctcctcctcctatgcccactgcatacaagcactacctggagcttacagaggtgaagtcacttcctgtctgtaagtaggacataggcgaggaggggagatgaactatgcaggaagtaggacccagagattaagatgtcattatgtaaaataggatttttttttttttttttttttgagatggagcctcactctgtcacccaggctggagtgcagtggcacgatctcagctcactgcaaccttcacctcccaggttcaagcaattctcgtgactcagcctcctgagtagctgggattacaggagcatgccaacatgcctggctaattttggtatttttagtagagacggggttttgccatgttggccaggatggtctcgaactcctgacctcaggtgatccacccgcctcagccccgcaaagcgctgcgattacaggcatgagccaccgtgcccggccgaaatgggaccatttttattatcccgtcatgactctctctgagataagaccttctcttggccttgtaagttttattttaacagtgacaaaacacaggaatataaaaggaccagtcttgttggcaacatgtggtttcaaggagtctgacttttcccggcctgggtctctggaactgctgcagactctaagagcccactccccagaacgaccctccatgccctgcgtcctgatgactttgactcctgaccctcaaggttgtccagtcttggctggcttggctcttcatgagaacttcaattctttatttttagttgtattttttctacccatgtgatggaaaataattcccgtccaatgatggggatggaagggttgaggaggtgggtaggaggaagaactttccaaagaaaaacaaacggaattgattttccaaggtctgtgcctacatgggtgtttttccctctaaaaacatagcaggctgagttgattgactttaattatattgacttacagttcttgattgttgttactctttccctggcatctttgggagaaattatagcttgcttttactctgaaataaagatgtttccctttttgcatggtctggtctaaatgcttaatcatatgggaagaaaaagagaagccagtggattggccttatggaaatgaacgttagaggataaacagttaggggcttgatgaaatgttcaaaggcttttcttgctgattttcatgattgtctttattcacgctgttgtcatcctgccagcccaagtacagctgcgtctgtgatgctgggtggatgtcttcacccaacagccctgcctgcacgctggacagagacgagtgcagcttccagcccgggccttgctccacacttgtgcagtgtttcaacactcaaggctctttctactgtggggcctgtccaacaggtacattctcagggccacaagccaggctctgcatgccaggttggcgaggtgccagaaccaattttctttcactattgatgagtaagaagacaattcttaggaggtgttcaaatccagttttgtgtcctggttctgctcgacgatctcactgctatcacaattccacgtcaaaagggggaggcttgtccaaaactgtgctagagtcagactttggggcaaggttagccatagaatttgtaagttagacactgcattgcagtgaccaccaactgaccagatttgagatcaaaagagatactctagtcccacctttcatactaaccagatgtttgtacacatggggaaattatttgacctctttgcatctccaccacagtctagtagctcttgcctgggtgtgtcattagagtatcttgcggccttgacctaaacagaggtatccagctccattatgccctgcagcaactgaatctccagggatgccatatgttgagtcatggaaaacatgggctccgttagtcaaagactgcctgtgtttgaatccgagggcatcttttgttttatgagatagtcatcatatattccacacattttttttttgtaggatgcctactatgagcaaagcactgtgctgggtgcattggtaggcaattagccagacctcaggttcatctgcgctccagggatgttcttagaaatggagccacaaagataatgtaataatagtagctggttttgttttgttttgttgttgttgttttgagacagagtctctccctgtcacccaggctggagtacagtggcatgatctcagctcactgcaacctccacctcctgggttcaagcgattctcctgcctcaccctcccgagtagctgggattacaggcacacctcaccacacccggctaatttttgtatttttagtagagatggggtttgccatgttggccaggctggtctcaaactcctggcctcaagtgatctgcctgccctggcctccaaaactgctgggattacaggcgtgagccaccacacacggcctggtttttatttttaatcaaagtgttattaaggcattgtataagcaatttttaattcttttaactacaacaaaatcaagacatggtaaaaataagtattactcacattttacaatatgagaacttgagcttaaagaggttgaataacttgcccaagatcgcatagctttacagatagccagaattgaaacccaagtttcttggcaagtttcttctcgccaagaaaccccacacacctattgccccatgtagtgatttttggtttagtggttttctgcgtgtatatatttagatcttgtaaaactggaaagaaatggaaaaaaaaaacctataaagactttttccctcttagttctcaggggcaagcacaatttgcaagcaatcacattttgaaggtaatttatcatggacaatctttaaaaactataaatcagaaaaataaattatttaaattagaagattggcaatgtttttacattcttctttttattgttggagaggaaaaagagaaacaatttttttgttttcttgtttatcaccctatttttcctgaaatatatggtagttatattttataagcagcaaagcaatatatgctgcttataaaatatcactacaaaaatatggaaaaaatagaaaaaaatacctttgatcttatcacacagaggaccatgatgaacatttgggcgtttttttcttccaactttttttcatgtacacattttgccatgcacaaatatgataattttcttaggcagagtcttagaagaggattctacttaaatcaaagaatatgaatatttttaaatctttaaaggtttttaagaattcttataattttaataatttgaattataaatctacaaccattgaatacaatgggaaccactaaagtaaaattcttaaatctcatcttcctaatgacaccattagtcatttgttctccttcctcttctactttattcttcatttgtacaagcacatatgcaagagtttaaaaaattctttccccaaattaggagtatgagcccaatcctccatatgattttaacagtttgtttttgtttttgagacaaagtctcgcccaggctggagtgcagtggtgcaatcttggctcactgcaacctccacctcccgggtttgagggattcttctgcctcagcctcccaagtagctgggactacaggcgtgaaccaccacatccagctgatttttgtatttttagtacagatggtgtttcaccattttggccaggctggtcttgaactcctggcctcaggtgatctgcccacctcggcctcccaaagtgctgggattacaggcatgagccaccttgcccagccacatttagtattttaattaatgtatatacaaaaattctttcaatgtgtgtgtatgcaaatgtaggtatacaggtgtacacatgatattaaaaagcgtttttagtatttggtcacaaagatgagtcataaggtgttcagctatgcttctattgataattgagggttttttccctattaaacagtgctgcggtagacatcctcttacctacttataccagtatactaagatgtatactaccatcttagtatactggtagttttatcacaataggctgagttttaataggtgcaactggcagtcaaagtctatgtattttaaaaattttagtgaatactgccagagctctttccaaataggttatatcaatttaatgtctagctatcagcatataagaggagcccatttgcccactttgttgtcagaatttgattttaagaattcaaaacaacttttgccaatctgataagcatatctcatttttattttatagttccttaggtggagaaggtttttatatgttttgactcttgtatttcttccttgttgacttgtctatagagctaaacttttaaatcctcttgttttcctaggctggcaaggcaatggatatatttgcgaagatatcaatgaatgtgagataaataacggcggctgttctgtggctccacccgttgagtgtgtgaatacacctgggtcttcccactgccaggcctgtccaccaggtgctgcctcggttcaatgtcaacctcctgaccccagcacagggaacacagacataggaatacggaatctagtgctccatttaaaatatgatttctggctgagtgcagttgctcatgcctgtaatcccagcactttgggaggctgaggtgggcagatcacatgaggtcgggagttcgggcctggccaacatggtgaaaccctgtctctactaaaaagacaaaaattagctgggcatggtggtgcatgcttgtaatcctagctactcgggaggctgaggcacgagaatcgcttgaacctgggaagcggagattgcagtgagctgagatcgcaccattgcactccagcctaggcaacagagtgagactctgtcttaaaaaaataaaaaataaaatattatttctgtcttaggagaggaaatagtacagaaagttttgcttatcttgtgaattcaggacacattagtacaactctatgataagaaagaaaaaacattttgaatatcagtagaaaacaacaaactttacaaactgtcaaatagctacagagataatgcagaatttgaaaagttttctgagtggatcacagacttactgttccattgccctcacgaataatttgttaatatcatgcactcctgagttgttttgcatataccaagtttactaaaccacaggcatcacagtaggcatatatcgtaattgttggtttccctccttttctggaaagaagtcttttctgctattctctaatctaaatcgaattactacccaagaagttcagggagtactaagggataaactgaaaccttgtatgtttaaataacatggaactacagtactttgggcttctataataattgacctctaagaacatcagagtcactgtaatataaaaatattaactttcttagtgtcagcactttctaagtctaccagtagttttatacatatttttttcattagaaacaacccagaacattgcttatgaaatcaggttactaattcttgttatttttcttatttatgaaatttcatttgttgatgacattttatacttatattttttgtttcgatgatagaggatccctgattggtccatttcatgatatttgaatcctagacaggctttgtcctcccatcttcttgacattgtttcttatgacctggctcttgttctcatcagggtaccagggtgacggaagagtgtgcacactcacagacatctgctcagtcagtaatggaggctgccacccagatgcctcatgctcctcaactctaggtaatgactcatctctctctttggctttgggtattgtaatatgaccttctaaaccaattcaacatcttaaacacaaaatcctctgttctcaaaattgttattttgaccttcaaacctaaaattaatccatgccataaaactacacatttggctttcttaaatatgtaataaactatgctctttaatggtctgctctgatttaggaaataaggtaattaagccagttaattaattaacgactgtattccaacaagcaggcaggagaaaaggaggaagaaggcaatgccaccttcttttgaaggactcttccatttctaggccattgcttagaactgagctttgctgcaaagggagtttgggaagtacactctatatttcaggcatcctgagtccagctgaaataaggagttcagaaagaaggaagtagaaaatagatctagggtgacaaccaacagtgtttgcaatgctgcatagaagggtttaaccctgtaatttaacaaaatatatactgctaaactttctccaagaaagattgtatcaatttatgtattcaccgacagtgtataaaaatacatatttactccatctttgacaataatagatattattattatttttcatcttggtcagttttataggcaaaattagtttttccattattttcatttatactttttgattactaataattaatactttccacattttcactgggcatctttctacttgttcatcccctttgctctctttctttcttactgattggtaaagtttctttatgtactaaggacattatctcattatctgtcttatgttttataagtgtttttcctggcatgttgtttttgttttaatcttgtagtggtagtgctattcagaagtttagaatttttacgtagtcaaaaagataaatcttttctcttactatttctcccttcacagtcatgtttaggaaggctttctttactgaactctttaaaaattgtcaagtacatgttcttttatacttctatggtttctttttttatggtaagatattttatatttttagaatgtattttttatccgtagcatcaaatagagatctggcttggtatttttgctcaaataagtggacccaattccatttcttgaataatcatgtctcttgctatttcaagataccacctttattttttattaatttgtcatatacttgcatatatagaaaagaacatatatgtgtatgtaaacacacacacacacacacacacatatacttgtgactaaatgcttattaaatgattatcaacataccaaagtggttaggagcatgatttctagataaagactgcttgcatttttccctgggctccaccagattttagctgcttgtcctcagtgaagacacttaatctctgtgctttagttcttcatctgtaaaatgaggataataatagcacctacctcagggtgcttcagatgattaaatgagtccttatatgtaaagtgcttgtaacaaatattattacaaaaataactgttttttaatatggaggacagtcataatgttgatgacatgaagtattaataacactttgtgtacttttaggctgcccttctttactgcaacctgtaagtttaccctgggaaacttaaaaaatttctactcagagcttcaacagtttcagagcttgcttactccatttttccctataaatatttttaaaagaagtaattaactataaaaaaatgcatttctaggcaattatttatttaaaagaaatatttgtgttttttaatattgaagtggaatcttgcaagtaatataagctgagaacataacaaaacttgtatttttgccaggcgcggtggctcacgcctgtcatcccagcactttgggaggtcgaggcaggtggatcacgaggtcaggagatagagaccatcctggccaacatggtgaaaccccgtctctactgaaaatacaaaaaattagccaggcgtggtggcgggcacctgtagtcccagctactcgggaggctgaggcaggagaatggcgtgaacccgggaggcggagcttacagtgagctgagatcgcaccactgcactccagcctgggcgacagagcgagactccgtctcaaaaaaaaaaaaaaaaaaagaacaacttatattgtcattcaattctactgtaaatctgtcacattgtgtaatttgttctattttttaaattattcagcagggtttttctatccatctttaacagttcttgctgatggaggaatgtagttaactgccacattgatttccttgtattatttcaaccattgtgcagtagtagaaagaacatatatttctgcaatgagatgtggctttttgctattaagtgagaaatctggaaaactctctggatattaaatttagtaaaattttgtaatgtctatgacgagtatttttaacctaacattgcgtaagaaaactgtcaagatgctggatgctctaaaactcttgttagctattacctcatgtacatcataattaatcgtggatgttaattcatgttttaaatagacacgatcatttcaaattccttttgaccaagttccttcctaacctaattcgattgccattgttttaaccttgtaccttggcaatgaggagctcatcagaagtgtgggagaagttttggtgctggtattttgttgatgtccccatatatttatgttactatattatcttcaatctgtggttttattgcaaacatcttttagagacttaagttcattctgtgatagctatttagcctgtttaaaactggcagcatgcaatctgcacatccacataactggggacatgtggcctgcctgtgtaagccacactcctgtacaggtgtgctgtaggcagcctacacacgaggggagtgcttgctctctgggctcccctcattctagctgtgtgtgtgtgtccttggccgggacaggctgtctgtgtactggcttcatctgtaaagtggggattataagagagtacctatatagggctttttttttttttttttgagatggcgttttgctctgtctcccaggctggagtgcagtggcaggatcttggctcactgcaacctccacctcctgggttgaagtgattctcctgcctcggcctcctgattagcctggactacaggccaccatgccccgctaattgttttgtatttttagtagagacagggcttaaccatcttggccaggctggtctcaaactcctgacctcaggtgatccgcctgcctcggcctcccaaagttcagggattacagattccatagggctctttattagtattattattattataattaaaaaattttttcttggaaatggagtctcactctgtcacccaggctggagtgcagtggcactatctcagctcactacaacctctgcctcctgggttcaagtgattctcctgcctcaccctcccaagtagctgggattacaggcgtgtgccaccatgcctggctaatttttgtatttttagtagagacagggtttctccacattggccaggctggtctcgaactcctgaactcaagtgatctgccctcctcagcctcccaaactgctgggattacaggcgtgagccactgtgcctggccctctattgggctcttgggaggattaaatcagtcagagtaagtccagtgcttgcaacagatagtttcatcctaagaatctccttttctgcattaactcctccatgatgaggaatgtctgtcttccccaggtgcagctcacctttgtgcacagctcaggaccatctgacatatgggctgacagcacccatgtcaacccagtacgtcaataatgtgtggaaggcatttaatggctttcttattttaagataagaaatacaaaaataaagattctaatattttctcctcataccttgttttgtctgcccgtcaaaatacacagactggatgttggtggatccttgtctagacagcagattctgagtttagatactgcatccgaacagaggaggagacctgtatttacacgtttgtttttatttctgaacaggttccttacctctctgcacgtgtctcccgggttatactggaaatggttatgggccaaatggatgtgtgcagctcagtaatatttgcctaagtcacccctgtctaaatggacaatgcatcgtgagtcctttgtttttcctgtggacagagagtacctgagaattagtttcacgcctataaaatgtaacgttataggattcaggaatgtcaagataatgagtcaagtttcagataaggaactgtcgagaactctcagatgaaagatagataatgattttagttcttaggaaaaaacattgagttaattttttgtctcagtggtttatgaagtactaaaactacgcctgcagtttgatctaaataaatctgacatacaaaacaattaccatttaaacctattaataacaagtagactactagaaaatacttacatataaacacatatatatttgtagcacctgttaaatatatcagtaggccaggcgtggtggctcatgcctgtaatcccaacactttgggagggtgaggcgggtgcatcacgagccaggagatcaagaccagcctgaccgacatggtgaaacactgtctctactgcaaaaagttagccaggtgtggtggcgcgtgcctgtaatcccagctactcaggaggctgagaccggagaatcacttgaacccgggaggcagaggttgcagtgagctgagattgcaccactgcactccagcctggccgacagagcgagactccatctcaaaaaaaaaaaaaattatatatatataattatacatatataattattacataaataataattatttttaaatatataattatatattattttatatataataattatataattattatatattatatatctccatggcactacattcctattatttgggttgattaaagtttagtgtctatccatttgttttatggtattatgtgttttttttccccttaggacactgtctctggttatttttgtaagtgtgactcaggttggacaggtgtcaactgtacagaaaacatcaatgagtgtttgagcaacccctgtttgaatggaggaacttgtgttgatggcgttgattctttcagttgtgaatgcacacgtctctggactggagctctctgtcaggttcctcagcaaggtacagtcagcatttcttatgccacggatgctcacagcatagcagcagcatcctttagtgagtccctcaacagattcctctgctgaacccactttcttgtccagttgctcagatactgagaactaagtctttccttgcagaaatggtataaaattcacaagctaaatatttataaatctcactgtaagccaagaacttttcttccaaagaataaatacattagtatttgccattttcactatgtcctttttgaatataaaacatgctaaggtattgtcttttatggttttctaaagggaagttttctgaggagcagccacttaatttccctagagtactgcattgaatcaagtcactctccctttccaggatacacagtggcttcccgttgcctgttaaatagagactgggattaattttcaatgatcttctataaccaagtctcactcaatccatctaaccttttttttcactagttccctagaaataacttcactcaagcaagttttctttcgtcaccggaccccatgtaccaccatgagtattttccactgtgttcatttatttggaatgtttctcccgataaacctcctcacacatcttccttgtttctcatccagatgtgtctgtccctcaggagcacttccctctcaacttcttccataaagtcacttttgactcttctgcccctcacttaaactcctgatttggaatcaacacatttattgagaggttgttgttatatgtttaggacaatagtagaccctatggaaaaatatgaaagtgtaaaatactgtctccacttatgaactgctcaccttgcagctgaggagacaagaccaaccccaatgggagaacagatacaagagttaaagacatgagctatgttgtgtggggtgaaattgggtgtcacagggacacagagaatgggaatcagtgaaaacataagacatggcagttcatggagcaggtgatgaggcatcagctgagctttgaacaagaggtgggatttctatggaagttgacagaaaaagggcacagaggagagggaatggcagggcttttatctccaaccttcattactcaaattttctctaagtttatcagcagcagggttacagttgcccaacctcttccttttaggaacctctgaaaagcacagttcatcttttcctttgcagtttgtggagagtccctctcaggaataaatggaagcttcagctacaggagcccggatgttggttatgttcatgatgttaactgcttctgggttatcaaaactgaaatgggaaaggtaaatgtagtaactcttgcccaaatgcatattatatttgtatatataaatatggagtatgtgtatattttattacataaaatacatgcaatgataattcaactatcatatattgagtgcttactaagtacggagtgccattattttggctagacatatacctaccttttcataaccttacattaattgtttgaaataagtcacaggggctgggtgcagtagctcttgcctgtaatcccagcactttgagaggatgaggtgggtgcatcacctgaggtcaggagttccagaccagtctggtcaatatggcgaaaccctgtctctactaaaaataaaacaaataaaaaaaaattagccaggtgtagtggcacattcctgtaatcccagctactcgggaggctgaggcaggagaattgcttgaatccaggaggcggagtttgtagtgagcagagacagtgccactgtactccagcctggccaacagagtaagactccatctcacaaaaaaaaaaaaaaaaaaaaaaaaaaagagtaacaaggccaggcctggtggctcacgcctgtgatcctagtactttatgaggctgaggcgggcacattgcctgaggtcaggaattcaagaccagcctggccaacatggtgaaaatccagctctactaaaatgacaaaaattagccaggtatggtgatgggtgcctttaatctcaggtactcgggaggctgaggcaggagaatcacttgagctcaggaggcagaggttccagtgagctgagattgcaccactgcactccagcctgggtgacagagcaagactctgtctcaaaaataaataaataaataaataaataaataaataaataaataaataaataggaggatcctccttttatagatgaaataatgaaaagtaggtgaagctaaacattttttgttaacacttcttagcttgtaattgtaatagttgaatttcaaagtcaagtttgtctggttccaaagtccatgctttctccagcatgaatgattctctacactggttgactgactgcaagccactagttaatctgtaaaatcatgttgttactgagacagtattttagaagatggttgcttagttttatgttgattattgtgcaaaaatggccactgatattaagatagttttcttatcaaatgtctttgctctgccatgttctatactaagtgctccatatacattacagcattccatttttaactctcataaccctgaaagatagaaattattatcttcattttacacatgaggaaacagagcctagtgccattgagaagtgtgtccaggtgcatgtggttcgaaagtggcatgcagtgactcagacacaggccagtcacctccacagcctgtcactctgagccgctccgtgaacgctcttcaaattaagatccaagtccaaggtttttagtgctcttatacccgacattaattacccaggcatttctaaatattgtttctcaaccacctcctggattcataaaaataaaatggtatgtctgaatagataaaattttcccttgaaatcctattaactttttccagcaaactattacagagggcattgtacaagggtcaaaaaacatttttttttcctttgaggagggaggactatttgcgacctggtaacctcacactaaaataaactccaaaataaatttcccagtgggtatgctatgtgaatttccttccttccatttagttttcatgaattctatttcctggcattgaaaacattcttttgaaaaaaaaatattcttaggtgagaaacttgtaatactttcattaccaattcgcaagaaaattcatcttgtttttttcttgattattgtgatttcatatcttctcactcataatggacataatatggtagaaaatatatacaaatcaggatagttcaattaatgaacatttgagtttcatttaaactgttttaagaaagtcatgtagtaataggtaactgatcttaaaataccctagcacagaattttaaaaattccttatattctttttcattaactgaatattgttgtgattttaggttctgatgaaaattaaattcgacagccttcttttgattgtttatctcaaatgaggttgtcagtacgttttataagttatattactatatttgaagtctgtattctaatccattcggacacatttttgtgtttattctcttctacttgtatgctcagtatttttcctgttattcttgtatgctcagtattcttcctctcattctctactcttggtattactcatcctttaattatatccagtccctgaagccgtccaggccttgcttgtctacatcccgcctactccgcccacacctgagcgtgtcggtctgggctggcgtcagaatcttagcccctctggaatcaacatccctggcgggcagtgatgaacgtctgtgtgtttgataacaggccacaggttattcagggaattagggtgtacattcttgtgaatggtaatattagccagttcaacttaattcaggtagattttcaaatctccaatttattttactgctttagaaacaatgtcagttatatatttgacataccttggtctggtggacttgacaagtttaatgaaattggggtaaatctatgttattaacattaagattttttgatatattttgatattagttgaagtttgtttttaacaatatttagcacaagttatttagtatatagattgccatatgtactggtggataattagggaatgataggtctagctcttgaaagtgcctcagtatgaatgctgcctaggaagtgggagaaatactttaaaatttacatggaagtaaaagataatatatgtggcctttgtatttttaggtcctgcgtatcactttcacttttttccggttagaatccatggacaactgtccacacgagtttcttcaggtttatgatggagattcctcttctgcttttcaacttggaagattttgtggctccagcctccctcatgaactcctcagcagtgacaatgctctctattttcatctctattctgaacatttaagaaatgggagaggctttacagtaagatgggaaacacagcaaccaggtatgtgtgaacctggagaaaaaagcaagcaaaattttgaggttattaagttttcttaatcagtgttagacttttggatacatgagatgttttgggatctgaagatatataatatttttataatttattttattttattcatttatttattttgagacaaggtcttactctgttgcccaggctggagtgcagtggcctgatcacggctcactgaaacgtcgacctcctttgctcaagtgatcctcacacctcagccttctgagtagctgggactacaggtgtgcaccaccactccaggctaatgttttgtgtgttttttatagagatggagtttctctatgttgcccaggctggtctcaaactcctgggctcaagcaatccatctaatttggcctcccaaagtgctgggattacaggcatgagccactgtgaccaaccataattactttaaaatcaaatcaacctagaattaattagaatttattttgtgtctaaaggcaacaaaataagcatgaaatagaagggattaaaaaacatgagtcttagttggtcccttatcaaattactgaacagcctttttataagctctactagtagtttactgcaggaatattgaggacattgtccaccccttcatgtagtattccttcatcttaatgatcactcaataattttttctttttgttattattttgttttaattattctattttcttttaagtttttactatgcaagttttaaacaaataaaaagtaaagagatcagtataccatgcccccaattcattcatcaatacatctgtggatcaatttcagcattttctcatcttttttactggtgtttttatctatcctgatgctacctaggcttaacttctgatgcttgaaatctgagagtgtaatttcaactttgttcttttcaaagatgttggatattctgcatttccatataagtttttgaatcaacttgtcagttttcccaaagaattttatgggaattacattgaaactataattaactttggaagaaatgacatcttaaaaatattcagcctgccaatgcatgaacataaactatttttaaatttagttctcttttcatttatcctggcaatgttttatagctttcagtgtctaagtattccatatctttgttagatttatttacagatatttgatatattatgcttagtgaaatattaattttctaaaatttaatttttcacttgttatgtaaaaatatgtattttttaaatatttgattttgattccatatacattgttaaattcactcatcatgtctaattattttttgtagattcttttggattttttaaacgtacataattacatcatgtgtgaatgaaggatatttttcctcttcctttccagtctttgtaactattatttcttttccttgacttattgccctggctaggaccttcaataccaagccgaataaaagtggtgaaaaggaaatccttgtcttttccccagcagcatggggaaatgctcaatatttcattgttgaatatgatgttagctgtaagttttcacagataatttttatcagatgaagagtgttctttcctatgtcaactactattgctgtataactaatttcccacaaatttagtgttgtagaacattaatcatttgactttgtttctgattttgtgggccaggaatttggaaagaacctaacatgacagttgctacttgaaatctattcagcagttataagcgggtgtcagctgggactgtagctgtctaaaggctggactgggctgaatatccaagatggcctactccagtggctaccaattgatgctggctttcaatgagagttcaactaggctatggacctgagtgcctacatgtggctactctaaaaagtttgtcttagaatagtgaaactttcttcgtggcaattggcttctctcagagcaagcattacaacagaaccagacaggtgctgcgtgggaatttttcagcctatgtttggaagtcattgtgttatttctgccatactcaatgggttaacttagtcacaagctgacccaaattcaaggcgaggggacataggcccacttctaaatgggagaggtgtcagaatttataaagaattaaaaaaaaacccacaccttttgttcctagttaccaagaattttaaaaaatcatgaatgaatgttgaaacatataaaatactttttctgactctattcaggtgatcatatgttttttgtcctctattctgtaaatatagtgagttaaattgattgattttgaatggtgaatcaactttgcattcatcaaatattttccatttgttcatggcaagttatgctttttatacattgctagattttatttgctaatatgtatttttaggatttttatatctatatttgggtgatattcttttgtaattttgtcaagttacaggtaatgtcaatgttttaaaattaatagaaaagtgtcctctctttttatattctctggaaggatttgtgtaagattgacaatatttcttaaatgtttgaaataatttaccataaagttaattgagcctgcaggcttccttgtgagaaggctttaaattatgattcaatgtatttaatatagatctattcagagtttacatttcttcttttttcagttttggcaatttttttctcaagaaactcatctgtactttcagaatattttcttactatgttttagtgttcgtaggctctgtagtgatgtcgtctcttttcattcctgatattgataatttatgttatcttttttaccttgataagtcttaccaaggatttgttagttttactaatgttttcaaaattccaactattggctccgttaatgttttctgttgatttttatttcattgattttcctcatggttttatcattttcttcccttgtgttattttgcacctaatgtatggttactttaacaattttttcctagcttcttgacttggaagcattgacaaatgagtttgaacttcttagaatttctaatatatgcactaatactaatgcattttccttggagaacttttatttgcatcccacaggttttaatatgtatgttttcattagcattcggctgaaagtattttgtcatttttattttgaattctctgtgaccataggttttattaaaattatactgtttatttaccaatgtgatcactaatcatgcagtatattatttcaatctttaaaatttgttaagatttactttatagaccaaagtctattttggtgcatttattgtatggacaggaaagaatgtatattctgtaatggttagatgtagtcctctacctatattaacttagtcaagttggtaaatagtgtttttcaaatattaaatttctttactgatttaaaaaaatatttgctttattacttagtcagaaagttatagtaaaatctcaaactatgattctagatttgccagctttttgttctgaaacttttgctttatttattttcttacattatttttatcttcttttcccaatatttcaagcatttatgttttcccagctttattggagcttaactgacaaatgaaagttatatatatttaagatgtacaatgtaatgttttgatattttgatatatgtataacttgtgaaatgattaccacaatgtaactaatatatctatcatacatagttaccattttagtcaatatggtgaaaatatttaagatctactctcagcagttttcaagtgtataatacaatattgttaatgatagtcaccatgctgtacattagatctctagaagctattcattccagagaacataaacgttttagcctttgaccaacatttccctattgcccccacctctcagctcctggccaccaccattctactttctgcttctatgagtttaactttttttagatttcacatataagcgagagcatgcagtgtttgtcctcctatgtctggcttatttcactcagcatgtctccctgtttcatccatgttgtcacaaatgacaggatttccttttctttttaaggataaataatatcccatttatgtctgtgtgtgtgtttttgtgtatttatatattgcactttttctttatccatttacctgttgatgagcacttagattgattccatatcttggctatggtgaatgtatgaatgtattgtgaataatgctgcaatgaacatgaaagtgcagatagctcttccagatatttatttaattttctgtggatatataaccagaagtgagattgctgaatcatgtggtagctctgtgtttaattttttgaggaacctccatattgttttaaatatggctgtaccagtatactttcaacaagggttcccttttctccacatctcatcaatacttgttgtcttttatcttctcgataatggccattctaacaagtatgaggtggcatcttattgtggttttgatttgcatttccatgatgattagtgatgttgagcattttctcatatatttgttgaccatttatatgttttctattcagaaatgtctatttggatcctttgcccatttttaagattgggttagtttgttttgttgatattgagttgagttttttatatatttcagttgtgcttttgtggtcatatccaaaaaaatcactactcagactaatgtcatagggcttttcctgtatgttttcctggattggttcttcagttttaggccttatgtttaagtctttaattttgagttgactttgtatgtggtgtgggataagggttcagtttcatttttctgcaaatggatatccagttttcttagcaccatttattatagactatcctttacatgttgtatgttcttgccatgtttgtcaaaaatcaattcagcataatatatggacttatttctgggctctctattctgttccataggtctagatatctgtttttaatgccaataccatactgttttgattactacagttttgtaatatattttaaaatcaagtagtgtatttttattttaaatgtatttttaaatcaggatgcctccaggtttcttctttttgctcaagattgctttagctatttggggtcttttgtggtttcatatgaattataggattctttttctattttgtgaaaaataccattggaattctgttagagatggcattgaactgtagactgctttgcatagtatggacattttaacagtattctttcaatttgtgaacaccaaatattttctttttttcattaatgtggtatagttttcaaaatacagatatttcactttcttggttaaatacattcctaagtatttaactttttgacactattgtaaatgggattttcttcttaatttcctttttgtacagttagttgttaatgtatagaaatgcaactaattttatatgttgattttatatcctgtaactttactgaattagtttgttcatttattagttctaaaagtattttagtggagtctttagggtattctatgtatgaaagatcatgccatttgcaaacagaccattttacattctaatgggatcatttttcttcagcctgaagaacatattttaatatttctcacagagcatgtctgttgaagacagattccctcagcttttgtttaagaatgcattttttaccttaatttttgaaggatattattacacatagaattttaggttgaccatttcctattagctctctaagaataccacatcagtgtcttgtcacttccataatttttttggggagaggaacctcagcagtaattcttgttgttctcctgaagataatgtgtctttttctcccccctcactgcttttattgtgtgtttatatttaattttccacaacttgattatggcgtatctagatctggttttctctgtgtttgtcctgcttgagagtcactgagagttttgaatctataggttgctttcttttatacaattttgagaaatttcagccaatattttttcaaatattgcattgccacttttttcctctttcttctccttctgagactcaaattacacatatgctgaaggttttgactgtttctaatagttcttatggttttatattcttgccttctttttttgctttgattccatttggttattttgttttggaaagtctgtaagtactgttgaaatgttcttcaactattttgtcaaccttttcctctaagttttatcataattattttggagtcattgtttggtagcctcagtatctggaatgtttctggctttgctgagattgcctgttttatttattattgggttttggttttttttttactacttcctcacaggcctagtcagtttttattgtgagcaggacattatacgtgatatgttgcaggggttctggattatattatcttcctctcagaagggttgggtttttttctagtaggcacttatgttcctggcagatcactttcattcaatcaaggcttgaatttacaggggacctatttcaaattttccatgaatcctggtggattgccatatttcctagaatatgaatcttactcctgtagcatacttttctcacgtttcaattcagttctcagggttttcataaaagtatctcctttctgactgaatgaggcaacacatcccttcagtatttattatgcagtctctcttcaattcttagcaacttccctcccctccgaaactgttctctgttagttagacctgctgtcttctctgtgcatttgcagcttgggaatgagctaaggacccaaggaaatgcctgtacatttttgaggtgccatttccatgcagctgctttccttatagtatgcagctccaaaaccgccagatgctttggtagccctaaatcgtgagttgtttgtttgccatagcaagggtattgctgtctccttgggcttcacttctttgaattcttgagtgtgtatgggacatactttatatgcttctcttttcagagattacagtcctttgctgtttgttctcaatgcctgaaaatgataaaaactaaaacaaacaaacaataattccttactattatcaatcattaatcattgttcattttttcttaagtgagagcaagtttattaagacagtaaagaaataaaagaatggctactccataagcagagcagtggcatggactgcttgactgagtatacttacagttattttgtgattatttgctaaacaaggagtgaattattcatcagttttctgggtaagaggtgggcaattcctggaactgagggttcctcttctttttagaccatgtggggtaacttcctgatgttaccatggcatttgtaaactgtcatggcactggtaggagtgtcttttagcatgctaatgcactataattagcatatagtgagcagtgaggacgaccagaggtcactttcctcaccatcttggttttggtggtgtttgactgccttctctactgcatcctgttttatcaacaaggtctttgcgacctgtatcttgtgccgacctcctatctcatcccgtgactatgaattccttaaactcctggaaatgcagtctagtaggtctcagccctattttatccagcccctattcaagatggagttgctctggtttgaatgcctatggtttattaccccactcccttttacaaggggacctttaatcctaagggttgtagagggatgtcagtccattttctgtaactccttcaggatgaataggggtgatgatattcctgcctaactattagggtctcttgtattcagggtagagaggagcttagtcagaaagcgtcagtatggtgagacccgttcataactctgataaaaggtgatatccacagtctgccagttggtgctacagtctgtttcctatgggtcaggggttttctccgtatcgtccctgtggggtttgccaggaagatgttaccagaaaggattcctgatctagaccccaagagagggttcttggacctttcacaagaaagaatatggggtgagtccatacagtaaagtgaaagcaagtttattaagaaagtgaaggaataaagaatggctactccataggcagagcggcccattgttcaaatttatttgtgaaagaaatggattgtttgttctgtagatcatcccacatcttggattttgctgtttatattctacatgccatttgtcatgttgtttgtaaactggtgcttataccaaaaagtttggttaaatccagggggttttatgtggtaaaaaataatcttttcaggagatacatgaaatctgcttttctattatgaagttaacattggtcagagtgttctgatctcctcaggttgaacttcccattaaaagcctcttttgcactttctctaatggttttagcattctttaggttcagtatttagatgagttattcattgagacctacaacatgataatagtttgattttattatttcttctttatttatttattatttgaagttctttaatggaatagaagttactcatatcagctatttggttgctctcatacagagatcatgtaggaaaggtaggataaatgcttgattttctctctttttcttttttttaaaaagtattcaaattaataacttggttccttagcattcttcaaaatggtcacttattccattttattttgttttgttttcgatatctgtacatttatatattatatcacatttgatgtgctttaatcaattctaggcatttaaaaatgaaacacttttccgtgttttgtttgttgtgtttgttaataatttgttttcaaaactctggaaaattttccagttagtttctgaacttgttttaaccaaactccagttacctttgaaagctcctttgctttctggtcagaaaagatgttctaggctcttcctgcacattatttacctcaggactgaaaaccctgatttccctaaagagctctgactttttctgtgggaaatggtatttagatctcacaatctgggtgctacggatggctattggtactgggtgtgtcatcgtctctagacctttcagtggacagaattagaaaaaacttttttgttgttttttaaagaaaaaataccctatatattcatagtgatcttacactatattggaatattgagattatagagttgctttttttttttttttttactttacatttctacctcttctctcatacagtaaaaatcctggttcccaatgacatgaacatattatttatgtacttagtcctactgtacatattttcaaaataacaatactaatattattactaatggtatgataactggaaaccatttaagatttctttgttcttttttgtgtatttaaaatatgttttgcttgagcggtatagtcaaattacagtgtttaaggtcccttggaatatttctactctctatggttgtcagctcaatgcaattatttcaccagtttcacttcagttgtgattttaaatatttctttcatttttctcaaattttgctttataattatgtaaaatatatttatagttccaaagccaaatcaatgggcatggtagattatgagaggtctagcttttttttttcctgtcccttccactctgttctttctcccccattagagaacagtttttattagtttttgatttatccttctatttaaaaattaagcaaatgatctcatataattgtattttcctctttcttagataaaagggagcataatatacacactggtctatagttggctttttttcacatcatatatcctggagattactccataatcagagcatagtatgccgctatgtgatgtctcattttctgttcaatcaatactctattgacggacatttggcttgtttccagtcctttggccattttctttttagtcttttgttttttatttttgagacagggtgcgatcgtgtctcacagcaacctcaacctcccaggctcaagtgatcctccttcctcagtctccccagtagctgggactacagacacgcaccaccatacccagctaatttttatttttttattttttgtagcgatggctgcccaggccgttcttaaactgggctcaaatgatattcctgcctcagcctcccaaagtgctgggactacaagcatgagacatcacacccagtcttgtttccaatcttttggaattccaaatgttactgcaacaaaataccttattcacttgtcgtattgtatttttgccaatgtacctttgcgatatctttccaatggtagtattgtttggtcaaaagaaaatgaaatgcataggtttttgctaggtattgctatattctcttatgtagtgatcgtaccatcttgcattctctagcaatgtgtgagaatgtctatgtccccacagcctctccaataatttgttttcaaaactctgcatttttaacattctgaggggtaagaaatggcatctcaattaaggttttatttgctccttctttgtgatgagtgaggttgaacatcctttcatatgtttaagagacatctgaacttttttcagtgcactctattcatgtctctattctttttagaagttctttatattttaggataataactctttgttgcatattgcattttttcttattttgtcattaatcttttcctttgcttatgctattttatgcatttaaaactggtaacttttaaagtattacattgggaaatgcctctttttctgaagaactgagatgttttctcagtaggaacaatgagactcatggaactaatttgtttcattttttactttggcaggaaaatttttatttgaacaacctgtatagctatgtaaatttcatatcttacacatctaaaatgttacctatctcacttatttctaatgtctgtattactacagtctggatttttattatttagtgtttctgtcatttgatttacagtagcatttctcatagaaatctaagccactacagattctttgttaaataaatgtgggtattaatgaagagcaggttcttccagtcactagtcagcaacgttagggggccgatgtggtataatgaggatggtagtggggtcagcatcagaaagcctggctcagtccctcacttgctccattcttggaacagtggctcgatcactacagacatttgaattttttcatttattaaatgaatgttttaactatatgatagtattaagaaaccttctcaaatgaaaattatgtcacacttaaccattttaatatgcaaagtgatctggtttgctgaaacacacagaggttggcagaagttctggaattctttacaatttcacatacagaaattaatatcatcaaagtgaaaaagatgactctacaatcctggtattcatcgctcagatggttcagccctgtttaaatagtgtcagcatgtgatggctcacaagcacagagcttgacacatgggtgattcatttgtttatcaattgatacttctagacttgtaactttataaaactggaaaatgtaaatcttttttaatttatgagggtgtctaaaactgctcatagttatttaaacaaagtttggcttcttacgccaagggctctgatcattctccataaattatagcatctatacaaatgtaacattatttttccctcttattttagagtgtggaggtatcctgactggtccttacggttctattaagtctccggggtatcctggaaactatcccccaggaagagattgtgtctggattgttgtaactagtcctgacctcctggtaacatttacttttgggaccttgagcctcgagcaccatgatgactgcaacaaagattaccttgaggtaaataattatatttagatagaacatatcacaatatgattaggactcagggcactatggtctagccatgcccatggatgaccccaaaatattagctgtagttaggtgtgtttctcaatagtcagtcaatatctaactcttgcaaagtctctatttttaactgtgcctgtttgttgcttcttcttctgggttccatttgaatctgggaaacagattaccttgccctgctatggtgttacctggaagctcacacccctgccatgagaatgcagaatttatgaaataaacactcagtaatagccatctccttcaatgcagattcaaaccttcagttgtctgtggtaaactggcaaggtctttcacagcttaactgtagcattccacgaagaggccgggtgtggtggctcaagcctgaaatccctgcactttgggaggccaaggtgggcagatcacttgaggttaggagttggagacagcctggccaacatggtgaaaacccatctctattaaaaatacaaaaactagctgggcgaggtggcgggtgcctgtaaccccagctactcgtcagtctgaggcaggagaatcgtttggacccgggaggcggaggttgcagtgagctgagatcgtgccactgcactccagcctgggtgacagagtgaggctctgtctaaaaaaaaaaaaaaaaaaaaaagaaaaagaaaaataatagtgattgtgttgaactgggttaggttcctggaataaagtaatcattattactgagaggagaggtatcagccgaagctccttctgcctacccattagtaaaagattaaaatatggaggaggagaaaaggctcttatattcaaatgccgtttgtacgtaggtgcatcaaaaagtgttgctcttcatttgtagactgacaagataatggagaagattgagttcccaggttgtcctgtattttttatcaccataaatctcagccccttgcagcagtgtgaaaaagacaatacgcatttccaagtccattagagagggatagagtcaatgcaattattcataaaggatagaaggatgtggtgtcaaaaaggggctctgcaagtaaaagtcattagtaattcagcaataatggatttgaaacctttgggaatgactggaagatctgtctctctctggaaaatttctgcaaaatggtcatttaaatgttgacagaaaagtgagttatcttgaaattaattttcaataaattccatcaagttaaaattagaggctttaaaaaattcctacacattcatttctggagaccatatggtagaaagtgtcaaccactctgacaatattgaaatgtctctcatttctctttaaactacagtatttcaaagaaccagttaaatattagaataaagttatgctgccatctaactttgatcccagtaagaaaagtaatttgaatagacaaaattgaccatattaaaatattctttagttcattgactcctcggtggtttatatagtatagaatttgcaattacaacaaaattatagagagattgacatgattacatcatagattaaaaaccaacaattagaaaaggatttctaaggtcacgtcattatcattgtagtacttacttactatcaaagttgcatttttaaattcactaacctgtctttctgttgtgtctaatctgatggcacttcctctctacctctgacccttctgaaaacctggaccaagttatgaatcagttggcatcaatggtgttccttcttctgttttctttgcttatattcattttcttctagatcactaagaatttataatgaaaaaaatcaaaagggaaagatctttgattagtaacatcatgacaaaaattcaaactatatgtccagccttggaattgaaatccagtcacaggccaggcgcggtggctcatgcctgtaatcccagcactttgggaggccgagatggtcagatcatgaggtcaagagattgagaccatcctggccaacatggtgaaaccctgtctctactaaaaatacaacaaatagctgggcgtggtggcaggtgcctgtagtcccagctacttgggaggctgaggcaggagaattgcttgaacctgggaggtggaggttgcagtcagctgagatcgcaccactgcactccagcctggtgacagagcaagactccatctcaaaaaaaaaaaaaaaaaaattcagacagagagaaggcattggggtgatgggagaaggagacacactttgctgaacctcagccatgagttacatttggatgtgatggggaaacttccttgagcgatcacttttaaatgatagattttatgaagttaatatccaaagtgacctagtttgttaaaaatctgaccactttgagcttaatgattcatccttttgttttagattcgagatggtcctttgtatcaggacccccttcttgggaagttctgcaccactttctctgtcccaccgctccagactactggcccctttgccagaattcacttccattcagactcccagattagtgaccaaggcttccatatcacctacttaacatcaccttgtaagtaacctaccagttgggggcttaagagggatttgaaggccaatgctatgcttacatctgttttatattttaatgtgattcagaggatgactgactgtcttagaccaagaacatttctttataaatatttctctcatagcttcatattttttctttatcttcccaatgctctattattaatactgcaataccctttgatccctaaattatgggatccacatcatgataaagatgtatgaggcacccaaacttaaataattcagggcaccaggtccctcgtggtgtttgatgtttagttgtgagagaggtttgtgcatgcgagcagtgcagtctctctggattttatcctcgggtcaagtccagctgcacaggggctggggctggcttccagcatcacagtgtcccagactctagagcttcacttccagccaaatactattagctgttaggacctcagttgctttgataccttaaaacaaacaaacaacaaaacacaggaaatactctatgatttggatttttttagggaagtggaggattttgtttatgacatctattattgtgcccttaataaatgttctcagaaaaagtaccttttaagtttcaatatcaggaagagtaacaaagaacatctttacttgtcccctttcttcatttccttttctttccacggaatctggtgccaacctcctgttcccctttcaattgttttccgtgcaaatcaactccccctggctacatcttgctattctgtattcattttttctttaatctgcttcatgtatacagttatgtagtttattttgttacatgtttttaataaccatctcaaatcttattgaaatgaagcagagcattaatgtatttaaaaagcaacttatagaagagaatggcagattggaagctagatcacacatctctgcatctatttctttaagccactacagagatgtcccacaacacatcaaactgaaaatcttaaaattagaggcacaagcctatagagggtgaataaaatggatatgtgcttgtgtgtgtgtgtgtgtgggtaaatttttagaaattggatccaatgcctgcaagccagagcaatgccattgccatgacctgttcgtctcttccctgttcttagcggatctgcgttgtggtgggaactacacggacccagagggtgaactcttcttgcctgagttgtctgggcctttcactcacaccaggcaatgcgtctatatgatgaagcagccccagggagaacaaatacaaatcaacttcacccacgtggagctgcaatgccagagtgacagttctcagaattacattgaggtaactttcactactcaatcgcccttagatgacattcatcaacatttttatattctgcagagtggtggtcttcaaaagattgttgggccaccagcagccagaatacctgagagcttgttagaaatacaataataactaagctctaatgactaaggtgcaggcaaataaggctgataggatgtactaataagatacagatttattatctagaataattaatacaggaaagaactcaacccagggaagtgaagggatttgcccagatgacccagctagtcaagtggtaataaagtttaagtgttgaatgacccttgttttggaggttagggtttttccttcctttattctgcttgctctcctccagaaatctttaattttgatttaagtgtgggtaatgattgtaatacagggaatatttgaaacagagacaggctgtttttgtttgctgggcctggtatttcttatgctaaattattggtcaagccacaaattaaagtgttgagcaagataaaacattgtttttttgggcataatcattttacataaactagagaagaatttacaattttgtttgtttgtgcaagttaaatccatttattcatccaggaaaaacctatgtgacctcctgtcctcttctttctacatttagacagaggaaacagaactttagcataagatctagctagacttagttgaagtgcattgaccatagcactacagcagtatgtatgtatgtatgtatgtatgtatgtatgtatgtatgtatgtatttatttattttgagacggagtttcgctcttgttgcccaggctagagtacaatgtcatgatctcagctcaccacaacctctgcctcctgagttcaagcaattcttctgcctcagcctcctgagtagctgggattacaggcatgtgccaccacgcccggctaattttgcatttttagtagagatgagatttctccatgatgggcaggctggtctcaaactcccaacctcaggtgatcctccggcctcagcctcccaaagtgctgggattacaggcatgagctactgcaaccggcctgcattttttttaatccagaaatttttatttaagatcatttcagaatgggtatatttattcaatttaggttttctaaagtctcttataaagtatattaaagttttacactacggaagaatttcaaatatttttatgtaaatcaaaattaaattattaacccttttttttttaacttttgagaacagcaaaaatagctttcaattagagagtgcttcctgtactccaggcactattataagactttaaaatagtataacaaattaaatagataatgatcattgtcagcttactgcctgccatgtgtggtaagtgcttttcgtgagttatttcattgaatcctctcaacaaccattattatttctgttttaatcttaggaaactgtagcccagagaagttacttgtccatggttacatgtctagcaagtaatggagctgggattcaaatttaggagatctagttatacttatcttcagtaagaacagaaatgcaattgtgtgacgttgactacaagaggtgtctcatcttccatagggaggaaggtcttgtgaattacccaattccatacctggctctccgatcacgagactaaaacatgaagccgagcatcatgattttctcagatacgcaagaatgtaactataattttcagggaaatttggggccctttctgttaaagccttcatggtgattctctggttctaaagaactatcagtacctctgaatggttcatcctctcaggctttgcagaacactagaactgaatttcagtgagcggttccatgaactcctctgaattcttctgaaaagttcgcacaaaaaatcataaaactggctttggaagttttaatttcataaaccagaatggtggaatgttttgtagccagaaggggattaaagttagttcacctaacttcttattttagttcatttgtcagatgaccgtataaccttggacaattctttatctggatctttcagttcctacttcagtaagatgtcctatctatttctctaaactttgggggtagaatcaaggaaataaatgataaaaagaagcttgaagtgttaaaaaaaataatgcaaatgcaaggtttttctggaacaaagttttaactctagccttgaatttatcagttcagagacagccgatgtggctgtcacagttggccagcgaggtatctacattctgatgtaaccacatatcctcaaagtcttgaccaaatttccctcaaggattgttgatggaaaaaaaaaactgtattattcagaaggagaggtcatgtacggtgatttaaatattaatagatagatttttatattatatctttgaccaaccaacctaaaggaatacaaccaacctgtagaattttggcatcagcaaggaccttaattttacaaatgagaaaattgaggctcacaaaggtcaaactctagttattgtcaaagtaaaacttagatgtacctctatgagattctagatggacgtacattgactttggttaaagctcttgtctttaaatcatctctatccattgggaaaatttgtgaactgaacccgttttctaaaaagtatattcacttctcttgttgttcttcagatagtggtcatacaagaaagtgatacaggaaccaaattctaatgacattattatgactcaatatattgttccctaaaatgatgtcttcattttttaaagctatctctaaaaaatgaaatatttatgaaaaagaattaaaaaaagaatgttggtatttcgaatactttggtggtttagaggggggttgactttgtcctttactgactccattgatgagtaaaagcagtccacccaaaattttagaaagagtggagaagagaaaagaaattctacagagatgtgggagaatgatcctaaggacatttactttgcatgtgaataggtgtacttttaagaatcctagatcttctctttgtgtggttttaggtgccttggttgccaggcaaacatatccttcaaatgaagattaaggtaccattgctgagtgtgtatctttcacagatactgtggttttgaaagacttacttttgctcagtaagagagttccataagcactcattaaagaatagattttaactgcaaaagataagaatgatattgacccagtgtagcatatctttctttttttttaacacaaggaacacacattaacatgttaattcttagatttatatatctctcttaagtgaagtttctacttttaaagatatacattacccatggaagatgtgacatggctacaaatgaatgaatacaagaacagatcaattgttagttcatctgtttttgtcgaagagagcttttaaattgtatagaatagttcaatgaaggtgatggaagcatctttccagaataaaaagcagcacctctcattaatatttcataagtgatttaagccatcagaactctgagtgaaggacacataggtagtaatgaaagtttaattttaaatcccagagaagggaagttgtaggctgaataataaattcagaaggctatacgatgttaaggtgaaggcttgaggtaggatacgaagggaaatgagtagaattgttcacccatcaaatctccttgaccaatcccaaagtatctgcctcctctccccagagacactgaggaaccagaaagggggctctacaagagacgcagggagagcgatgtgccttctggagaaagagaagggctttcgagaagttgttgtttcttagatgtggaaagcaaatacaaacagaaaagttgaaaaatataatcaataagacaggaaggagtaatttacattgaattttatttctgaaatctagggaatatacctgttctacaagtggcgttgaaccctaattcatcatattttagacctctatggcaatcccagtaaattaacaaagcagaaattgtacatctcttcacaatataacataacccaagattatttataaacattttaaaatgcccaagtgtgtggaagtatgtgaactctccaaaataatcattggcttgagaaagaaataaaaaatgaaagactacatagaaaatgacaaacaggaaatgctgtgtatcaaaacctgtgagatgtgatgaaactcaactccctggtaaaatctttaagatttaaaagaagagaaccaaaataattgggaaagcaggagagcagaagctgaggcaggaaggtctgtcctccgtctgaaccttttctttcaccaccttcccctgcatccttccctctacttctccctccccgctacactcctgcttcagcctaagcagccctcccgcatctcctgcatgtctttagatgaatgcaaattcacaaaggacctccttttgtgacttcttaggcattgagatgattccactatgagcttgggattgggtgggggagagccaggacttgtggaatgcatgaggcacttgcttccctcaagtggacctgctgctcagagtctcatggctgcaattcacagactacacacctaaatgtcagaaaaagaataaggcctggagcaagcaaacacaccacataggctgaatagtattgtgtttttcagttaagtacatattgaaattaattgtaggtcagaaaaatatctttctagagagggtaggataaagggaaaagggggagatcctcaagagtttgtactcttggccaggcatggtggctcatgcctgtaactccagcactttgggaggctgaggtgggtggatcacctgaggtcaggagtttgagaccagcctggccaacgtggtgtgaaaccccatctctactaaaaatacaaaaaagtagccaagtgtgatggtgggcacctgtaatcccagctacttgggaggctgaggcaggagaatcacttgaatccaagaggtggaggttgcagtgagctgaaatcacgccactatactccagcttgggtgacagagtgagactccatctaaaaaaaaaaaaaaaaaaaagagtttgcattcttgagcatattggatttagggttttgacagagactaggaacatttggttagactctgagctctgttgttgtgagcacagtttttccacaactgctggaccatcgtgatgctttttagtgaaggaagaagataggccattcctctagtgaaataattctgtaggttggagtagtgggaggcaggaaacagactgagagatgatagaacacctaatttggagttgtgagaacttgtagagaatacatttttgctgtgtttgaaggagttgcatgctcatgtagaagctgcaaacccattgaacatgcgtgatgtagagcagtaagcaggaataagaggatatggatggaccattatcaagaacattacaaattcctaggtcaaatagagggtatggctggtacttttctgatataaaatggaaacaatattgcatggaaacatgataaaacccttcagctctctgtgttactaaaggcaagatacctgtaagccacagcttcctcatgtgtaatagggatagtactagtagtactagtagaaagagaccattcattcatttatctattcattctctaaatatttatcaaaccacttaggtttcagtcaccatgctagggaatgggtatgtaatatagatattaaataagtaagcacacactacataatttcaagaggagataagtatgggcaggaaagaaacagtactgtaagagaaaagaacagagctactgacttcagtggagcagtctgagtttgcttctcaagggtctttgtatggctagctcattctcatctgtagaccctgtatgtaggatctgcagatgaggagtgagcaatgcaaagaactgagagaaggaggactccaggtagtggtgctaacccagccctagagactgaagtcagaaaaaataaactaaaataattggaaatagaccagggtggctggaatcacacagggatggaaaagagaaatatgagttaggcaggagctagaccctgaagggtcttgtagaccgagataaagagcctgggttatattctatatgcaaggacaaacaattagaatgttccttgtcacattgtgcctgtcacacaatgaatgctcactaaagttaacatcatgatgataatgacgatgatgatgatgatgatggggaggagaagagagggcaggagaaggtgacctactggagtttgcaatcatgagggaaggcacttctaggtaaaacttattcatgtgttcttgattttagaatatcagatcttaaaagatcagattatatttattaatagagatgttagaagggacactttcacaaggcatgaaaaggtttaaaataccaactctaaaaatcatgaaacatactaataaagaacaaaggataataaccaaagtaaatgattttgagatcctaaatggcttctctcatctcttatcctcctcaccccttattctctcactgggggcagggcctcattcctctcctgctcacccagattagcccaaggctcctccctaaggtccagtctttacttagctaagatgtatgtcagcctgaagctcacttcacagaaagccacatgttaaacactaccatacggtgtggttctcttttcagctctcagatggactaagcgtaagtgccagcatatttgaattgctttgaattaaaatttaatgcttattattttagaaattatagtataaaaccaaatctggattcatagcagaggaagacaaatgagcgtgcgtattaagacatggctttgggacttgactcattccagatgttaaagctcacgactcactaggctcaaaagcccacatttaaaatttcatgtaaatggtgtttctcagcaaagtaaattttagttctctctatagaaaatcattcctttacaaaaactcgtttttttttatgagtagtttctcttctggaactagtttaatctgatgaatgtaaaaattggaagccatttggaatacaccatatgctgaacatcctgggacctgaaaccttcagtgtttcctggacgaataaggcaatccacaagaaatctgaacctggtccgtgaaacactagaattttgaattggttcttgttgtttccttgcaaatgcgattcactaaaaagaatgaattcactgtgactcctctgcaagtgatcacggcatggcttcacctgacttagaaaaattcagtttttctgcacaaaccagactcagatattggtcatctttctctaggttatgctgcaataacaaacaattagtagcaacaaccagaaaaatcaaaaacaataacaaaccaaaagcgtctgtggctttcaataacgtgtttattctttgctcacaatagcaggttagttttggatccattgcagttctgtttcctatgtcagtttcctgtgccttcaccgtcctgagacccaggctctagagcttgctgggggaaaagtaaaagatggttgaattatgcagtgacttccaaagcttctatgtggaaattggtgtatcacttttgctcacactctgttgggcaaagcaagtcctatggctaagcccatagtcaatgggaagattatgtattaattctccgtatggcagtattgcaagtcacatggcaaaaagcatagatagtcaatccttttacaggaagggaagtgaataactatgtaaaataatgccatccatcccagttcatgagcataaaggaaagaggtttttttttttttttttggtgggggtgcaaatttatcaagtcctagattattgaacgcaatacatgcttcagaggtagctagggtcactttagaacatttgatgaattttattctagtgtctctttcaaaggagttgtagttaaagtattgccatgtctagaatccagggagaatacaggctttcagaattaataaggtttcatttccacagagagagagagaaacagagccaaaatcaattgcaccttctaggttcagggcccttgagccctatgagttcctcttaaaacatttggactacagctgcctttctccttgttaaaatccttgaatttcattagttggggcccaggggaatggcccactttagcttgcagtgatgctatttggctgttttttttccttcttgtcatcttctaatgggcgaaatagaaaagagagactacaatcttcgaagaagcaaatagaaccctggaggattagagagcaggaagataactttgtgtttcatgctttctagttttcaagaactgcagtatgtctgtatctctaacaaaaactgaaccatcatactgtaccttaaaattaatgaatcaacaagaatttgtcaaatacctatttgcaaagttttttttattagatgctgaagggcaaacagaaatttttcccttccctcagagacttactgtttggttagagataaatttagcatagctttactacaatatgtgaaatttgtgttacagatgttgtaagagctcagagaaaggaactagtatgagcctgagtcagtggagaggcatgtgatttttcatgtctgtgtcagactctatcatatggctgaatcattatttatttaatcacctcactattattaggcctttagaatggtttcaattattgttattatagagcagactttgatgtggatctgtatatgtcttttcctgcatcttgaatatccttgtgatacagtgttagaagtgaaatacccttaatacatattgtcagtttattttccagaactttatacttccaccagttatggatgagagtaactgtcgccacatccctaccaactttgaatatcatccttttaaaatctttcctttactggctaggcacggtggttcacatctgtaatcccagcactttaggaggccaaggcaggcagatcacctcaggtcaagagttcaagaccagcctggccaacatagtgaaaccccatctctactaaaaatacaaaaattagctgggcgtggtggcgtgcccttgcagtctcagctatttgggaggctgaggcaggagaattgcttgaatctgggaggcggaggttgcagtgatccgagatcgtgccactgcactccagcctaggtgacagagtgagacttcatctcaaaaaaaaaaaaaaaaaaaaaaaaaaaagaaaacaaagaaaaatcttctctttactacctgtttgccttggcctagataactcctactcagctttcaagtctccgcttaaatgttatttccactgagttttccataatcccctgggtgagttcagagtctttggttaacccagtggttctctacaatttaagactttttaatatcactccttgattattcagaaatgaaatacactgatttaaccccactagacacattatatttaaaaatatgtaaagttgtaagaataacattaagaaaaaatagagtaacagaataaaatcacatttatttcagtatctgaaaacctaggcaagctgtacttgaagacaaaataaagcagttgattgtctggaccccaaattgctatgaatatgacagtacaaatgcaggctgacacagttatgtgggttggtgactaatttttcagaaatagtgactaactcttgacagatttccaggagaaagaatcttcaatttacactctacttgtaatcctggaaaattcagtatgcattaaaattgcacaaaactactttgcgcttaatatgtaaaatagagcgagattttatacccaataacagaactttcacttatgtgaatgtcacacaggttcaggagaattcttgttgtgtgtgacgctcacatttcaggctgcctcgtgtctttggtcccttgctacttactaaatgccagtaatgccccatgattgctgtgataataattaacacaaaaccaaaaaggtactctcacacatttcccaaatgctagattgtggtccctgctgagaaccattggttaggtaacaatgaagtatcctgcgcttccccaaaaaccgcagtcatcatacttttcaaaaatgttcctgcctattgtaagttccttgtgagcagtgactgtttcatggtattgtcacctgcacagttcctggcatttattcatgccttgataatgttaatgaagtgaatgaattaatatttggatgtctgtatccttcagaataattgtactgaacagcggcggtatatatatccatcgaataattcctgctcatagtagcaagcctccagtgtttcacctccaaaaatgtccagaataacaacagctatccttagtcaacattttccattaccaaacatttggctaaggaattcacactattgtttcatctgtttgcttcaacaatcccatgagcttagatagagtaacttgctcaaggctattaagtgaggtggtttgtaagtgacagaggtaggttttgaacccaagtccatagactgtattcatggccactatactataagagctggctatttggccgggcgcagtggctcacgcgtgtaatcccagcactttgggagtccgaggtgggtggatcacctgagattgggagtttgagaccagcctgaccaacataaagaaaccccgtctctactaaaaatacaaaactagctgggcgtggtggcacatgcctgtaatcccagctacttgggaggctgaggcaggagaatcacttgaacccaggaggcagaggttgcggtgaactgagatcacgccattgcactccagcctgggtgacaagagcgaaactccatctcaaaaaaaaaaaaaaaaaagagctggttattgatttaaaatcagtagtctattatatgaaggaaattccttttttttctaataaaacaggaatgctaacaatgttttttgaatttatggagttatcatatggcttatcttatctgatgtactgaggaagttaatttatagtttataatttctaacctttcttgcactattattattcccatatttgatctggtatataagctggcaatggactgtgaatttatttttctagaactgtgtttaggatttgtgtatctatattaataggtgacatcagtctatagtttttatttctataatctatgttgggatttggtaacagcgttctaacaaaaattatttggaaattattctatgtttgaggatggcttagaataaattatacatgggaattatctcttccttaaaagttttaaagaatgtactaagtagagcatcttatgggagatttttctttttgggggttgagggtgggatgggaataattatttgataatgttttcaattttatttatgacttatgtctgttcaaatcttatttttcttctccttcagataattttaatgttatactttttctgaaaataacccattaaaaacattcatagagttgtacatagatttcacgtttaaaaaaatcttagtatctgtgtctttgtcattttcaattttgtatatttgtgcttatatatttattttctttttagacttgccagagatttgtcttttatatccccacccataaccttcctcaaaaaaacagttcttgaatgtatttatgaataccacatgattttgtatttcatttattaagttttgctcttctttttactgtattcttcctcattttaaggatttttttctaacttaaaaaaattgtacatagagctgggtctcactgtgttgcctaggctgtctccaattcctctcaccttggcctcccaaggtgctcagataataggtgtgtgccactgtccctggccttctttctaagtttttaagttgactccttacattcttttactttctctctctttcatcaacttttcttttttttccttttttctttcaatggcaaaagtagtttagtccataactttctttgattgcagatttggctaacacgtgtattttttcataggtaatattctcattttttattgttttccaagtagtctaaattgtgaatttatttcctctttgacattgtgaaaattattaggagaacattctttaaattcttgtgcttttggactttattggcttaggattttatcagcatttcatgttattgcattgtgcttaaaaatgacctactgctttagaaaataatagaaatatgtaactcaaattggattatcattcattttgaatctgccattttttcatctccaagtaacgccaccattgccgacgtaagtttctttatttgaattacatctctattttatttttctctttaggttcgagatggtgaaaccttacttggaaaagtctgtggcaacggaaccatctctcacattaaatccattactaatagtgtctggatcaggtttaaaatagatgcttctgttgaaaaagctagtttcagagctgtttatcaagtcggtaaggaaacatataatttttaaatgtctaatttgcctgattgtaatattttaattcttcaaaataatttagtcattttatgtcctcaagtgttaagtggaaaatattctcatagaaatgttatattcggttatctcctcaggcagtattagattttgcaataaaattgagataaaattattaatatctggacaagcactactataatttttatgcttacagcttgcggggatgaattaactggagaaggggtcattcgctcgcctttttttcctaacgtgtatcctggagaaagaacctgtaggtggaccatccaccagccccaaagccaagtcattctcctcaacttcactgtctttgaaattggaagttctgcccactgtgaaacagattatgttgaggtaagagggaaaaaatctttgaatttgtatttggttgtatattataaaaaatattatgggttgttgtcttcaaatctgttataggaaatgaaagtagtttatgtagaccaatatgtcttatggatacatatgtaaaaatcctcagcaaaatactggttcagtgaatctagcacaaaaagaggatttatataccatgattaagtgagatttgtcccgagaattctaggttgatataaaaccccagaatcagttaatgtgatacatggtaccaataaaataaagaacaaaaactccatgatcacctcaatagatgtgagatctggattttgctggatttgacaaaattcaacatcctttcatgatgaaacactcaacaaactaggagtagaaggaaccttccttaatctcataatggacattcatttaaaaactcacatctaacatcatatttaattatgaaacactaaatgctttgcccctatggtcacaaaaagacaagaacgtctgttctcactacttctattcagcattacactggaaattctagctagagcaattaagtaaggagaagagataaaatgcatccagaatgaaagggaacgagtaaaattctctctattcacagataacatgaccttgtatataggaaatcataaggaatccacacacataaaaaactattagaactaatccattcagcaagttgtgggttatgagatcaaaatatagaaatctttctttttctatacaccagcaatgaacaatttgaaaatgaaatcaaggaaacaattccatttacaatagcattaaaaaataataaacatgaaggaatacagttttaaaaataagtgtaaaacttgtcctctgagactataaaacgtccttgaaagaaatttaaaaagacctaaataaatggaaagacatttaatgttcatggattagaagacaatattgttaagatggcaatactccctaaagtgagctaaagattcaattcaatccccataaaaatcacagcgggctcttttaaaaaaatacataagctgatcgtaaaattcatatgaatatgcaagggaaccagaataaccaaaatgttcttgaaaaattacaaagttgaaggactcacacttcctgatttcaaaacttagaacaaagctacaataatcaagacagtatcttattgaagtaaggatataaatatagatctatggaacacaattgcaagtccagaagtgaacacatacttttatggccaattgatatatgaaaatgatgccaaaacatatcaatggagaaaaatcattttttcaacaaatggtgctcaatagccacatgcaaaattatggtgctggaccccttccttatagcatacacaaaaattaactaaaaatggattatagacctaaatgtcagagctaaaaccatgaaactcttaggagaaacctaggagtagtctctatgcccttcagtttaggcaaagccttcttaaatatgacacaaaaagtacaaacaaaaaaagaaaaaagaaaaataacttcctcaaaattaaaaacgaataacttgatttttaaaatgggcaaaggaggctgagcacagtggctcacacctcatcccagcactttaagaggtcaaggtggatgaattacttgagctcaggagttcgagaccagcctgggcaacatagtgagaccccatctctacaaaaaattttaaaaatagctgagtgtggtaatacacgcctgtagcctcagctactcagaaggctgtggtaggaggatcacttgagcctgggaggtagaggctgcagtgagctatgattgtgccattgcaccctagcctgggtaacagagtgagaccctgtatcaaaaaaaagaaatgccaaaaacaaaaggacacacccataggatagctataataaaaagagtcagataatggtgtggacaaggatgtggagaaattggaacctttatacactcctggtggagatgtaaactggtacagccaccttgaaaaacagttggcagttcctcaaaaagttaaacatagagatactatctgatccagcaattctacttttagatatattctcaaggggaatgaaaatatatgtccacacaaaaatttgtatgtgaatatatctacagtcatcatctataataacatatacaaatagcaaaatgcaatcattatttttaattttaaaagtagaaacaacttaagtgtccatcaactggtaaacggataaataaaatgtggtatatctttacagtggaatattacaaggcattaaaaaagaatgaaataatgatccatgctacaacgtggatgaactttgaaaatgttatacagtgtgaaagaagctaatcacaaaagaccccatattgtataatcccattttgtttgaaatgtccaaaatgggcaatctacagagacagaaagtagattagtggctgcctggggctgtggtttcaggggaatgaggagtgactgctaaaggatatgagtgttttttggggggtgactaaaatgtgctaaaattgattgtattctcaaattgatttgtactccattaaaaacatttcagaaataattattcttgaagcagttttcaaaattgatatacaacatatttgaacatatcttctctaattttagattggtagcagttccattttgggttctcctgaaaataaaaagtattgcggtacagacataccttcatttataacatctgtgtacaattttctttatgtcacattcgtgaaaagttcttctactgaaaaccatggtttcatggctaagttcagtgctgaggatttgggtaagagattgttcccttttttttttcctcctcttgggcttgtatcagaataagtgaatgatagaaataaattatatgaaaatcatctgtactgtgaaaaattttaaagtacactcaaagacaaagaatatatattttctaatcaacatttatatcaaaagttaattgttacttattaataagagaaaaatcaggttatcttaagtggcaactaagaaacatttttccttttaatctttgaagaggttattatcagagccttttaatttgaaatccaggtagcttggttacttgctgcagtaattataatttttatttcaacagcatgtggagaaattcttacagaatcaacagggaccattcaaagtcctggccatccaaatgtctacccccacggtatcaactgtacttggcatatattagtccaacctaatcacctgattcatttaatgttcgaaacatttcatctggagtttcattacaattgcacaaacgactacttggaagtttatgacaccgactctgagacatcccttggaaggtaaggttatgtttgtttgtttgtttaacaataaaacttcactgatttcctgcttcagtgaaggatcttaaaattgaccacgttgtgttatgaaaaccaggtgagatcctcatgcttcttaatgaccatttctacataactactctgtagttgtggcctgtaggcattaagttttgacatctgtatatattcatgaagtcaaaaccaaaattaaaataatgcatatatccactacccacaaaactttcttcctttccgttataattccttgcttttgttcctcacccccacccacaggaaaccacaaatctactttctatctctgtagatttgtttgcatatcatctaaatggaatcatactatacgtactgaatgtttttctgactttcctcaattagcataatttttgttgagcttcttggatccgaagatttgtagttttatcaaattgaaacattcttggccactggttcttaaaatatttttctgtctttcctccccattagggactctgatttcatgtatattaggcacttgaaattgttctacaactctcttgatagtctgtttgatttcaagcctctgttctctgtgtgttttactttggaaagttcctattactatatattcaagttcactcatcttttcttatgcaatgtctaatctgctattaactttaccaagtgtatttttcatcttagatattgtagttttcattttagaagttcaatttgagtcattttatatgtagtccatgtctctactttacacatgaattttttttctctagcttaaaaaatctgtgagatatagttgtagctattttaatgactttatctactaattcagacatttggattgtttcctgctatggttttatagattgatttttcctctctttctgagttatactttcccacgtcttttcatgtctgggtaatattcagtgggataccagacattttcaattttatgtttttggctgctggacattgtcatattcctgtaagtattcatgagcgttgttctggaaagcagttaagctacttggaaacaggttgatccatttcagttttgcctttaaactcatttgtttcctgtctctgaaggtttgttgtcctacattgcttgatatccagtgttttgagagccattgttttatacgtttttgtccaggatttttgttgtttcaggtgcaaagttaaatctagcctgttattacatttctgttggaaatggaaatcttttgatattttaaaatgtctttatcttgcattttattttctttatttctcattcatgttttaaatatccttcttatcctaatctttcatctttttaactttcttctttttcttttttgggaaggtacttaacacatcaccactgcaaaatacagaacgtttgctgaatggcataaactataatgatcttccccaaatttcatatacatgggcatatacgaaggcatttaaaatatcaattagttcacctacctttattttgatgaagatattaaattttttttcacactgcaatggtattatacaccaaattttctttctttttctcctttagcaattgacgtatccatttcccgtactcaacatttcctctctttttggtttctatatttgttttctttatcatttcttttggttaattttaccaagtgtgctttgatttgagattcctattttattgtcacttcttcctacaggtatttctccagataaaagctcatggcattctgtcttttatcacaactctctttttaacattaatagaatagtttttctgagctaaactgcttttgttcagcagaaacatggcatggctgaatcatcactcttatctctttataagtgagctgtttaaggacaatagattccctctataggggttacgattgtaggcactgttctaagtgctttatatacagggtattaactcatcacattctcaaaacaactctatgaagtaggtactgtcatcattcccattttagggatgaggaaggcaaggcacagggattgagtgatctatgagtttagattagagagatgactctatgattttatgatatattgtttccctttgttgtataagtttattacatttctattaaaaagtgtattaatatgctatatggcaatctagtgtagcttttattaaacttctcatacatgacaactcacatagccagtcacatacctaaaaccatttcagggatataatcatgaacgggacaatctttcgtaagtttgcaaatcttttttgcctgaaatatatttgtgttttaaggttgatgagaggtagagaacaaaacctattattatatttacatgtccaaatttttgttacatcattttcagtataccaaactaaaatacacacatctgtcctttcttggtttggaatagatactgtggaaagtcgatcccgccatctctcacaagcagtggtaactcattgatgctggtgtttgtgactgactccgacctcgcttatgaaggcttcttaataaactatgaagcaatcagtgcagcaacaggtaacaaaacagcattgcatactcggttttattgactccattgcaaaacagtgctaatagctaaaacacaatgagaatacatcatccgcaaacctgtggcacacaatgagagctatatttagaataaagggtagtgacttaaataccttccttattaaaagtagtgactagataagaatattgtgtcaatattaaatcttctaatgttggtaattgtactgtggttttgttaaaagaacgttttttcttcccttaggaacaatacactgaagttttcagacggtaaagaaatataatgtctccaaagtactctgaattggctgagataataagtgtgaatatttgtgtgtctgtgcatgtgtgtgtgggggggggggagagagagagagaaatgataaagtaatgggagcagaatacaaatacataataaatctgggtaaaaagaattcaggagctcattcttgcatcttttaaaattctatcagaatgaaaagttaccaaagagactgaatacttatgttaagaaattagaaacagaataacaatgtataaaaattagagactaccgcatgaaattccagggaaaggaatggaagatttcttggcaaaatatgcatttctcaatttgacctaatgaagttaaacttttcagcatttattcctttcattgtatttttcctattacttaatttctcattattactatgccctttgcaaatgaagtataggaaacaaatcccttttgcaggcacagtctttgaggtaagatgtgaaccagagatgctcccagccccaagagcctgtgcatgggattgatgaaggagtcatatttcgttaggctcatgtttccctaggatgtgttgttttttagagactctgagctttccttttgcatcattgtattaaaggacccaaataacatccagcatagacccatagtaggcatatggtgaccatgcttccaagcatttctccgctttgggattaccccagcagcatggtacaattcactgagctccctccagaaagaactggtagcttttcctatgttgggacatgcaccctgtgacacactctggcatcctgagaaccccagatgcttatcttttaaagtccccactccctaaaataaataaaagtttaaacatctcccactcaaaatcttacccaatttcccatttatttctccttcagaggggctggccactactcttcatttcaggcaaaactctgcagcagttcaagttctatgttcaaaagcatggctttagatttgctccagaatcctgagtgtgagagaatcaatcaatacttttctcccaggtaggaacctctgcaggagcagttcattatccagctcaagtgcaagcacatgcgaaatggaatccctggcagttacaataggctatggtgtgtgattgacgtattcactggacttcattcaggtggttaacatccagtgaccaaaattggtttcttaagaaattatagggtgcacacaatttttcatgctgttgtagttttatctgtctggtatgtttggccccaaagcacactgaatattagatcaggatttggagcaagtcacttgaactctctaggccacagttttctcatctgtaaaattaaggaattggatttggtaatcttcgagagatgacttctggctttaatcatctatgaacataattttaatttggtgcatgaataaactggctgtatcttagataacatataatacaggcagggcctcctgaaaatgtggaaatctttgtaatgatatgcaaagtaagacatacctttgtaaaacaattctattaccatcctagcttgtaaggcaatattttgtgcagaaagaacccagagcagttaaaataattgggcagggaggatattagattttaattctaaaagttttcagaaagataagatacacgtaaaataaaaatgagtcaggaaaagagatagaagcaaactggacaggaaaggaaactataaagaaagagagaagaaaaagcaagcaataaaagtgaaggggagacgatgttttcatagaaactcaaaagattctccagctggcttccctgtgtgataatcattactttggcctctatttggtctgcataaggctgaaatcacagacgagggagtgtttgctttctgtccctgggctgagcccggctggtcactgtgcccgcttgttgttggatgaactcataggtctgactaacacagtcaagccattctaaatagcaatcagatgacgagatccaggaagacacaacacaccttctgtttataattctggagcctgtcacagtttcccatagatcaagacctgagagatcggctctcatgcattgctgagggggggtcctgcagcattttttagggaagggctggtgtcaggagactgagctggtgttgggctggtgacaccaggtggtgggctagtactttaaggcagtggctagacctagaaggcagccagagtcagagtgagctgctggtgtggaaacacagagatgctaggactcattcttttcaggtgtcatcgtatgttggatattttctgcagaataaaatagcatcagggaaaagcatcaagggaagctcagtcatttgccctcatcttactttattgttctaacagaagttatttccagagcagtaatgttggtatttggttgttgatttctagctcctcagcccaacaggtgtgagtttgcctgctgaagtctttcttgtcttcatctgataaaggttaagtttccggatttgagttcagatacttttccatctgtagtttgtgccatgtggctatgatgtcagccccaaaatatgtgtttgggagaaaaaagattggtttcttgtgattactgggacttcctcccttgttactttgtttctgcctttatccagatgtgcctgggaaaacagaaagaaaagaactaacaagtacaggtttaacaggttaaaactcttacgaagttcttagaaactacaagactaagctttaatttaacgtattagattttgctcattcaaactacaaaatatttgaatcctgagagactataattgactaatgttatcaatttaaagtaaaattttatattctattaacatgtattgcatatacattaatatataatcctgctaagagggaactttaaaagtataaacagggacagataaatgtaccggattcattttcaactttaatattagaggaaaacctatgtaacatctagtccagtgcttttcaaactgcaattcatgactcattcgtgagtcatgaaattaatttattcggttgctacttgtgattgttaaaagtatggagtaggatagaaaggaataggagagaaagtatcagagtttatcatacaaagtaaggtgccgcttcatgagaactgtttgtagtatctccgcgcatgggtggctaacgtaaatgtattttttagggtatgtcaagaaagtttgaagcacaaatctattccagttaccttaatttttaaatgagggagatagaagtctaggatgttgaatttatcctcccaagaatacatagctgattggtttgaaagtcagactaaacaactgagtcccgtcttagaatccattgcttttgccatgtctaggttagctcttagaaacgctctaaatgaactgcatataacagctagtaacatttaattcagggctatcatcaaactgtggtggatttttcatatttcctgcaaagcgaaaaccttcacaattgtccagggaaatggccaaggatgatcccaacaacaacaacacaggattagagatgagccctactgggctttcttggcctccctccttcccagggcagggttcccacctactcatcagtgggtggttagtgctgttttttatcagtgatcctggaatgagctcagaagaggcatctagcagtgcaaagttaagaaatgatgacaaacatgcccaaagaggccttctttacactaaacgggtaaagagagttctgtttctattttaaaacttcagtttgggagtgtagtgttctcaaattctagtgttcataaggaatttgagatgggggattttcttgctataaattcaggcatctgggccccacccagaaattctgattaaaataggtctagggtgcttgttcgccaagcaattcaaggggttctaatgaaactttgtagtttatcaaggactctgaaagtcaagccttagcatgtgaattgctgtagaattacaagggagatacaatagtggattggactgtaactgctcatgatggaaagtactattcatgacacagggaaaggggatgctgtagggaggtcagaagtcttggtcctactctcagccttgatactaattaggaatacttttgtttgtttgtttttgggttttttttgttgttgtttttgttgtttgttggtttgttttttgagatggagtttcactcttgttgcccaggctggagtgcaatggcaatatctcagctcactgcaacctctgcctcctaggttcaagtgattctcctgcctcagcctcccaagtagctgggattacaggcatggtcaccatgcctggctaattttgtatttttagtagagacagggtttcaccgtgttggtcaggctggtcctgaactcctgacctcaggtgatccccccgcctcagcctcccaaagtgctgttattacaggcatgagccaccgcacccagccataatttggaatactttggacaactcacaagcctctctgattatttctatcgaccttgaattctgtattctttgctatgagagattcagatattttccctctggaaaaggtgttgtagtaagtcgattcgtcttttaaagatttactttcttactggctagtgttttctcataattttgtatgtacaggtgtcccagcacttctctgctcagttcgtttatcttgtttgttatatttcttactccttagaataaaaatgcaacaaaatgcttaatcatgatattctgagttccctacttgtcttcatccttaaattgacatttcctgtgtagaaaaaccagggattgtggccaggcagggtggcttatgcctgtaatcccagcactttgggaggctgaggcagtcggatcacctgagatcgggagttcgagaccagcctgaccaacatggagaaacccagtttctactaaaaatacaaaattagccaggcgtggtggctcatgcctgtaatcccagccacttgggaggctgaggcaggagaattgcttgaacctgggaggcggaggttgcggtgagagaaaatcgcaccactgcactccagcctgggcaacaagagcgaaactccatgaaaaaaaaaagaaaaagaaaagaaaaaccagggattgttaaagagaataggatttggaaagagggaacttgggttcatattttatcttggccatgtctgaagttaagtgtcttttagaatttaatctccaggaacctgagatctctcatctacacctctctaaaaagtgtggtgataatgcctggctgttttgcaaagttgaggaagacaaaatgagacattcaatgtgaaaattacattagagttgtaaaggaccatgactttgccagatataaaatatgattctcaatatccaaggacaattttacaatagctactttgcttatttctatatgaatctgcactggtcatctgagagggaaaagaaaaagcaatgaccatgaccgcctagcagaaaattgtagcaaaatgttgagtttgattgagaaggcttcttctttcttaagggagaaactgaacctgtaattatatcttcccttgggtcttcactttgaaggatgctaaaccaaatatgtctgtggaagcagatgatggctcctgggttagctgtttatttagcacattcctagaatatcagaggtcatatggattcattcagaaaccaaacatttcataagtgatttcagaaagcatagcctaaagattgagcctcaatgtaattggatagtcacataaatcatcccataatgcaaagcaggaaggagctggagcagttccccataatctagagtctccctatgagatgcattcctctctccagaggatcagcttatcctatttctgtggctcaaattttatgggactgatatcattgttgctttgtggtttggaaggttatagatgtttctcattttcccctttgataatgagccaagtcctgtgttacaaaaacttatttgaaaatgtttagtgaaggcaaagatacattgtgagttttagaaaagtctagttttgtgatttttgtaatggtccacagaaggcatttgtatgttttttcatttctttctttacattttttttttttgaggttggtcagagagaaaaatatgtgagttttgccaacagttgtctttgatcctcagagatgtgcttttccattgctagttcagttgaatttaggggataggaaaaatgtactttcatttttcatttctttgtaaatgttcttagaccataataaaaggctaaactgatattggatatgaattttcctttggcaatacaagataaaataaaaggcatagatacatttttatctttgcattttgtattgatgtaataataagcatcatgccaacacataaatatccttgtatggaaacacattctaatttaatcatttgtgctttgttgaaaatcacaagaggaaaccaaaacttagtattgatatttttcagtattactattattctagaaggagccatttatattgtcaagggaagaaatgtaaacatctatagagttcagtgatagttaagaggggtttttaatctttcaagaaatagatgcattaagttcagagaatagtaatttttctctctatgaaatttgaatctcataaaactaccatcaggttttaagattaaatatcctattgtttaatacgtgtagcaggggtcccttcaaatatgatgttttatttctctatttcaattttatgtattctttattagatatctgaattatttattggactttctctagagagtgcaacctgtctgtgcacagaactttcaagcttttaacataatatggatttttccctgtaatttcagtaaatttatccataattttcagaattgtgtacacccatttaactacctctccattcaagctatcgaatacttctgtccctccagaagggatcctcgtgttccttttattagtttcctcaacaacctctatgtcagcaaacacacacctggtttctaccaatatagaatagttttaactgtgcaaaaggcagctgtgaacaggaatacatagtatgtattcttttgtgtctggcttcttttttttttgagacggagtctctctgtcacccaggctggagtgcagtggcgcgatctcagctcactgctacctccgcctcccaggttcaagcgattctcttgcctcagcctgcccagtagctgggattacaggtgcgcgccaccatgcccggctaattttttgtatttttagtagagacaggttttcatcatgttgaccaggctggtcttgaactcctgacttcttgatctgcccaaattggcctcccaaagtgctgggattacaggcgtgagccaccgcacccggcttggcttctttcatttggcataatgtgtctggaaatttttcatgttgctgtattcatgtgtttttttctttctattgctgactagccttccattgcatcgatatatcataatttgattatctgttcacctgttgttagatagttgagcttttttttcccagtttttagctattacaaaaaaagctaccatgaacattgacttgcaggttttttgtggacgtattcattctcttgcgtaaaatacctaggagtagaacttctgggtctcatatggtaatgatatgtttaactttataagaaagtgccaaattgttttccaaagtggttatgccattttatattcccacctatatgattgacaattctgaaataggagttggggctccacaccagaccagatggaagactggctaaaacagggaagagacagaagcacctctgcataagacatgcccaacagcgccatgacagtgtgccattgccatgacaacacccagaagttaccatcctttttctagacatttccaaataactcaccccttaatttgcatgtgggtgtaaatatgactgcacaactgcgccaagctgctaccctcaacacgttgcctatggggtagccctgctctgcaggagcagtcacggagctggaacactgatacctcagtgaagctgattttttctaccaccagctcacccttgaattctttcctggccaaagcccaaaaccttcctgggtggagtcccaatatgggggcttgcctgccttgcagcagttcttttctccatctttcccaatccttaatattgccaatcttttcatttttagccactggcagttgcatagcagtatctgatggttttattttgcatttccctgatgactaatagtgctgagtccttttcacatgctttttgacaattcatttattttcttttgtgaggtgttcattaaaaccatatggttcatttttgtttgtttcttattaatgagtcatatgttgtatattctgcatacaaatacgtcctttgccagataaatgtattgcaagtattttcttccagtgtgtggctaaacttttcttttccttatggtatcctttgaagaacagaagttcaatatatccttttatcccttttatggttagtgcattttgtatcttgtctgagaaatatttcactaccgaagttatcaggatctcccacgtgcatccttctagaagttgttttttttttgagacggagtctcactctgtcgcccaggctggagtccggtggtgcgatctcggctcactgcaagctccgactcccgggttcacgccattctcttgcctcagcctcccgagtagctgggactgcaggcgcccgccaccatgcccaggtaattttttgtatttttagtagagacgggtttcaccgtgttagccaagatggtctcgatatcctgaccttgtgatccgcccgcctcgtcttcccaaagtgctggaattacaggcgtgagccaccgcacccggctccttctagaagttttatagtttgagattttatacgtgttctatgatccattttgcatcaatttttctatatggtgtgagttatgtgtccaagtgtgtttagcaaatggtatttaattgttcaagcaccatttattgaaaagattctccttcacccccactcccactgaattgcttttgcatttttgttgaaaatcacctgcctgtgttcatgtgtaggtctgcttctggaatctctatttcatcacactgctgtacatatttacccctttaacaatagaacattatattacttaatgttacataatttcatattgtatattaaaatctggaagtataaaacctctagattggtacttatttttcaaaattgtttgggctatcctagattttttgtgtctccatattcattttagaatcagcttttcaatatataaaaaaacttgagaatttgattgagattgcattgaatttacagaccaatttggggataaaggtcatcttaaattcagccttccaatccatgaacatattttacctctccatttattcagatcttccttcatttccttcagcaataaagttttcagtgtagagtttgtgcatgtttctattaaacttgttatcaagtgtttcgtgtttttatgctattataaaatgacatgccatattatatatgctattttaaaattttactttctggttgtttggctgatatatgcaacataaatggatttttgtatacatatcttgtattctgcagtcttgtttaactcagttattagttctaatgacttaaataaatcctttagtatatactacatagatgacaataactgtgaataagttaaataagttttattttttcccttctctctctctgtccctctttctctgtgtatgtgtattgctgtgatggctagaactttctgtgcattcttgaacagaaagggtgaggttggaatgttggcctttttcttaatcttgacaggaaagcgtttagtcctttaccacttaagtatgatgttagctttggattttccatagatgccattcatcagtttgtggagttcccttctgggcatacttgctgagtttttatcctggataggtgttgaatttttctgcatcttttggtatctttcaaagcttttctttttttattctgtttaggtggtaaattatgttgatttagttttctactgtcaaaccaatcttgtgtaatacatcagaactccacctggttctgatctattataacttttacgtgtattcagaattgttatgctaaaattttcttatggatttttgcatcagtgtaagacatactgaactgtaatcttcctgaatttctttgtctggtttggtataggagtaatattggtcttgttagttagaaaatatcttctcctctattttctgagtttgtggaatataaacaatttcttaattgtttgatacaattccaccagtgaaattatttgagcctgtagttttctttgtaggaaggttttatattacaaatttaatttcttcaattaatagagactattaaagctttctatttcattttgagtcagttatgggaattttgaaagaattcatctattttatgtatgttgtcaaatatatttgcacagttttttgtaatggtgtctttctattattttaatgtctgaagattctatagtgacatcccctcttcattcctgaaaatggtaatttgtgttttttttcttttttctttgatcagttttggtagaattctatcaattttaataattttctcaaagaaccaatttttgacattgtttattttctctattgctattgcattttccatttaattgatttctgttcttatattatttcatttaattcttgccttagttagcttttctctagtttctttagataaaaattaactacagatagatagatatagatatagcctttaagcactacttcacttcacctccccagttttttttttttttttgagacggagtttcactctcgttgcccaggctggagtgcagtggtgcgatctcagctcactgcaacctccgcctcctggtttcaagtgattctcctgcctcagcctcccaagtagctgggattacaggcgctcgccaccatgcctggttaatttttgtatttttggtagagacggggtttcaccatattggtcaccctggtcttgaactcctgaccacgtaatctgcccaccttggcctcccaaagtgctaggattacaggagtgagccactgcgcccagccacctcccaaattttaatgttttattttcagtaacttccagttcaaaatattttccaattatcttgtgatttcttctttgttctatggattatttgcaaatgtattatttaactttcaaatatttgcaggttttctagatgtcttattgatttataatttcagttttattgtggttaaatgatatactttctaagttttcaattgtttaaaatttatggagaattgtgttacagccctgcatgtggtctatgctgctgaatgtttcatgtatgcttgaaaaactgtgttgtctgcagttattaagtgtagtgctctctgtcaattggctttaagtcggctgagtgttggtcagattttctatacccctattcatctttatctgtttcattttcggttactgagagaaaggtgttaaaatcttcaactctaatcatggttttatttttttctttaatttttgccttttcactttccttcgtgtattttgaaactattacttcatgcatgcacatttaggattattatgttttactgataaattgtcccctttgtcattatgaaatgtctttctataaatctaataatattatccttcttgaagtcacttttgtttgatattatttcagtgatttcagctttcttatatttactgttcatatggtatatcttttttcattcttttagttacaacttagtttcaccattatatataatggcatcattatatataatgtgcatgcatagtaaaaagcatataattgggtcctgctttttctgtgttttagttgaagtatttagaccatttacaactaatgtaattatttttatggttgaatttaacataccattatggtagttgttttccattcatctctttttgtgttgccattattctgtcttcattttggtttacagaatattattagtattccattctatttccttcattgtctttttaatgatacctttttttttgtatttttacattaggtctaaaaatatactccttaacttataagcaagttttcttagagttaatatgcagctgctttacatttcataccttccaattcatacctgacacttcatattacacaaattcccctttatacttcacaagtgaaatactgtcatactagtgtaattccatgtgcctatccttctgtgtgctgttttagttatatcttttacttctctctgtgttataaattcaccttactattatttttgctttaaatcactaattctctctctctctctctcttttttttttttttttttttttgagactgagtctcagtctgttgcccaggctggagtgcagtggcaagctcccagctcactgcaacctccaccttccgggtttcagcaattctcgtgcctcagcctcccgagtagctgggactacaggcatgcaccagcacgcctggctaatttttgtattttttttagtagagacagggtttcaccatgttggccaggctggtctcggactcctgacctcaggtgatctgcccacctcggcctcccaaagtgctgggattgcaggcatgagccaccgcacccagcctacttctctctatattataaattcaccttactattatttttgctttaaatcactaattctcttttaaggagataatgaaaagaaagcctatcatttatatttatacaatgatttatcatttccagtgttcttcattccttcttggagatattttctgtttggtatcattttcctttggcccaatggatattattatttcatacagtacaagtcttccagtgacaaattatgtcagcttctgtttgtctaaaaatgttacactctcgttttttaaaaaagtagttttgctggatatttaaacctgttttccccatctcaacattttaaagatgtattccattttcttcttgcctccattgcttctgtttagaagccagctgtcatccttatcatgatgtccctgtatgtgatgtggcttcccccccgccccaactggcttctgtgttttccttgtttctgttttctaatagattcactctgacatgtccaagtgtagttttcttttatttctcctgtttagtattgactgaactcctatatcttactagacatttttcataaaatttaggagaattttagccgctatttccttctccttttttggcccatttttattaccttcttcttctggttctctaattgtatgtgtgttaacctatttgttgttttttctttgtttttttaaatatctgtccattttcctggagttcttttttctttgttctttagattaaattatgtctattaatacatattaaagtttactgacctttttttcttctgcctacagtttactgttaaacttgtcatgaagttttaatttgaattagtgtaattttaagttatataattttcatggttccttttaataattttctccctttttgggccaaaatttcatatctgtttactttttaaggctttttctttaagtctttgcacatatttttaatggctgctttaaagtctttctcttttaaatctaacacctggatcatctttgaatcacaagatgacattttttttctcaactatgaccacatttttcttgactactgatgacatttcttttcttgatttgattcatattttctcattttttgttttgtttttttaagacggactctcactctgtcgccaggctggagtgcagtggcatgatctcggctcaccgcaagctccacctcccaggttcaagcgatcctcctgccttagcctcctgagtagctgggactacaggcgcccaccaccacacccagctaattttttgtatttttagtagagatggtgtttcaccatgttggccaggatggtcttgatctcttgacctcatgatccacctgccttgacctcctaaagtgctgggattacaggtgtgagccactgcacctggcccatattttctctctttttttttaatatttgtaatagttttgggttttatagtggacatgatagattgggacatgatatgggggtcccatatcatgtgggtaaattatgtgttgtagacactctgtattatcttatcttcctctgaagctagtttgatatctagctgattactttgtatctgcataggtttatatctgtacttgctaaagaatatttgtgaacatccctgtttctcgagcccctctaacttgctaggtctctacctccaacttctatgattcctgcaggtcttgttaagacttatcctttggcccggaagttctagagagccctactcttggccatggtcttcacttgtaagatatggccttttaggtgtctcatttgaatgcctgaggtgttaaggaggtatccccattctggaatgggagagaactctaaatgatcttgtttccgcttccagcctagtagcagctcctgtctgacatgctttctgaagtctcaccttatgtattctcagcccaggcttagctaagaatccatgggaagccctactcagatgcccggctttcctctctatatacttcttcttctctgtagaatttccatatagttccagctgctttggcaactctaatctttgcatcatcagctcagtaggactgtcattcactacttggacttcagctcccttctgtggtcaggaaattctgcacaggtagaaagccaaggaaatcaagagtcgtacatcatgagtttcctttctgtcaagaatcacaatcttgtactgcagattgtccaatattttgttcagttttacagttcttaaggagagcagctagtttagtacagttgcttgtcatagctggaattaaaaaaatattaaagaacctcagccaaccaggatagagtacaggaagaagagagagagaggaaaaatgaggtgagaaaaatagaagtcgtaggattggagtttaggggtagtttgaaagagaagaactgaatggagtagggagagtgggaggaacttagatgcatgtaccagtccccttcgtttccaacacatcatgtaataatatttcaacaactacttactgggacctcatctgggccaggtactacagtgatagtaaataatggttaataaagtcttagtcatatcccaaggtttagtaaggtaaatatactcacataaaaacaattacaaaatatgtttggggttcaaattgctatttgcataaaattttattatgctaaataaattaattctgcttggttgggaaaggtttcagccaaccttaaatgatgggtaagagtgtatatgttaaactgtgtattggcaggggttgttgggtggcgggttaggtaaagggtaaagcatttcagacaaagtgaatggtgtaaatatcattggaacacatcaagaactgtagtttacttttgtgccagcaacagaaaagaagcttggtgagtaaatcaaaatttcagtacagattaacagactcccaccagttgttccagaataatcacattcatgtaagcaagataaagggaaactacccatcattattgccccaaaatgtcattaattcaggttcctccacctgagacctaatcacacttaacattctcccacagacaagttgcattagagatatgcaagacaattgtatttcccctccaggagtacagtgagtaagcaagaacaagtgacgacagataatttcctctaaatatttgatttactggccaaagctctctgtgtgtgggtcaatgagtctgtctgttctgtcaactcagggatactgggtcattgctttcatttgatgtcctttttttagcttagtaagtttcattactgggtctgaaatattaatagaccaatgctatactcctccccgctctctttatccctcttttctgcctttcctgttgtctcccttctgtctgtcttattcccttcctctctaccttcctttccacttgtggaaatattttggcagactacagagaagcatacttttctatacttttggagttaaacataatctttggtgttaaatgtcactgtgaattccttcaataaagtaaagccttgattgcttgctgtttaaaatagagtaaaatcaaatatctggcgaatgcccattcctttgagagctacacacagatagtagaacctataatatgttctatgcatctctatgttttcaataccaatgattcttcttttctgagcatggggattatatagcagcaactagggaaacagcataactaaacatccttattattattattattattttgactcacaatgaaacacaatagtttattgtatccaaaacctttcagtaggagacctctgtctactcctataccctagatttaggttatggctggatgcaattggaaatacattaaaaatgcatttatttgctgggcatggtggtgcatgcttgtagtcccagctgctggggaggctgagacaggagaattgcttgaactcggggggcagaggttgcagtgagccaagatcccgccactccactccagccttggcaacagagcaagaccctgtctcaaaagcaaaaacaaaaacaaaagcattcaaaccagattttctttgtaaaatatttcagatttggagggcataggagattgagtgggtggtaataaacacagaatcgactgaataggtaacgttaaaactgttaaactagaaaagtttttaaagaagatatttatttaggacttcaaaattgtccaggtactatgctaaatgttttataaatgacctaatgtcttccttataaagtaaatgaccaccatttactgagtgcatatcatgggctaagcccttgtaatgcattatctttaactcttaaaccttcagtcaaaggtagcaatcctcttcatttgcgagatgtgagaactaaggcttagagaagtacagtaactctcccaaggctgcagagcttgacagtgtttgagagggttttcattcgagatcactctgatccttgagcctgggcccttattcttcaccccgtggtggaggtacctgctttgtcatttctcataaatgcatgctttggtgaaaaccactttaaagggagcttatgaaaaggcaagattgaattatttctaggccctcctgcagtggatcctaatttttaatgtttatggtaatttgcaaggattagaaaaacgtaacactttcaagacttaaagggttgtttactcaagatatatataacaatttcctctccatagcttagatttagtgttggtaattattttgtctttaagattacaaaaactttgtttcagaatgaagtctttatttgcacattccagaatggcttattgaaaatcaagtataggcacaaattaatgaaatacatattactggatgtattataaacatatcaatattttctattttctctcttatggtctgtttctgttcacagcatgtttgcaagactacacagatgatttggggacattcacttctccaaacttccccaataattatcccaacaactgggaatgcatttatcggatcacagtgagaactggccaactgattgcagtgcacttcacaaacttctccttggaggaagccattggaaactattatacagattttctggaaatcaggtcagcacttttatttatttcattataatcttttcattatttattctcattaataatctttcctaggaagattaaggaaaaaaatatggaaattctctgcaaagctccctgctgtgcactttcttgcaagaaataaagtttgtcatttggagcctgacttaggagaaatacaggaattgcataagattctgtggttattttgaagtgattattttattggaaatacttgaaaataaactccagattttatgtgggcaaagaaacagatgtgctactactctgaaatgatgtaacttgctactgttgaatacctactttaattatgtaaaatcgatgtaaattttaggctgtttgctgttcatttaatctaattatattataaaatgatggcaggatagcaatcttaaagttttcacaaagttttcatgttcaggtaataaaagtctaggcttgtgaatttcagtacaaggcattattctttcattatcatcattttgaaagaatgtgtttaaaaagttatatttgcagtaaaagtaagttagcttatatgttactatctctccatgccactactttgagttaaattaggctaatcattctggtgggcatctatatcaaatgttttatttgggattttaaatctggaatcttatgtattataaatgttattctataatataaagtaaggtattaaaataataaatcataattggaccctatcgtgctaaaatgacataattttcttaatttacagcagttactcactggactttgatgttgaataaatcccttttttgttgtttgtttcaaaaagctacagattataaactagaattaaggccccagaagtttttaggaaaatgctatttccagaattttgctaagtatatcaaatatgatatattacatttcaaaaatttccaaatcagaaggaaaacgttgaaagattctctgtaaaatacagcagtatgtttatatagttaatagtatagtttctttatcgtgttttctctgacacatttgccagaggctttattcgaaagggtgaagattaaacatattctctcagtttgtgattggttatataaaacaccataccagctatgaatgatggttattctttgttaagtcattcaaatatgatttttaaaaatttaaaagtgaaaatcgtgttttttagagtaagtgtagtgtttgagagaaattacttcatccaataaactgctaatgtttgcaatcccaaagttcaaattatgttaaatgtttatacagtaatattgtcagtaacccaataaattttaatttctgtattctgccagagatggaggctatgaaaaatcaccattgctgggaatattctatggctcaaatctacccccaacaatcatctctcatagtaacaaactatggttaaaatttaagagtgaccaaatagacacaaggtctggattctcagcttactgggatgggtcatcaacaggtaaatagcaaagagctgtcttttactggagaagccaatctgattggtttcttgattctgggattgtcatgctctgtccctcacttgtccatgtttgcccagctgtatttaaacttcaatattgcaaataattttaaattaacagcagccatttctttttaacagacaaagggagaaagttctagtttctttttatcaataaataagaatcctggttagaataaggaaattgcattaatggaaattggggctgggtgctgtggctcactcctgtactcacaaacactttgggaggccgaggcagggggatcacctgaggtcaggagtttgaaaccagcctggccaacatagtctctactaaacatagtctctactggccaaccccgtctctactaaaaatacaaaaattagctggacgtggtggcaggtgcctataatctcagctactagggaggctgaggcaggagaatcgcttgaacctaggaggtggaaattgcagtgagtcaagatcatgccgttgcattccagcctgagtgacccagtgagactccatctcaaaaaaaaaaaaaaaaatagaaaaaaataaaaattggatttttaggctataactactctttcatgatgccattttgctgtgcaatttgatttaaaggatagtagaatggcaccagtttaatgcagacaaaaagattcaatttccccagaaggaaaggggtgtgtgtcattccacttctttctcctgtaggttgcgggggtaatctcaccacttcaagcggcacgttcatatctcccaactacccgatgccctattaccacagctctgaatgctactggtggttgaaatctagccacggcagcgcatttgaactggaattcaaagactttcacttggagcatcatccaaactgcactttagattacctggctgtatgtataatgtttccatcatattgttccctgctcccatctcacccaacgcacaatgcacttatttttattttcgagattcaggaaaggggagcatctaaaccgaacatccatataaaaattcaaacaaaataaaaacataaaagaaatttggtgaaagtgaccatcttcgaagtactcaatggctcgatacactaagtatttaaaatatattgatagactattaagatatggtgaaaatctcctgaaagggattacaggatttattataatcattatttatgtttttccacatatgcattgaaaaatcacaatttagaagacagttttggcgaagtagagaagataatatgagtcattccactaggatttttcacagtacagcaattcaccattgttcatttgttaaaaatctaaataaaaatgtattgaagtgtcatgaatcataaactatggaatcaaaaaacaaggaggacagttgacatcagctgtggcattacaatatgtattgggctttcattttcaatattcagccttcagtgtaagctcacacgcttattactgctgcacatgtccacagcttaattgcctgagtttatggcctgagtttataaatacctaaatataatttataaggttattttatttcatggctattcttttgtgatgtcatatatataacaaaaaatatatatttattatatataaagatatatttattttatatatatttatgtttacatataaatatttaatacatatataaatatatgtatttaatgcaaatataaacatatgtgttgaatacatatataaaaatatatgtattaaataaatttattttataaatatattatatataatgaatatttataatattttatatataattacatatatttatttataatatatatacataataaatatatatattttttcttcctcacttcttctggattatagtcctttacataatgtttatagtctcaaccatctaacattcaaaatattttcttaaaggtatatgatggcccaagtagcaactctcatctgctaactcagctttgtggggatgagaaaccccctcttattcgttctagtggagacagcatgtttataaaactgaggacagatgaaggtcagcaaggacgtggcttcaaggctgaataccggcagagtaagtgtgaataccggcagagtaagtgtgtatactggcagagtaagtgtgaataccagcagagtaagtgtgaatactggcagagtaagtatgtatactcgctgttcagtgcctagagtgggccttcaaattcttgaaacaaactgaaataagtgtaacgcattggtgtgagcaattgaacttcatcttagtttcttctgtgaatcgtttaactccatttgagggagaaatacgtattaaatttaatctcatataactaaaacatctggcaaactatagaaacttagaagagtatttaatatgctgagagagttgcaattcagtgaaagatcagtgtaccagactaatgactaatagcttttcatttgcctcacacattgcaatcttgcagtgtacattatattattccaatgtacatagtattctatcacactagtctctaccttaaaaagtaccttaattttattagggaaagctgtggtccatgtgagtcatgcatggaataagcatgttctttacagtagaaaaatctggccattgtacagatgccattttaaatctacttttcccagatagcaacatgatggaattaaaggaacactgagcaaaatgtcaaggggcctggggtttgttctggctcctaacccttgagaaagtcacttttctttgtggtcccatggtttcttcttttagaaaaggagattaaattagatggtctctaaacctgccttctagctctagaattaaatgctttttgaagttagttccaaaatggacattcaagaaaacaatattttcttgaatttgttatttgatagagacttttactttatcaaagtaaagtctaggttttggaaacataattctactgaatcaaaatttatccataattttacacaattatcttttcccacagaatcaaaatttatccataattttatgtaattatctgaaagtggaattaaaagtcacaaaattattaactgtatacacaatatcccttgaattaactgaaagagtaataacatttaaccttgattatgtatgaattttaagattcacattgatttatatctggggattaggctgaatcctagatagttttgaatattaagttttaatatatagctttgttcttcagaaatgtatcactagtacataaaaaggtctcctaagttctatcagagatacatctgttttactatgtaatcatttatctaattttattactgctgtgctaatctatttctggttataatcagattgtttaagggtttcttttttttcttttcatttctgagatatttttctgtcataatttcagaatcctgaaagtgtaaatgagtgcacataagaggcaaaatcagagcaaactagtgagattatctgtaaaatttgccatgggaaattggagatttacaaatagtataaggtctgagtgctgagagtggcccatgtggtttactggaatgtattttcctgggccctgtgttgcccctagtcatcgaggcacgtgatgcctatctgcctaataggtgtaccttctcacagtcttctaaaacaataagattattctttaaaaatcctttatggacaaaactgtgacctaaagattttcaaacagaatgggtttaagtattctccctgctccaacaaagcaatattttgaagcgccacaaatgtacacttttttaaaccaaagttataaatggtgttctacccaccttcagaaagcatatcgtagtaggaatacatctatgaatcacactttcagagacagctcattccatataatgtttatttcccgttctcttttattgcacatcatagagataatatattccttgtttaagtcattaggattggctgaactgggcacccaggattagacatacttagaggtatctggtttggttttgttgaaaactcagctcaagaaaatgccaccattggattgaagactttttttctgtaatttcacattttcctttcttctttaaatcctttctactctgtctattcgcttggtacttcctgatgactaactagagggagaacggagcctttactgtgaatttcatgcagacttttgaatgttcaacaaagccatgttgttactggtttttagcattcccataggattttgggtttttaaactgttgaatttaaaagtcagaatttctgtcccttccacgtgttaacattaaaaaaacagcagcacagaacgtcgaatgcgcttctctaacaaacaaatcagactgatccctgaatataaccaagttattctgctctccacaaattcaagggaatttgatgcctattttaacatgactatttaattttcatgactctttagtttgaattcacttcagtattatttcacatttcttctaaatggaaatcctttcactatgaaaatactgcaccaaatatatatgtgtgtgtgtctctgtgtgtgtatatatacacacacatatatacacatcatatatgtgtgtgtgtacatacacagatgatttttatttattttttttaaaggaaaatctcatcttggagcacttatgaagtatataatagtggttcttaacagtcatttctttttccagcatgtgagaatgtggtaatagtcaatcaaacctatggcatcttagagagtatagggtatccgaatccttattctgaaaatcagcattgcaactggaccatccgggcaacaacaggcaacactgtgaactacacatttttagcatttgacttggaacatcacataaactgctccacagattatttagaggtatgtattataaagcttgattgatcactgctttttcagatcaagggagatgtgtcaagttagaatccatcatgctttttagaataaaatccctaactctgccccacgcatctataacacaccaaccacccatggtatttgaacaggtatatttcatatttaatgtattaaattgtgaatacagagaactatctatgtttttaggtttcagtgtaacttctggactcattgacctcatattacttaacttacatggaaggagagtaataacctctattttttgttggttgtttttatgtttgttctctgtgtataagagatcagaaaatgtttgggtatcttggatttatttaagatgtcatttttctagtatgaggtatcatggttttaattgttgtttttatttttaaatgtaagttcatttcagtatatttttatttttgtaaaattgaagtttcaattgttataatcatgaccactagtaacatttattcaactgtctgtatgcaatttcaggcaataaatcttgcttaaatattaggcaaccttgaatataaggtaatatgttatttttgcaataagaaattttaacttaaaaagctttttgataacttgcatatgtaacttttagggctacaaattgggaggttattttggcatctacgtttcatcatcagtaaaataactttttgagtcatctaaggcattatctttatttctgtctatattgttaatatataatacttcaaaaaatccacatataatgttttcactagataccctttctgaagtgataagtacttgctctgataacaggacattttttttcccacctgccctcctacctgcagcctagtgacttaaggtagttgtttttaaggtggtcagtgatttttagaagtcttacttacaaagacttcaacatccattgctggcaactctggggtcatattcccaggaaaaaatatgttattcttgtaaaatgttcttaattgtgtttttacaagttgtataggaaaactagcattggttgaggttggttgaggttaacatatattttccaaatagcacttttgtttatgaaaacaaagagtgacaacaaagcattctgcactttgagagactctgtgaggtcctaactataaggagattcccttgtttttcagagataattttttgggaaaaaattttgccttatatttacaaaagtacaatattacagaaatattagccatagtgtttacccattagaaagttttgtttaccagtattctaagaaaatatgacacaacatgaaacaaacttacaagcacgtacttggcaatggttttaaagtccaccttccttgacctggagttcaactggtcttcacaagcttaatgataccaggatggtatcattaagatactactagaataggcatccatttcttcacatggtgagaccttgtttgtgttttagaaaaagcagaaaagttgctttcaaagccctttgtttataccgtgaacacagcagttggtcatacctccttttaccagttaggactattctgattcccactggactgtgggcttctcgaaggtctgtgctgtctcctactaactttgtaacccaggcacttattatacaggtgggacattacaggagttcagtaagttcaagttgaattgaatatcacagccatattttagtatcagtctaatgataactactaatgaatgagaaagattgaattccaaactggcgtttttgtacgacctcctacacacgcagtgcaatcctacaaattggagcacaaaccaaaataggactcatgatcttgccgagcgttgcacgtataacagtgtgctgggcaccataatcgtgatttggtaaagcgtaatggagaaagctacagaaaggaggatgcttttgaattgggctttaaaggaggctttggcagaaagagggggggaggaaagagatgaaacatttccaggacctgaactccatttctttcgactcatttgaggatgaaatggcaacaaaaaggtgtttaaaaactcaaattaaaaaatgcttgttccagcaactgcagagtagctcattagacccccttatggatgacgtgtctgtcatgttatggtcatgccatttctcttgtgcaacattgacggtgaaagagcaaaaatacaaaatgagaaccagaagttcagaaaggccttccaaaaaaacggcgctgttgccagagggaggagattgttttccatctctgtgagccaagaggccagaccagagcaatagctgcaatagctggtctatgatggaaattttaacacacaaacaaccatttacagagagaaaactcacacacacagaaatctagcttccattattttaatcgcttctgggttttttcaactgacttccccaaatcccaactggatgcctgttactagagccagaatttagttattctgaattaataaaatggaaactacaaaaagacttaattacgtgctggtcagacactatcccgccttgatgagaggaatgggtttgaaaagatcccattggaaaccaaatgcatcctttattatttcaccctctgggcaaaacaaaatatttcagatctggaaataaaatatacagtgggagaagggaccatttgcttaaaggagtgagaccatttgcccgtgcaaacatggggaatcaacctgaagagttctggctgtattttacaacttgatttcagtcttccatttttattttgagtctgagtctccatgcagaaaaggagatttcaaacgagtgattgaatatagaaatggaaatgatagatttgggagaaatcaacatggagatgtataggaagcccagggtatttgttaagtcaacagggagcatgtgtgtagtgagaagaggaagtaggaacactaagaggtgattgtggctgggcacggtggctcaggcctataatctcagctactcaggaggctgaggcaggagaatcactagaacccgggaggcggagtttgcagtgagctgggatcgcaccattgcattccagcctgggtgacgaagtgagaccctgtctaaaaaaaaaaaaaaaggtgactgtgtcatgggagccaagggaagagcagtcgagagaggttgtggttcagaagggtcccttggagatcaatgtgactctggtcagagcagtgtttgtggggcgagagcaggaaccagacagtgtaaagaggtacaaagaggagagtgagtgtagactgaagtctaggtccctgaattctgaggctctctgtaacaaaccagagtaagtgatggcttcttttctccaatccttatccttcatttccctaactggtcctcatctagttcacgtgtgtgggacacactcctttgcatgttctcttgtatgtcagtgcctctttaaatgtggccccagaattggatgcaacagttcaactaaacctggctaggcccaagtaggttggaaccgtattatccagttcatatatttctggtggtctatgctgaagttaaatggggtttattgtagctaagtcatgatattggcctatatcaagatttataatctccatatcacttttacatgaattattatgaatttatgattatatgatttttaagaatctaaacagagatatttttcctaataaatcagatttgattttgtctgagaatcccaacacatcatgacctccctaaatcttcattcattgcttttcagagcattattcatttgcatacagactcattggccactgacctagtacttcttcaaaaataattgataaaaatgtcaaacaagattgcatctatttcaaatactcttaaatgataagttcttttggttaaaattgatctattattaagtgcttttggaatagcactattcaaactactaggtaataaaagctaatatttattcagcatgtattatttgccaggtaattctcacagcaaccctgtattataagaaatattatccccattcgttaggtgagaaaagtgaggcagatataggttgttcatattcagaaagattataagtgtcaaggccggctttctagcaggcactgtaactccacaccgatgctctcagccataacaccacataccccgggagcactctcacagtgtcctgtcaccctcacagggatcatggggaagtgttcctgctgcccccaagtctaccattctattgacactgccgcaaagagaaatcaatgttttgcatgactccatagataagcaggtgccatttattataatcacctctttctttgcttcatgttgacaaattatttttagtgtctaatttagaatttttccaaaaattactgttaatcttactgatctacgagattctagaatgaatctttccccatcttggaagctggaacgttttcccttcagccccctggcagccctgctggttctccttgtctgggctcgcactcttggtggtggcaccgaaacacaatctgagccacatgaagaggacaggcgcatgtgacaggctggttactttgagaaggctcacacctccccacacacaggagaggctgagaagcctggagaaggtgggaagccaagagagtgaggcagattctccactcccacttcctaaggctctgctcctgctccctgactgttcccatccattcccatccctctccccaaaggcttcctctgagtttcagcaacctcggaattttagcttcaacaacatgaccaccccagccttgaccctacaggatcatttacctcaagtgcttgcatacaaccagactttcccttggtgacaaatccccagcacagggagctcatgtgtttgagctcgacagcaaatgcatgggtctagcctgcctatggacgatactcattagggcagtgtagccaagccctctagccggtgatgttcacagattatgttctgggcagaagcagaacttgtgagcaggggcatagattccgctggaatgctaaaactttttttttttaatttaactttcaagttcagggtatgtgcactaccctgatagtagtacacataccctgaacttatttattatgtaggtaaacttgtgtcatgggtgtttgttgcacagatcatttcatcacctaggtattaagcctagttctcattatttttttggatcctctccctcctcccaccctccaccctcaggtaggccccagtgcctgctgtttccctgtcctgtgtccatgtgttctcagcacttagctcccacatataagtgagaacatgcagtacttggttttctgtttcctgcattagtttgctgaggaaaatggcctccagctccattcacattcttgcaaaggacctgatcttgctcttttttatggctgcgttgaaaacattaaccatgaactatgcacccatgaattcaccaagattacaaaatcagctctgtaatcactatacctttcagtgctgtggcatataattcccttaagcctggaaaagttcattgaaaagagttgactcttttatcttctaaactggaattccatgtctcttcttccagtttcaaaatcaaactaggcatgtttctacctcctcttcattgacatcacactctcttctgaaagcatccatgccatccttgtttccctctttcatttgccctagtcacagccttaaaattagacattttttctaatgttcaacaatatttttctgtgccatttcccaaagtttagctagttcgtatgtgtacccataaaatggtcagaaagttccatggagcctcttggatttctgcttagattgatttctttagagggttctccttttttgcaccccccaaaattattcctgattttgtagtgagaatttagtttttcagaatttgccaattttctagaatgttctttcctttttcaattgcgttttcatttgtttttttttttttttatccataggtttatatcttgttttgaagtttgaatccccaaaaccttagtccggttaagtggtcagccatcacaggctctaagttaaggcaaggtgatcactgtctcctattgtcttggtgacttccatattaacaaccacttctttgctagccagaattagtccagagttgcacttctcttcactgtctcctttatatgaagagagcatataaagaattcaacaaatgctacattttttgggggaacaagacatctcatgggtgtccagattgttgaaacagtctccccgtcgccactcctgtagatctcttttggtacattagtgtttatagatttcctttacaaaagattgcagtctctactgaaaagaagctgaggtgggaggataaagtccttataactggctaccaaatctggctgcattccagaatcatctggggatcttgttagaaaaatttattcctagtcctcatcccagacttaaccaaatccttgaggattccccaagagcaagctttgcacaagcccctggtccagcacttgagaccactgttcatagcccacttccaccaagatagcctgttttatcctcacttcaatgctctctcctggggagggaaaagtatcttaataggcatcttgttaacatacatttgcctgctattaaatgttactttccagtgaggacttactcttccattgctatggctgagttatgtattttatctcaccaaggcctggtcatacagttgatattatgtttacctcattatattaaaaatgtcagattcactttacagtttttgtattctgattctaaactttctcccccttttccttatcgggcaccttgaccactatcatcttccattaaatcatttccttattccttccccttttccactaaagtccatttcaagtcctcgtgatagtgtgggggacttcagtcaaaggcatttccctccagtctttataacatgcatttcatctcttgccaaatccttgctgatgtcatcctgttcaccccagatgcttatatcacagtttgttgcactcccgtatcctcctttcagttgcaaaataatgcattccaagaggaagaatggataaaaaacatcaccagtatccctgaatcttgcagtgtcacatccatattctccatgtctacagcctaaacaacattttccatataccacgactgagaaacatcgggctcatgggatattgtcaatacttaaagtgatgctagctgttatggagaactcatacattctcagttgcttactgcaacacaggttatttctaatcacatcagagtaaaaggcaggtgttcctggcttccatgtggtagttcatgaaaccaaaggaaggggaagtcaatttgcagaagccacataactgtctctgccacaaatgttggtagatgtttcacaaatagagacctatattctaataaatctgcgatatgccaaattaaaacacaattaagcagggtttgttgttttgttttgcgtttgctgtggtatttcctcaggctgtcactatcctaaatatgcattcttcattcctttatccatgtatccagtcagtaggatatattttagacacttaggctatggacatgtgactgttttagcatcagttttccttgtcatgatggaggaaacacaccttaatcaatttatcacacaataaaaatttaaccacaggcagcgttaagtgctgggagggacaattatagtgcacccagaaggcatgagatgggaactgagctcctttgtgggtcaggaaaggcctccctgaggatgaataacacaccaggtgccaggaggcttgagatgtgagggactggaaggagagcagtgtgaggctctcaggtggacagggacctggcctgcagagcagggtgggcacattaagagtttcagagacctcctggagagcagcaggaggtctttcaaggatgtggtcagatctgcacttttaaaacaatcactctggctaccagaataaactggagggaggtaagagtaacggtggagacccagtaaggggattgctataggccaagggagagagaactccaggtcttcaccattgctggggaggaagcatgagatcgaatgatttcagagcacttaggaggtacaattgacagagatggataacaacaggatgaaggaaagggagacatcagaatatagcctgatagatagaactggacgcagggaaaaccaccaggggagattagtcccaaagagattatccttgcccagaagtctgattaatgaacatctattggacatttgtattccatagaacattctgaggaaaacattattctagagatattttccaagtttatttcattttcccctcatacaaacaagcaaactttgaagttcatgaggcattagagagttattcgcatctcagatgttattttgagaattacagtaatatttgtcattaatggaatgcccatcatgtgctagacactactaccaatactttgatagatataattgtctgtcctcatagtagtccagtaactgagtataagtatgctcacaggagaacagggattgagatggggaaccatactcagtgcaggaagtgtcatcactacatgaagtgatgaaactacgttcacactcagtgctgcacgaatacagtgtgggctctggagtccacctggctccaaagctctttaccagctgtgatcttgggcaaggaatttaacgtctggctgctttggttctctcgtgtgtaaaatgaagataataatccacacacctggaaaatattgagtcctcaggaaatgcttattactcccctccacgccccttctggagagagcccagctcctgcctggtcattcagcttcttcctgggacacttcaggaaatggtttctcacccttacaccagctgacctccatctcttgcaaatgccatctccattccttgtgccctgccagttaggagcagtggctcctccctggcgaggtctatcttcctctccaggcagagttcacattttgttttctttctcttccgagttccctaactcgatccatggacttctccataagggctttgctttctctctgtgctctccgaatctgtttaaaggcaaatttcttctgtccttggaaagaccttgcatccgctctagtaagtgaagcgtaaatcagtgtttgtgtttgcagtgcacgtcactgctggtcacatgatggcataacagattccaaacaggtgccaaggatgattcttcaatttccaaattgcttggtttaaaggtaaacgccagtctttagctccctattgaaaacagctccaggcactgtgctttctattgttctagaggggagtcactggaattagaactgcctcagccagcactcttctatctggtgactaccatgggatgctaatgacaaagatgtagtaagtcctctagcactcgttcgcaagagaatgtcttctaggcacccagacatatgatagaatgtgctaaattggtagtctctgtacctgcttcagagtgaagcaggtaacttcagaatgaagtttaaacccaaactccactacttagtagctaggtgaccttgggcaagttccttagtgtctatgtgcctcactttccctttctgtaaaacggagtaataagagtcaatgaatccatatatgtaaagagccaaaacaaggtctggcaaatagagaacaaatctataaatgttcactgttattatttgcactgatgctgatgtaagagaaacatctcagtaaggtatagagaaattcacaaatagagagccttcaattctttaggttgagatataattaatgattcatttctcaagacatttaattttcctcttgttttctgcctgcagcctgcatggttaatgcattttgacacttctcactaaggataaatgacaaatgataaaaccaacaatttttgtccacttattttactcaaagctccgttaagaaaaataatgaaaaaaattttaatttcagtgactaacaggagtgttcgtattgtccctatcattttaaaaattgttttggttactctctattattacagagaataaagactttctgtatcctggagtttaacaactcttattttattttattttatttttgagacagagtcttactctgtcgcccgggctggagtgcagtggcgtaatcttggctcactgcaacctgtgcctcccgggttccaatgattctcctgcctcagcctcccgagtagctggggccacaggcacccaccaccacacctggctaatttttgtatttttagtagaaatggggtttcaccatgttggtcaggctggtctcgaactgccgacctcaggtgatccacacacctcggcttcccaaagtgcagggattacaggcatgagccaccacgcccgaccaacaatgcttattcttaagaaaagaactgccacagaaggaaataggaaaaattcttcttcagtagttgatgcctttcaaaatattaaattactaaacctctacctacctcagtttccagaactctaaaatgaagataacaatactacctgcattacagagctgctaggatttttaaattagaataatgaccagcatggaataagtgctaatacatattatctatggttattttaacataaacatagtctcatggattatttttttgtgctctgaagcaggagaccccaatctttttggcaccagggactgtttttgtggaagacagtttttccacggaccgggggtggggtgggagggtggtttcaggatgattcaagtgcattgtatttattgtgcattttatttccattagtcttacattgtaatatatagtgaaataattatacaagtcaccatcatgtagaatcagtgggagccctgagcttggtttcctgcattagacagtaccactggggggtgatgggaaacaatgacagattatcaggcattcgattctcataaggagcacgcaacctagatccctcgcgtgtgcagttcacaatagggttcatgctcctatgagagtttgatgccaccagtactggtctggggactggggctcttgctctgtagcattttgtggtaaataaatctgtggtttccagagcagccttcccagttgtaattaacatcaattggccccactgtgttgaaagcagtgctgcttctcctgcctcccagttttcctacaaaagccactgggattgtagataaaatcctgttttccagttggcgagatgcagagaagcagatgagattttgtctgagcagcggtggatctgagccgactttgattatggctccaccgccaacgcttcctgggcagatgagtcatgcttcctggaactgtctgtcagaggaagtttgcttctgggacttttgcattttgcttagagcttagagataagctattacaattctaagttcagctgctattcaaaaacatgcataaaagctgggaagagtttaccaaacatttcaatttataacttgataccagatatgagtctagcaccgtactaagcatgatacctggattcaaaaaaagtttagaatgaagtatatccattagttagcgaagccagatgctttgtagtgtcgttgagtttagcatgaggcattttagaagaaattttggttttaagattgcctgagtaaaatgtgattttttagttataaaaaattgaaagaagaaatgttatttcagtgtgatcagaatccctttccttaaaaagaaatgctgatcttttctgaccatctttcacaatgaaggattttcgtatgattgcattaatttgcagcagttaatgaaccaacgttccaaccttcaaaagagcctctgctctcagattcaaaagaaactctgcgtgtttcctctcttcaaacatgaaggacagaattaggatgaataataatcaaacctaaaataatttctgaactaccctgaagcagtaaaaattccattagatgctcagaacttgaattgtcctatgcacactgcctttcctggttgacctcaggttgctctgctcctcagactggcgaaaggcagggcaaccgaaaggtctcttccactatcagacaggctcatggtatgaataagcatgcattgagcaaaatgctaaattttaaacactggtaatcacagttgtgggtttcagttaactatattgactttctactttttaaaatgggaaagatttccaattgcaacattacagaattttgtttaaacacgtctttaccctgcagttcctacattggctctttatttatttatttattattttttctttctttctttctttttttttttgagacagagtctcactctgttgcccaggcttgagtgcagtgttgcattctcagttcactgcaacctccgcctcccagattcaagtcattctcctccctcagcctcctgagtagctgggattacatgcgcccaccaccacgcctggcgaatttttgtatttttagtagagacagggtttcgccttgatggccagtgtggtctcgggctcctggcctcacgtgatccacccacttcggcctcccaaagtgctgggattacaggcgtgaaccatcgcacccggcaggctctttatttaatagactttcttttcctgatctcactgtcttcagggagagcccggatggcagtcctctggcttcttccagctcaaaggtctatgatttcacgttgttctatgaaccaggttcttctctgttcctgagaccatctgcagcaggtggtgagaattttaagaggcataataataataataataataataataataataataaatgtttagtgttttactgtagcaggataattggcagagggaaggctgaggtttatggaattaaattttcatgtatacacaggagagtatgcttagctttcaaagcatttcacttaccactagggagggatttaggagcccttgctccatcagtgactatcgaaacatatgtttacatgaaaccgtcagtccctgaacatctgaagacattattatttttaaaatttttaatttttgtgggtaattaataggtgtatatattatggggtacatggtgtgttttgatacaggcgtgcaatgtgtgatagtcacatcatgggaataaagaaataattttttgtaaataattagcctaattaataataaaaatctagttatgataaaaggaagcattataggcaaaatatgattttaaattaatgctggagcagattaccttacatggtaacatttcagtggattaatttttacatataaccttgagatacttaagaaaagattatggagatagacaatttaatatttttagtaggccaggtgtttatttgacagtctaaaagggtatgaaattctgagattggagaagcattactaatgcatatctctactgccatgtcaataggtccccaaagatattgctttaaaaataaatttatcagatcacaaaggaatttatagtcattataggaaattgggaaaatgtagaaaaagctagattaaaaaatcctaaattatatcattattactaatatttggtggtattgatttcctgtcatcgctccttgtatatttattttattttaatattcgaaggagattattcagtacatactaacccataatgacttttttcacctaacaatagcttgtgactatttccccatgttatttattatgtcattttcaacattgctcatcccatcatcacaatacagccaccaattcctgttgtgaaacacttagaatcttttcaaatcttcaccattagaaacagttctgagataagtatctttgtagttaaatgttttcccacacccatgattggacaatgatttaaaaaataaaaagactcaaattgtggcttctaataggagtaatatatagaaagcagaataaaaatgtaaattctagtaagagcagacagcaactagccaccacatagaaaggaaacgctggtttttatatgagacagacctgtaactcagggtgacaccaagtaactcaaaatgtggtatttcgatgggttttttgctctcatgcaaagcccaacattatgagtaattgttacttttagatgatatttcatatttcctgccccaccctgtcagcacatggcaaggcggctttttctgtgcctatgtcagggagcatgctatgagtggccatgtgccttatggaggggacttagcctcccaagggccatcttggagtcggctgggatcaaccatgctctgcttatcagccttcctctacatttgcctcatttatccaccatgatttgattttgcatttgcccccttgggctttgcttatccacaatggaagcgctgtatctcctctgtgattcttattatttatttatttatttttttttttgagagaatcttgctctgtttcccaggctggagtgcagtggtgcgatctcggctcactgcaagctccacctcctggggttcaagtgattctcctgcctcagtcttccaagtagctgggactacaggcgtacgccaccacacccggctaattttttatatttttagtagagacagggttttgccatgttgcccaggctggtcttgaactcctggcctcaagtgatcacccgcttcggcttccctaagggctgggattacaggcgtgagccaccacaaccagcctctgtgattcttgctttgcaatttctactgttgttacaggaacatttcaaagcccttcaaatttaaagtaacctgaacttggataaagttccaagtttttccaggagatgtgagtgcaaacctcagcaacaacatttttaacaatcaccctaatgaggcctctccacagatcctgctgtggtggttgtttggggtggggaacatctgagcagatgccctgagaattccctaggtcccatccttctggatctccagtgattcagcagcaggaactacagggctgggtaggacccaaaggggaagggaggctgcaacaggaagagatgctgctcacttttagcatgagagccactttgcttgccagtggactctatccacctcaccgtggcagccttaacagcctctggtttcctaactctctttgctgctgtcccctgcatgatctgtcctcccgcaatcccttccacacacacagcatgcttatctccaccccacacaggatgattcgccttggtttctgcatggctgtccgggatgcctcagtctccacaatgcccaagttgtcatagcaacacactgcgaggattggcctccacctcctcactgaattcatcacttccccatctgccctaccagtgacgatttctgtgaactcttttatgtgagtcagctcctgttctctaatccccaacatctttcttttctcatagctattttgggtggtttctctggaaaaaaatgttgattccctttgcctctgacaaagagttagagtaacaatttgagcacattccacatgccaggcctcatagcaaaccttttacgtggtttatctcatttgctgttggcaacaatattatgagataagtaccattatggtgccagatttatagataaagacattttagcttgaagaagttcaataattttcacaaaattgtgttctctaaattttagagctgggctatgaacacagagcctggctctggccacattgacattagtcaagtacattctacaataaaattgctttcctgcttgtgattgaaatataatcttctattagtgacactcacttcaaaatgccactctataaactgattgagtatagttctcaaaaattgaacgatcatcttttcattgagtagaatttttattctatagaaagaataggggattctctactacacccaaaatttctcctcacagcagatgaattatttcaattacatattaagctctaaagaatagaggttttatggaatttgcaaagatttataattggaaatggaccaaattattctccagaagtttctccatgttttaatgatatcatcctaaagaaactcttgagttgctttttctacatgaactatatttaattaattcttaaaattgatctcctataaaaaagaattttcttccagaagaccttccaggaaataaaagaaacaacatttacaaacagtatgaattagatgtcaatctaaaacagaaagggctgagttttaattgtcactcactgtgattctaaaatgagtttggggctgggcatggtggctcgcacttgtaatctcagctctttgggaagccgaggtgggcagattgcttgagcccaggagttcgagaccagcctgggcaacatggcgaaactctgtctctacaaaaaatacaaaaaaagtagctgggcatggtactgcatgcctgtagtttcagccatcaggaggcttaggcaggaggattgcttgagcctgggagggtgaggctacagttaaccttattgcaccactgcactccagcctgtgcaacagagcaagatcctgtctcaaacaaacaaaaaaatagttaagaaaaaaagttaatctctacatcccaagctcatatatataagataattacttgtaattttaatttattacagttttaaatttttagccatgaaacaatttagcaagcaaggcacttgaaagacatatttttgttcttggagatcctgcagttcataaagttgatttctactgaggggacaggtggggtgtctgggtctctgctcacttagaacttgactttcagtgactcctaagtaccctcaatcttacaaaaaaattggatctctatcagtgattgaccacacgtggtgtctttagtgttatatcctcccctttgttatgggtccttcctatttagaagtccacggatcacttcctattgcaactggagtctgaattcactaatggtattgtaaagtatgtgccaaattatcaaacccgcacaaaggaagtagaaactggtaagtatggctaaggcaagagatttccttcctctctgagtgtgtcaagaggagttgagatatttgggggtagggtgggggtggggggacctaagccacgaaaatcctaaatgaataatctctttaagagaataacaaaagatttcacagaggaaggttttgtaatatacacatctccgcatctgaagatatatttaatggccaatttgaaaatgtaagcattattttagtaatttagaaaaatacccctaaacacagttatagaaattagatctgcatattcaaggtgagaatcgcaatctttcttagtttttactagtttcctttctgtaactcaattagaacttcaagtattgttcactctgagtagatcttcaggctctctaaaagcagggccactccagcttgcttgtcagtagttgcaatgagtcacagctggaacgtcctgtggttaacattctgctctgaaaacagaatcagaatcagtgagacggctttccatggtaacctgtatttgtatactttgaaaaatgactgttcctttttgtgtggttttgggtggtcaatttgcgcgggaatgaattgtagaggtgacgttacccatctgtgtgaatataaacaaaaaacctgattttattaacggcaaactttaaaaaacgaggtatgagtttttttttttttccttttcgagacattgttctacacatttattactagattggacattatatttaagcattttcataaatgtctatttgatgcttattttaatgcataattttctccccccaaaggcaaaaagaaactaattgtcattcatcagtgttgccccccaaacctactgcctagcccctccacccccacccagtacttttacaatgtgttattaaagaccactgaacagctgagatccaggggtctccttcaatgcgtaatcccatccagaaggaaggaaaaaaaagaaatctctttaagtcacgtgaaaatgccacatttcttaatcttgcagagctgacaggcaaaaatgctatgctgttcatgaccttgtgcaggattgaaatataattccgcaacatgctgcgacctagtattccgtaagacacatcgagcttagggtgattatagttatggagaaatcttacctatgttttgttggataagggttatgatgacttagcctgggctcagaggcctgacagaaatgaaataatttatgctttggtcactaaattacaatccaaaggttaagatttggggagtgaaagatggtagagcatttgcttgctaattactccactacttgggagcagtatgtttgtttctgtgctaattagtttagaactgtacttcatgccctagaattaagaaaaactctaaagctgagatgaatctcctgcagggaagcagggatttagaagcacaggctgcaaggttggcctctcgccctccggtttctccgcctgcaggagagggtgggactgaacgctaaggtgaaaagcttctgttccgtttcgtttccctcttcattttctgttgctttattcttctcttattctcccctattcattataggggaggcttctgataaatgtgtagaatattagaaacttgataataaatatacacattcaaagcagcagtacgaaaaacagaaaaaaaggaagctacagcagtaagcctgaaaaataaaactcatctttattcatttgcttaaaatgcttaggtttagtgctttggggtgaatgacataataggcttctgagcttgtctttttaaaaatatctgctgaccttccctgaaatctcacaagcacttatgatgagcagccgatttgagaactcagcgagacaggccaaggtttaaaaatctgcgatttatcataaccttaaacaaggccctcacctggttctcccttctacggagtggcacaaagggtccaaatcctttatggtctaagaggagcctgttgaaattgaggattgtatggcactactacctatctaactgtacagagtgcaaataatcgtgcagattgggtcctaagtaaaataaatacagctggcgggggaaatcactgcgttcattcattggagatgcatggggaacctgcctttatcaaagccctgctctgggcagtgaggggaaggccagaggtggtctgtgctttaaggcgactcacaatcagtaggggaggtaagacacacaagcccataacaagaatgcctggggatgtgatcatttccacaaaagaagcacagatgaaaagcaagggctttcaaaggcagactaatttatgcctgactgcagggattaggggcggctccatggaggtgctttgtaacatttggtggtaaagttctccacactcaaatcaatatgtttcaaacaatatttcatgtcataacattttttttcaatgaaaataatttgatcagtctggaattcattgaatccagattatacatttatgcacggacacgtgcaaacacacagacactcacacatactcttaagtagatgtactctccaagggcatcctcgaggaaatccatgagtccattaccaggtattttatgtttcgttgtcatgggcagcttatcccaagggtaactggaacaaagtgtttaaagggaacatgaaggcgattaggtgaaaatgtaatggccttagtcctgaggaagccagtcttgttggattgccattatctttctcaagtgaagagatatagtagagagatttttgtgttttttaatttttatttttcagtttggagatatacagctgataaaatcattaaatgaggtaggttaaggggacacaaccttgcaccctccatttctccttgaagatgtataaatacctcaatggaaaaatggacgaagacatcagtaaacaatttacaagagaagaaatctaaatgcccctaaacatgaaaaaaaaaatccttcaatgtcaaagtaattaaaataacacaagttaagacaattacaaaaaggcagtttttcactgtcagtactagtttaaaacatgatcgtcatcataattgacaaagctccactgaaagaaacacctctgttaactgcttgtgggaggataggttggtataaactttctggtaagaaatttaataatattttataaagagccatatgattatactgtttgttattccctttctaggaatcttttaaaagaaacatttgaagtatcaaacagctatttatatcagcaaaagattggaaatatcttaaatgaaacaacaatagaattataatataaatacattatatttgtggcattttacaccaaggtttacacaattaagtgatatgttcaatgaaaaacaagaaacacaattaaatacatagctcaaatgtataaacacatatatacacctgcacaaataggtatattacacatatatacaaatgaaaaaagtatcaagagaaatttttggatttaatgaaatattaacagtgtttgtctttagtcgaatcaatatttgtattttcctttttcatatatttctaaaatgtctgattattttacaggtagcatttattttaaaaattacctcttgaagggatggctaccccattttctatgatgtgattattatacattgcatgcctgtgtcaaagtatctcatgtaccctataaatatatacacctactatgtacccataaacatttaaaaatatttttaaattatatcttacaattataatagctgctattcattgagcccccctatgtgttgttaatatgtgaatgcctactatttccgtattctgagcctgaattatactttggacttgctaggttgacataaaaccaaaagttactagttgggtttccaaatttattgggcttaggaatcagatccatctctaataccctctctatgcaattatcaatttttaattcttatgttgagttctgtgtactcaacccacctcagcagatttacctctaacttttgaaccaaggaacagcttttgctacttgtgtagacttggatttttccatcccacaaaccatgtgtttttatatgggaaagtttctcttcaatttcagctctatgatggaccacggcagatgggacgctactgtggagtagacctgccccctccagggagtactacaagctccaagcttcaagtgctgctccttacagatggggttggccgccgtgagaaaggatttcagatgcagtggtttgtttacggtaagccaggtgctgatctcagttgtatttgcagttgctatttggccaagaattttttctttttcagttccaaacttagaaacaataccatgaacaaataatggaacccaggtagtaatctcatgcaagggtttaagaaatatacttagatattggtggaacttggagagttaagtctgttaggattaagagaggaagtgacatcaaagtggaaagaatttggttaattgtaggtgtagtaataaattgccttagataaagaaagaagcagaatgaagtttctagggatgaagagttgaacctgggtatagcaagctaactgcaagttggggtgggagtatctcaggtgcaatggaatagaatgagacttaaggctcaccttgacgttaagcagagaaagggtagggatagactagaaagaatgaaagtcagacagggatggggaaaaggaaggggtagggttggcctgagaggaggagaatttgagctgcgatgcacaaagccaggggcatgtgttgtacttgtcaaacaggaaggggcacatctggatcccacctacgaattggtggttcaggaagcaggtagggatcatcattcctctgaagatgaaaggtcttctttaacaagagatctgaaatgtcttcaaatctcaggtgggccaatctgcaagtggagagccccagagcagtggttcccaaaatgtggtccctagagagcagcgtcagcattacctggaacctgttagaaattcaaattcttgggccccatcccaggcctacagaatcacaaactttgaagtggagcccagtaatctgtgtcttaactggtctccctggtgattaaagtttggaaactactgagaggtgaagccggctgagcttctgggtcaggtggggacttggagaacttttctgtctagctaaaggtttgtaaatgcaccaatcagcgctctgtgtctagctaaaggtttgtaaatgcaccaatcagcactctgtaaaaacccaccaatcagcgctctgtgtctagctaaaggtttgtaaatgtaccaatcagcggtctgtaaaaacggaccaatcagtgctctgtaaaatgtatgaatcagtgctctgtaaaatggaccaatcagtgctctgtaaaatggaccaatcagcaggacgtgggcagggccaaataagggaataaaagctggccaccctagccagcagcggcaacccactcgggtccccttccacactgtggaagctttgttctttcactcttcacaatgaatcttgctgctgctcactctttgggtccacactaccttaatgagctgtagcactcactgcgaaggtctgcggcttcattcctgaagtcagcgagaccatgaacccaccggaaggaaaaaactgtggacgcatctgaacatctgaacaaacaaaatccggacacaccatctttaagaactataacactcaccacgagggtccgcagcttcattcttgaagtcagcgagaccaagaacccactggaaggaataaattccggacacattttggtgacccagatgggacaatcaccaagcggtgagtaccactggacccctttcgcttgctattctgtcctatttttccttagaatttgggggctatataccgggcacctgttggccagttaaaagtgactagcatggccgccagactaaagacacgggtgtcaggctttctgggaaacggctctctaacaacccccaactcttcggagttgggagcgttggttggcctggaaccagcttccacttttcctgtacttctgggctgagctgagggttgacagagaggaaagccattcagctctggggtcccaacaacaagttggttggccctgcagccatgagtaaaactctcaaagtcatgtcacccaagcaagacttgcccatctatcctatctatcctgacccttgcctcctgggtcctaatgcctgtcagacaaatttcctctcgcctctcttctctgaggctagtcccgcttctaaaaaccactccctgtctctgttgcttttctaggttctcctgtaagaatgatttctaatataaactccaggactctgttaccttctttaggcacctgggttcaccaatcagaaagacataatctttgcccaaagccccattgtagggggtactatctggaattttaggatccctcctcagacaagcaggcctatcaatagctattcctgaagctaggatatgggtagcatcagaaattgtatccttcctattcatataagtgaggacaaaaggcatcactcttccaactctggagatcccttcccttcctcaggatatggccctctgcttcatttttggggcataacacctttatacgatgcgggtaaggtcccagtactaacaagagaatgcttaggactctaacaggttttcaagaatgtgtcagtaagggccactaaatccaatttttcttggtcctccttgtggtctaggaggacaggcaagggtgcaggttttggagaatacattgataagggccactaaatctgaccttcctcagtcctccttgtggtctaggaggaaaactagtgtttctgctgctgcgttggtgagtgcaactattctgatcagcagggtccagggactgttgcgggttcttgggcagagggagaaacaaaacaaaccaaaagcacgggcagttttgtctttcagatgggaaacactcaggcatcaacaggctcacccttgaaatgtgtcctaagccattgggaccaatttgacccgcaaaccctgaaaaagaggtggctcatttttttctgcactatggcctggccccaatattctctctctgatggggataaatggccacctgagggaagtataaattacaatactatcctgcagcttggccttttctgtaagagggaaggcaaatggagtgaaataccttatgtccaagctttcttttcattgaaggtgaatacacaactatgcaaagcttgcaatttacatcccacaggaggacctttcagcttacccccatatcctagcctccctatagctccgctccctattaatgataagcctcctctaatctcccccacccagaaggaaataagcaaagaaatctccaagggaccacaaaaacccccgggatattggttatgtacccttcaagctgtaggggaaggagaatttggcccaacccaggtacatgtccccttctccctctctgatttaaagcagatcaacgcagacctggggaagttttcagatgatcctgataggtacatagatgtcctacagggtctagggcaaacctttgatctcacttgaagagatatcttgctattgttagatcaaaccctggcctttaatgaaaagaatgtggctttagctgcagcccaagagtttggagatacctggtgtcttagtgaagtaaatgataggatgacagctgaagaaagggacaaattctctactggtcaaaaagccttccccagtatggatccccactgggacctcgactcagattatggggactggagttgtaaacatccaatgacctgtgctctagaaggactaaggagaattaggaaaaagcccatgaattattcaatgatgtccaccataactcagggaaaggaagaaaatccttctgccttcctcaagtggctatgggaggccttaagaaaatatactcccctgtcacctgactcactcgagggtcaattgatcctaaaagataagtttattacccaatcagctgcagatatcaggagagggctccagaagcgagccctgggtcctgaacaaaatctggaggcattattaaacctggtaacctcggtgttctataatagggatcaagaggaacagacccaaaaggaaaagtgagatcagagaaaggccacagccttagtcatggtcctcagacaaacaaaccttggtggttcagaaaggacaaaaaatggagcaggccaatcacctgggagggcttgttatcagtgtggtttacaaggacactttaaaaaagattgtccagtgagaaacaagccgccccctcgtccatgtccactatgctgaggcaatcactggaaggtgcactgcccctgagtgcagtggttctctgggcaagaagtccccaaccagatgatccaacaacaggactgagggtgcccagggcaagtgccagctcatgttatgacccttattgagccccggttacatttaaccattgagggccaggaaattgacttcctcctggacactggcatggccttctcagtgttaatctcttgtcctggatgactgtcctcaaggttttaccatccaaggaatcctgggacatcctgtaaccaggtatttctcctacctcctcagttgtaattgggagactttgctcttttcacatgccttcttgttatgcctgaaagtcccacacccttattagggaggaatatattagccaaagctggagctattatctacatgaatatggggaacaatttacccatttgttttcccctacttgaggagggaatcaaccctggagtctggacactggaaggacaatttggaagggtaaaaaatgcccacccagtccaaatcaggctaaaagaccccaccacttttccttatcaaaggcaatatccctcaaggcctgaagctcataaaggattacaggatattgttaaacatttaaaagctcaaggcttagtaaggaaatgcagcagtccctgcaacaccccaattctaggagtacaataatcaaaaggtcattggagactagtgcaggatcttggactcatcaatgaggtggtggttcctctatgtccagttgtactgaacccctgtaccctgctctctcaaatgccaagggaggcagattggtttgctgttctggacctcaaggatgccttcttctgtattctcctgcactctgactcccagtttctctttgcctttgaggataccacagaccacacgtcccaacttacatggatagttgtgccccaagggtttagggatagccttcatctgtttgctcaggcactggcccaagatctaggtaacttctcaagtccaggcactctggtccttcaatatgtggatgatttacttttggctacctgtttggaagcctcatcccagcaggcgactctagatctcttgaaatttctagctaatcaagggtacaaggcatctaggtcgaagacccagctttgcctacagcaggccaaatatctaggcctaatcttagccagagggaccagggccctcagcaaggaacgaaagcagcctacactggattatgctcaccctaagacattaaaacagttgtgggggttccttggaatcatcggcttttgctgactgtggatccccagatacaaggagatagccaggcccctctatactctaatcaaggagacccagagggcaaatactcatctagtagaatgggaaccaggggcagaaacagccttcaaaaccttaaagcagaccctagtaaaagctccagctttaagctttcccacaggacaaaacttttctttatacatcacagagagagcaggaatagctcttggggtccttagactcatgggacaaccccacaaccagtggcatacctaagtaagaaaattgatatagtagcaatagtcagaggctatcaaaataatacaaggaaaggatctcactgtctggactactcatgatgtaaatggcatactaggtgccaaaggaagtttatggctatcagacaaccgcctacttagataccaggtgctactccttgagggaccagtgcttcagatacgtacatgcacggccctcaaccctgccacttttctcccagaggatggggaaccaattgagcatgactgccaacaaattatagtccagatttatgcagcctgagatgatcttttacaagtccccttagctaatcctgaccttaacctatatactgatgaaagttcatttgtggaaaatgggatacaaaaggcaggttgtgccatagttagtgatgtaaccatactgaagtaagcctcttcccccagggaccagcaactagttagcagaactagtggcacttactcgagccttagaactgggaaagggaaaaagaataaatgtgtatacagatagcaagtatgcttatctaatcctacatgcccgtgctgcaatatggaaagaaagggagttcctaacctctgggggatcccctattaaataccacaaggaaatcatggagttattgcactcagtgccaaaacccaaggaggtggcagtcttacactgctgaagccatcaaaaaggggaaggagagaggagaacagcagcataagtggctggcagaggcagggaaagaccagcagaaaggaaagaaagagacagaaagtcagacagagagacagagagaggaagagagagacaaagagggagtcagagagaaagagaaagaaagagaaggagacagagagatagaaagtcagagagtgagagagaagaagagacagagagacagagagagaaagagaaagataggaagtcaaaagaaggagacaggaagagacagagagaaagtcagagagagagagaggaagagacagacaaagtcagagaaggaaagagaggaagagacaaaggagtcaaagagagagaaagggatagaagtagtaaagaaaaaacagtgtaccctattcctttaaaagccagggtaaatttaaaacctataatagataattgaaggtcttctctgtaactctgtaacactccaataccaccttgttgtcagtgtaaacaagggcataacctgaaagcactgaggccactgacaacccatagcattcctatcaaacatccttaacccagcaagtttcctaacaggggatctaaatcttaattaccatacaaaggtcccaccagacataggaggagctcccttcaggacaggatatagatggttcctcccaggtgattaaggaaaaagacacaatgggtattcaggaaactcttatggaagcagagttaggaaaattgcccaataattggtctgctcaaatgtgcaagttgttttcactcagccaaatcttaaagtacttacagaatcaggaaggagccatctataccaattctaagttaatatggatggaatgaggttttattaatagcaaagaaaaattaaaatcccaaacttacaaggttttctactaacgtagagtttgctaaaagttaacagtgtaacatgcattatcctactaccacacactctcaaagcatttctcagacagtttgcaagaaataacaaaatctgtccagtaaggatagtaactacaatcccaaatagactcttcggcagcagtgactctccaaaactgctgaggcctagaccctcctcactgctgagaaaggaggactttgcaccttctttgggaaagagtgttgcttttacactaaccagtcagggatagtacgagatgccacgcagcatttacaggaaaaagcttctgatatcagacaatgcctttcaaactcttataccaacctctggagttgggcaatatggcttctcccctttctaggtcccatggcagccatcttgctattacttgccttcgggccctgtatttttaacctccttgtcaaatttgtttcctctagaatcaaggccatcaggctacagatggtcttacaaatggaaccccaaatgagctcaactaacaacttctatcaaggacccctggaccgacccactggccctttcattagcctaaagagttcccctctggaggacactacaacttcagggccccttctttgcccctatccagcgggaagtagctagagtggtcatcacccaattcccagcagcagttggggtgtcctgtttagaggggggattaagaggtgaagccagctgagcttctgggtcaggtggggacttggagaacttttctgtctagctaaaggtttgtaaatgcaccaatcagcgctctgtgtctagctaaaggtttgtaaatgcaccaatcagcactttgtaaaaacacaccaatctgcgctctgtgtctaactaaaggtttgtaaacgcaccgatcagcactctgtaaaaatggaccaatctgcgctctgtaaaatggaccaatcagtgctctgtaaaatggaccaatcagcaggacgtgggcagggccaaataagggaataaaagctggccacccgagctagcagcggcaacctgctcgggtccccttccacgctgtggaagctttgttctctcactcttcacaataaatcttgctgctgctcactctgggttcacactacctttatgagctgtaacactcactgtgaaggtttgcggcttcattcctgaagtcagcaagaccacgaacccaccgggaggaacaaataactccgcactacctttaagggccgtaacactcatggtgaaggtctgcagcttcactcctaaagtcagcgagaccacgaacccactggaaggacgaaactgcggacacatctgaacatctgaacaaactctggacacaccatctttaagaactgtaacactcactgtgagggtccgtggcttcattcttgaaatcagcgagaccaagaacccaccagaaggaataaattccagacacactactgtcttagagtgatctagccctggaacatgtagtgcttgtgggtctcatagcagtagttctcaaccatgatgctagagctcattggtgtatttcaatcaactggaaagagaagtggagttccaagattataccaggaaccaagcatagacatctaagctgtggccctgctgtcaaaatcagggctgagctctagctgagcacacatgaatgtgtgcagtggttgactcttaacattgttcacattctggtgcactcattataggaatgtcagagctacttataactgaatagccctattatacacttaggagtgctaggcgttctgagattataaactgggctctgagtgtatgtctgttaaaatatgtatggggctttcagtatttaaaaatagtcagtggtcatccacagagctacttgcagcttgaaacgtacattaggaattcccaaagtaaatgagttgtgataactaagcttgtagaagttctggaccttcctcttcatcaagtgagtagatatttatatatttatttatttatttatcaagataggatcttgctctgtcatccaaactggagtgcagtgtcctggtcatagctcactggagccttgagctctgaggcttaagtgattctctcacttcagcctcttgagtagctgagactacaggtgtgtaccactgcacctggcatttttttttttttagtagagttgaggtcttgctatgttgcccagtctgatcttgaacttctgagctcaagcagtcctcctgccttggcctcccaaagtgatgggattacaggtgtgagccactgcacctggcccaagtgggtagattcaacctaagtcaactcatggatccgttaaatgcagggattggattgattcatctctataatacagatgatctgtagtattccgtgattctgaaacacatgattctaactagagacagtgtgaaaagagacagaaaggtcaggagaatcctgggaaatggcccagaatttcaagggctggggcattctccagagcatacgtgctacccagatgctcctgtgcacatgaaccctggggatcttgttggatagaggatggggtctggggcaaggcccgtgaatctgcatttctaacaagctcccgggtaatgctgctggtgctgctctatggaccgctctgaggaacaaggtgagagcaagtgttgagactggagaaatgagatggtagaaagacagtatccctagagactggagaatccttctgagatgttgaaagggcacattgtactgtttgttttaatgacagtaggataatagcaagatctaaagcagagagaactttcccccagggacagaagtgtagaaggtaagaaatgttaaccaggaagcctgggctcagggccctggagagtgttctcagtcctagatgcaccattggaattgcctgggagttttaaaaagtgcccatgcctgggttccaatatccagagacaggattcagttggtctgcagtggggccctgactattgctaatttctaaatgctccttaagtgattcatccgtacagtcaggatggagagtttgggagggcagtgattttgctgattactttctcctaagtggctgcttcctctcccctccaggctgttctagccttactagcccaaggccactctaaggagcttgattgaacggtcatggcaggctgtgcccagattactgtatcaatgggctcttccagccaatgtgctgaatattctggtgaaatctctgagttttatgttgggaacatttttttctaccagttctacttggaatctgtcttcctttgggagagtcaaaggcaccctctgtctattctgctttcctgtttactatttcaaaactttctcccagttgctggaaacttggagccagagttatgcaacaaaatgttgccagctgggaccagaaccgaaatataaaattgttttttaactctgtgctgctcacaatatgtaaattatacttgggaggaaacttctggaaaggaatttttagtcatttagatctgtgcaaaattgactatcatattctacaggtatgcaatgccacaggtacacagagttcaatactctgcatctgaagtaggtctttagtttgagataacctgagaaggggagcccacagagagggcgagctcttccatgggagaggtcccgccatttttgatccattggagttaaatgcaagacgtaaatcatgatgtatcattcacgcatttgttcattccacagacactaaggatgtcttttgtgccaggtactgtgctgagacgggggacacagagtgactcagaccagcaggcctggtttctactctacagagctaggctaggtgggagaagcagacatcacgcaaaaacacacttaaataaatagaaaatcaaaaccatgagtagtgccaagcgggcacacacagggcatctgacttgggcccagcaggaggtcagggatgatctccacgcaaatgagacctctgaaccaaaacctaaaaaataagcaggagttaactaggcaagcaggataaggaaaaggattccaggtagaagaaagaccctgtgataggagggagtggggagagcccgagggacctgagaagtcaagaggatggaactgagtcgaagagaaacagcgctgccaaggtggctgcagagctaagcacataatgtggctaagcgcgcacacacacacacacacacacacacacacacacacgagcagggattctgcagccatggggccaaaataaatttaaaaattactctcaatgctcaagacacacacacacaccacacacacacacacacacggggagggactctacagccacaggactaaataaatgtaaaaattactctcagtgctcaagagacacaccacacacacacacacacacacacacacaccacacacgggcagggactctacagccatggggctaaataaatgtaaaaattactctcaatgctcaagtgtaattgtaattttttttttgagacgaggtgtcattctatttcccaggctagagtgcagtggcgcaatctcagctcactgcagcctcagccttttgataaggtgatcctcccacctcatcctcttgagtagctgggactacaggggtgcaccacttcacccagttaacttttgtattttttgtagagatagggtttctctgttttccaggctggtctcaaactcctgagctaagcaatttgcttgcttcggcctctcaaaatgctgggattacaggcatgagccactgagctggtcataacattcttaaatgcatttgtgtgagtgtgtgtaacatatcagaaggaaaataattagaaaggcttctccttgcacagccccgcaagggatgttctcagaatcaggtggagggctcaggacagccccgctaacgctggtcctggagttgctcttcgtgccctggccaggtcaagtggctttaaactcctagcctcttttcctcagaatcctatcaccttgcaatcccttccccctgccccaccctccccactggactcttttctaaactgtgcagtacgatctccaaacaccaagcagagagttcaaacttggcagcgacatcatttcctgagcactgcttctgaggaagagttcctacacacttcattcatttccccagttcatacacaaacgcatttacaaaatatgcttctttgtgaacgacacaaaccttctattggctttaagaaaacggatctacaacgaggctttatctgtgggctctttctgaacatggccatgcagacatgagacaaagtaacattgcagggccttttatgcgggtcctcaaagagggccccaccctggaaataaagaaatggccacagttgccctgtctctaatcggttcatggtattcagccttgacagcattgtccagcggctgaattcagccttggaggcctccatctgggttgcagggggagggggtgggggataggggtggggaatacagaagtttccgcaggctgtgtgaaaagtggcctcccaaccagctgcacagaccccctcgcctcttctggtcgttgctcccagaagccttctttcacttagtgatggaatccagcatacaaacaaggtcaaggagctttgtgagcgagagagtgacatttgcaaagggagcgaacccttcagctgggagcttgcaggagcagggctaaggggcatgtgatcaggaggtgatgtcacccaggatttccacaaaggaaaaagtggccttttctttgggaagatagatgacatcagcctctcaaatgggggctgggtccattttatcttccttttagctattaaggagatttctcaagccttgagaagtttcagaaattagaagagaacattttaaaaaccgtgtcaacatcttttatgactggctcggtttggatgtaagccagtgccttcttgactacctgtgggcatgaggcactgtaccaaagggcttttaaaaaacatctttagagcactggcagaaaaccgccatgaggtcggcagtgtttctcttaaagttagatctttgctccaggtctctttctctcgagtggtctttcattagcctttgtttatcactggtctttcgggggaattccttctcattcaaaaattttattccttttgtgacttagagtacatgtagtacgatttctgggaggttcaccctttaaagacaaaggttttatcttttgtaattctgttatccacttgtcttgtgtgagagaaaatgccttagggtgtgagggtgagtaagctgggctctaggagaagatctgctggacccagcctataatgaacaggcagctacaactgtgaatcatgttaattacatgattatttatatgtcaattacacataacctctgccagcagatattttttgagaagaagtttttcattcattcaaccaaccatccagcatatattttgggcttgttgtctaaatatagagagtattaatttgcttgggctgtcgtaacaaaaatgccacagattgggaggcttaagcagcagaagtgtgctgtctcctggaggctggaagtccaaggtcaaggtgtcggcagggttggtttctcctgaggcctctctccttggcttgcggatgctgccttttccctgtgtcctcacatggtgttttctctgtgtgtgttcatcctgatagctctgtgtgtccaaatttgctccttataaggacaccagtcagattggattacagtccattcagcttcattttaacttaattgcctctttttaaaggccctatccccgaggacagtcacattctgaggtctgggagttagaacttcaacatatgaattttggcagagatacaattcagcccataccagaaaggaaggagatcacattcttgactttggggagttagtcatagagtaggcaaggcaggtaaaccaagtgtagaaatatatacataatccaggacgccatgggaacacagaaaaaaatagctaggacagcctgcggaagttcaaagagacctccaggcagctttgacatttgaactgagttttaaagaatgggcaagaattgatcagacaaatatctgggagaggaaggcttttctaagtagaagcagcaaggtgtgagggcacaaaagttttgcaaagagcaagtccttcagctagaccacacattctctgcattctccattggggcagtatcaactccaaggaggtaaaattggctcttggtagggggattaagaaattcttactctttaatgtataaagcataaagatatacagtacataacagatatgcaatatacttgtggtattaaattttcatggttgagaatttggaaaaaaatgtccgaacaatctccttagggggctgataatgaacaaaaggtgagaaacactagggaaagggagtgatagaagttgacgcaggacacgttatcagaaaccaactgataggaaacatcacaagaatttggattttatcctgccatcagggaaagaccaccaatggatttttaagtgggaaatttagtgatgcaaacagaagtacactttagaataagagttctggcaagtagagggatgcccaagaagaggaagagactgagagtttggtgactagtcagagcagggagaaaggaaatgagtagtgggtgaggcagcgtattaaagagctgtttagggctgggtgcagtggctcacacctataatcccagcacttcgggaggccaaggcaggtggaccatgaggtcaggagtttgagactggcctggcccaccccatctctactaaaaattcaaaaattagccagctgtggtggtgcgtgcctgtaatcctagctactcaggaggctgaggcaggagaatagcttgaaactgggaggcagaggttgcagtgagccaagatggcaccactgcgctccagcctgggcaatagagtgagattctgctaaaaaaaaaaaaaaagagctatttagaaggtaggatgggcagatctgatggtggagtagatgtgtgtcaatctgggagacagaagaaggaatcatggatagctcccgttttcctgcggtgtatgatttggtgcatggtggtgccattattcatagataggaaatcccagataaagaccatgtttgggggaaaattgtgagcttctatttgaacatgctgaatttgagatgttcaggggatgtatcctttcagcaattgctggtgtcagtataaaaattaggtgaggttttgggccagagaaagagactttggaataaactacatgttggtgaatttggagttgtgagcatgatgaaatatatatccaaaactgtgcaaggtatttttaggcatatgaaagaaataccacgttagtctttgtcttcaagctgagcatgatcagttaggaagcaggtgtagaaaactaacagaagtgctgaactgtgaggtgcctattgcaaggctagtaaggaggctggaagtcattggggaaaatcttcacggactctgtgagattttagagcccttgaagaatgatcaggacaagaaatgacagatggtgcctggataagcatgagccaagaaagagagagaaacaagcctgatgtaatgaagacagtgggatatgaggcttcgtagacctcctgggctagattctttagaattctcaaagccagctagactagtgtgaacttaacgtagtaaggaaaagggaaccactgttgttttagacaatggagtgggaaatgtcaagggaggagattacaactggagacatcatagatcacagtgacagaggcaaccccaggggaccattctgggtcctggttactaagagcgaggaatagcggtctgcagagacaagacaactgatgatccaaggtgagtaacattctgatgaatcctcagcaaagacactcaagggctatgtggccagtgctgtgataaatcctggcacagaaaatattagatcaattgccgcattctctcttcctaataatttcttcaaagttataactttgaaatacagactcatgattacctaagttttccagtttgaaaatgattttagggctcttttttgttattgaacaaaaaacttttgttgaacgaaaaaattttattgaacaaaaaatgttcaatttaaaatttttattattgtgtgtccttgctgccacgtggtgaaaaaattcacaacaatctggaagtatgatgttggcaatgaaagtgatttatgaattgtggtcagcaaagattctagcgcaggttcacagggctgggctgtgaatcacactgtctggttctaatctcaggcgcagaccttctctccgttggtaatggaattgctttcacagtgtcgcttcctgctaggctgtgatagacataatgtcacacagagagaaatggtaaagcacccatccatccgcctccaaagtaacctcaagaatttgatgtcagataaggaaatcctgcttggttttggtagaaatttaagtaaaagagaagcttttaaaaacaactagctctgtttaagttaagagatatttccctaaatgctgactattctttctctcacatttatacatgctatatcccatcctgtttatgatggctttttcagcctatttgatattttgggcttttgtctttgtgatactcttaaaatatttttaagcatggagactggaaatgagttccttcttagtgtggaaccaaagcacaggtttctgcatcgtgatactgagtctgatttgtatttatgacaaattttcacttatatcttttctgcaaagaaattcttaatggacgatgctcatttctaagaaatctgtttctaaataactccttgttgtaaagttgggatagtgactaagaaaatcccacagctcttttggccttgacttcagagtttctccagcaaggtcccaatgatcagaggcagcattaaagctgtgcatatgcagacctttcagaatgagtggaaaagctcactcctgacatttctgcctccttgacgacagcagtaaatacacatccacacagttgaccttcatctcatgttggctctgagtctcttcaccagcaagggcctctcaggagtctcgcctccccattcccatgtcgccactgtttgaaaaagttggagttctatttctattgccactctttgaaacagttataaaaagaaaaaaaaataaccctcaaaccaccatgaccttcccaaatcacagattgcacaatttgtaataacagtccttgagatctgggccaaagaaagggctttctcgaaacttctgtttgtgttctggttccctggcaacaatatccccaatagaggaatgcatgtactttgcaggggattccacactttttcgtatgacacaaaaaccaaaaccacacttttttttttcagtttcaaatatcatagcagccaaaaatgaagtgtagaaacttgagttctaagccaactcagaacaaatgtgacgttcagcgtagaacctgaatttttgtccccagaggtttctcttttcgaccattgacttaaatgttgccatatttgtttcaaacattacatatccaaggacttgttttgtgtgaatgcactgtgtactcagaggaacagaggaagcagtgccaggtggcagcagcattgtctcacaaacagaacaaatctggtggaggacagtaactaccacttataagagttagtagaatttgataatctgtagatcagtaatgacaataatatactctgtccctgatttttttctcctcctagttccacaggctactcaaatatagactattttgaccctgtgtaccaaaataatgaaattgaaggaatgcaggataaataatatagattttaccacctaaatgtaatcttaaatttgtctgaagatattatgataaaaataaactatcttgccatgtaaagagtgaatgaaaatatgattaaacgcttagtgcattggtttaattgacatctcattcactattactgttgttgatgttatcattttaaaacatgactcaacatgtgtaatttaaaaatatgatcttgagaagtgaagccagctggacttcctgggtccagtggggactcggagaacttttctgtctagcttgaagcattgtaaatgcgccagtcggcgctctgtggctagctaaaagtttgtaaatgcaccaatcagcactctgtaaaaacagaccaatcagcaccctgtaaaacggaccaatcagcactctgtaaagtggaccaaccagcgctctgtaaaatggaccaatcagcaggatgtgggcggggccaaataagggaataaaagctggcctcctgcgcaccagtggcaatccactggggttgccctgcacgctgtggaagctttgttcttttgctcttcacaataaatcttgctgctgctcactctttgggtccgcactacgtttatgagctgtaacactcactccaaaggtctccaccttcactcctgaagccagcgagaccagaaacccaccgggaagaatgaacaactctgcacacaccacctttaagagctgtaacactcactgtgaaggtctgcagcttgacacctgaagtcagcaagatcacgaacgcaccagaaggaagaaactccggacacatctgaacatttgaaggagcaaactccggacacaccatctttaagaactgtaacactcactgttcaggtccgtggcttcattcttgaagtcagcgagaccaagaacccaccggaagaaaccaattccgaacacaatctcatgtctcatcccaataattttcttaaatgagcattatcattcccttattatggatgagaaaactgaggaagaagcctgagacaagttaagtgatgtgtccaaacttacacatccactaagcaatggaatcagaacacaaaactcagtgtgtgatgtcaaactcaaaggccgtgcaataagtagcacgatggtgcctgaaagcaaatattttttccccacagcttttcattgcaaaaaaaggtcaaatgatattgcaatgcaaagaaggtcagagcttatagtaggtaattttataaattcccgtaataataaatgtttttaaaaagatgtgtgcaatcttacccaagtaaatggtgatccagtttcaaaggcttcccactaagtgacacaattcattctttctttaggttcaagtagcaataatatgtgggttggggcggaggggcgcattgctaggcaaaagacaagttcgaaatagctgatgttatttgcaatccttaaacacaatttctgctttattactcatttataaagtgctgttctggagctgctatatatgttgctgatggaatccaccgatctgggagaaaccacggagatcatctggtcagttgccaaggtttagttatacaaactcgcttacaagagggagaagttatattaaagtgaagagtaaaagggtagctgctcccagaacaacttggccgggctagagtggaccatgggaatggggtggagcatgtgaggatttgggtaatttagttgtttttcttcccctaagctaaggacccaggctggctggatgcaggatttgccctgcgaggggcctgcagcatgggatgttgtaatcagagaaaacaaccttgaggctcagatttggacagagtttaaagggtcacagaacaccactgccatggacgtggtgctgcccacctgtgtccatttctccgggtggagtcctctccctgcagagggaaggttagaggttggaggaggtgagggaaggaatcagggagaggcctgcaatgtaggtccctggaggctctttgagcttttccctgcaagagccctgtgtaccaaaataatgaaattgaaggaatgcaggtttgaataatatttctaaatagaagtatgactgttgaacttggaaactgcctacagagaacatgttttctctgtctttgtttgtttgagggatttcataaagaagctttcagtagccttaggcatgactgcttatttcagggaaggttagtacagttatcttagtctcatttctttccttgtacctttttatactaaactttgtttagaagtcttcaatcatttcaaaaacatccaaggagagggaaaagagattgatcaaatgattgatttctcctgaagaattgtaagcaagggatttctactgggaaaccattttttaatttgattgaaattagtagcttaaaaggaaactgataaagttaatcaaagtgaaaagatgacaagattggctaacttctctaggttaagacgaaagatagtatccttttgtatacaggaaattaaaatttatattacacagaaactccaaaattatggcttctttggatttctttctctttgatgatgtactaaagggaaacacatcagtatttagatctaggccatcttagatagtcagatggctatgacagtcttaactttgagtatttatatgacatcttgaataggaatgtaaaggtcattatatagcggtccacagcattgatttctaagcttcttgtatctgttttccaagtcactgacttcatgcaataacttattctttcactgttttttattgtatctctaccattgaaacccgatgctctactttatatccactgctgtatagaaattagtcgaataaaatggattatcacaaaatatggggcaaggatgaagtctccatggaacatgaaactttctaaacgttcattgactctccaacactaaaaatcgttatgacttaactccctggttcttgggtttacctgtttcttcctgatgtgatacctggccctgtatttgctgctagttttctcaacaatagaccttttctgttttcatgaaaatcttacccttgaccaaccatcctctaaacctcaagatgacaaataggaagtaataattacaagatggaatacagaaagtttacaaatgtgcactccttgaataccacacaaatagttgttaccattttgtacctacctgggagtttggccacctcaattatcagggaaagaatgaggatacattagcttcttagggctactgtaactaagtaccacaaactgggtggcatgggacaacagaaatttgttctctttattctggaggctggaattccaaagtcaaggtgttggcagggtcatccctctgacggctctagggaagacccttccttgctgcttctagcttctgttgattgatggctgtctttggctttctaagccttgtagatgcataactccaatttctgcctctatccacacatgaccttcttccttcttggtgtctgggaccaaatttccctcttcgtataaggataccaagaatattggatttcagttccaccccaatccagtatgatctcattttaacttgactgcatctgccaaggccctttcctccaaaaaggtcacagtcacaggttcctggtaggcataagtctcgggggacagtgttcaacccaatacagggacaactctctcctctcctggagtcacgatgttttgtcctcttcttccttttcactctcttctttcttccttcttttttctcaaggaaattttatgttccttggcctttatattacttgattttcttctttgatttcatctcgtgatcactccagtttgtgtccccttcctcacagaatacatgctatctgactaaatccctcagaaaaatccatctgcacatgcttcatgtccttatgaatttgaggagctccacccttggccttgtgttcagagaggactagtgaccctagtaggacagatgcctatcacttggccacatacctgtgaaatgttggggaattaactggtaacatcaaaccaggaattactgactttttgtggttctcattacatgccagtcacctttggacaactttggccattttaaggagcacatattcctgtccacttccccaccctccctgacctgaaagtttctgttcaaaatccttgtaattacgtttttttatgtttcatagatgtatcggaagtgaggcctgtatactcactccaggaaatagttcactttgccttgggttgggccttccccagattctgagctcttagttaccaattcacatcacacctgccttaccaaaagggtccttgctggcagtttctcttctgtgtcctcccttcctccacaagctgcctttttttttttttttttagatggagtctcactctgttgccaggctggagtgcagtggtgtgatctcagctcactgcaacctccacttcttgggttcaagtgattctcctgcctcagcctcctgagtagctgggactacaggtgcctgccaccacgcccagctaattttttatatttttaatagagacagggtttcaccatgtttgccaggatggtctcgatctccagaccttgtgatcggcctgcctttgcctccctaagtgctgggattacaggcatgagccactgcgcccagcccacaagccgcctttttacacaatgaaggcaaactggccttgccaatgaagcacatctcaaggtcttatagagcagaaagagtttttattgttaagttatagaaaaaaagctattaaaatataaattgagcattttaatgaagcacgtgaacatcctcactaattacttttaaaatttaattctctttcactgtgccttggcttttggcttcgttttaacagcaactgttgatttcccaggcatttcctttaggaatgaagggataagggtgggagggtgtcggtgatgaatcacttctctcttccttttctgccatcctctttgggctttagccatgtgtatttcaagatgttattcctcctgatgccatcagtttatggcatatagtttcaggaaaatgccagccagcaaagcgctgactgcatttgagcagtcgccgggcaatacagcatttactttttaaattttgtgccttggattccatttagctgtttcattactggtttgcttttattaaagctcttataaaaaaaacacacagatacgaacttaaagatagtacctacataggagattattattaaatgtttcagtactggaattttataactcatggcttgttttggacaaaaaccaaaacaatattagtgaagttcttttatgaaggtattttaagttatctacacaagtaagcaggtttagcaacagcttgtaactcttggttgttatgagttcagcagatcaatgtgcttcctgcagataaagcaagcacttcctttcggcagatgagtgagagtttggaggaaaatcaaggcaaacagatgatcagtcaccagctctaaaacttttataaagattaactctttaaaactgaaaaacataggcttctcttcagggcattattttattccagttcagctgatgtctaatgatgtattctgttagattttgcctcaaagtcaattaaaagatttttgctttgtttacgttttccaggttgctatggtgattgtctttagtggagggacaggacagtaatgagggcagcattcaacattgttagttccgtgcctttgagctgaagttctcggcaaggcatgggggagagagaacacagaagtggaggtcaggatcggggagggtgggtgtcacaatagggttttgtacccacatctgccattcactaagtgatatgagcatgttccacagctttcttgaacctcactttgctcacctctacaatgggcctgacatcattgttacctgcctcccgttgtcatgattaatttcaaataaaataatgcatttcaaataaaaataattcaaataaaataaaagcacttgagaactgaactaccataaaaatatggattgtcttttaaaaaatttttgtgcaccttaatgaaaaaccaatttcttacctcttctctagctattcatgatagctttttaaccagtaattcctcttctagctccaagtctttgtctcaaatctggggataaagtcttgtgaggatacaaaacacggccaggtgtggtggctcatacctgtaatcccagcactttgggagggaaaggtggatcacttgagcctaggagttcaagaccagcctgggcaatatagcaagatcctgtttcaaaagaaaagagtaaaaaaaaaatgtaaagatagaatacacagcatgtgtgaaaggattatgatatgcacaacatttagctaaaaactttggattgtttcattcattctatgtaacaaccctatgaagtaagtattcatacagctatagatgaaagaaaggttagattacttacctaggaactatcacagccagtttaggaacccatttgtctgaactacagcccatgcttcctctgttacactataatgtttccaaaagttttgcaatctaacatgccaattaagcagttctaaaatcgtgtctactccatgaaaactttctcttaccaaagtgacaaagagccactgtgtctatttctctcaaaactctttattcctcatgtcactgttcctttcttggttggtattttcatctttttcatttttgagacggggtcttgctctgtcgcccaggctggagagcagtgctgtgatctcggctcaatgcgacttccacctcctgggttcaagcaattctcctgcctcagtctcctgaatagttgagattacaggcgcataccaccacgcccagctaatttttgcatttttagtagagacagggtttcaccatgttgggacaggctggtctcgaactcatgacctcaggtgatctgcccaccttggtctcctaaagtgttgggattacaggtgtgaactaccacgcctggctggtattttcatcttttaaattatcttcttttatcttcttttgaaaggcttttctaaatcattgtcatctattttagattatgaatgaccggtgttaaaaacttctgtatttcttttacattttattgttcattcaaccagacaggtaaccggatgacgacaaggatgttggtggtctaaacatccctgcctgtgttatttcctgatgggtattggtttatataacttctttcctctccagacttgtgtattctccatctctttttcccttccctgtttgttatccctttgtcatgcatccagagtcgcaaatatgactggtaatggcaggatgagttatttattcttatttgtaacttaccagtgattaacatgtaaaggatagaatagtattcaggttgttttcttcaaataaaaacttattgaaattactcttagtaaactgaaggagaagcaaaaagggtttaataacttgcaagaagacatgtgggcaataacactttttatgtctataaatgtctttctttttttcaagagatattaaatatgcttggcttctatagcactgcttgtattatgggcagatgctcaataaacacttatgagtgaatgaaggaataaataaatggaactgggaagctattttacctctttcaaattttagaaatacgaagacagttaagtttctaccgtaattaccagaattacaacgtgcaggtttgttacatatgtatgcatatgccatgttggtgtgctgcaccctcctagtactgtataattttgaccagaaagtaccactaaattaatctatcctattttgcatttgctgtgaacttttaattcaaatgtttccttttgatatgttaatcctcagaggtagtgagagcatgaaggagaaaaagaaaacttcagagatttcaagccctaactgtttctttccctctttctcatgatcatacaatatttttcctgacagagtatcactgataaaattgaaatttctcagctgggcatggtggctcacacctgtaatcccagcactttgggaggccaaggcgggtggatcacctaaggtcaggagttcgagacaagcctggccaacatggtgatgaaaccccatctctactaaaaaaaaaaaaagaaaagaaaaagaaatttttctttaagaagcatacatatatgtgctattaacaagatatacttaaaagtaaaattttgctctttttattaaagaaaaccttgtggattatttgctttaaatactaggaaaaaagacattgtgggtccatataactatactgtaatttttttaaagcattactgaatgccccgaatctgtattaccattccagtttacagcgacaatttaagggtattagtatcctgttatttgcgaaggaattcacaaggaaacgtaaaacaattggaaaagacaatggaaaaatgttacacagagttttatgtgaatcaactaagataaaaaaattgaatcagattggctgatgaacgaatgctaaataaaaatgcagaaatgagctatctaaactttcatttccttcttatcttttatatcatgtggccataaagttattttcctctagattttttccattggataatttatttgatactactgatagaaagaaccatctgagctgaaaatgcaagttgagaaaaaaatttcagtaacaggctttgcttacctgtaatgtattttagtaaaaggtggtacatcttaacacgagttacatgaggcactgtgttgtaccactccggaagcatcctgttatagaatgtcctgtgagcggtgctccctggagttgggcattggtacaggagatacggacaatctgtgatgattttggcttcaggaatatttgccatgtgttgttgtagtcggacaaatattttctcatcttttacggtacttgtgtttttttaagattcatcatagtctctaaacaatgtcagcacatctaattttaaacagctttttcgtaggctttagaaataaaagccggaactttttaggacacaggaaagatattgctctgtgcaatacatttaaagtctgaaaacgcagaggttttcaagtgaaaggagactgagaagtcaagaagatagtagtgctttgagctagagtcagatttctctgccgaatcaagattcttagaattctcagtgcttctcagtgcagtggggaattctgcacggagattttttttttaactccttaacttttaaaagcttttcttctaactcactgtacaggaggaatttgcatagagtggacagtagacaagatctcagacttggtgtcttactttagaagccatggtagtttaatgttatgtgaaaaatgcacgtttactcataatggagtgaggaggcactgttacttttattttattttttattattatactttaagttctagggtacatgtgcacaatgtgcaggtttgtcacatatgtatgcatgtgccatgttggtgtgctgcacccattaactcgtcatttacattaggtattcctcctaatgctatccctccccccttcccccaccccatgacagaccttggtgtgtgatgttccccaccctgtgtccaagtgttctcattgttgaattcccacctatgagtgagaacatgtggtgtttggttttctgtccttgtgacagtttgctcagaatgatggtttccagcttcatccatgtccctaaaaaggatatgaactcatcattttttatggctgcatagtattccatggtgtatatgtgccacattttcttaatccggtctatcattgttggacatttgggttggttccaagtctttgctcttgtgaatagtgcgggaataaacatacatgtgcatgtgtctttatagcagcatgatttatattcctttgggtatatacccagtaatgggatggctgggtcaaatggtatttgtagttctagatccctgaggaattgccacactgacttccacaatggttgaactagtttacagtcccaccaacagtgtaaaagtgttcctatttctccacatcctctccagcacttgttgtttcctgactttttaatgatcgcacataaaaagccttgatgaagaataagagaaggtaattggaagaatttaccaaccaataaagaatattaaaaaaaaaaaaaaaaagaaaaagaggcccagaaatgttaagagcaaaaaatgttttgttaatcaccaaaaattgctgttggaaaacaagataatttcttttctaattgtgtctctcataagccttcctcaaattttacctcttctgcaaagttttctcttcctctccatactgaaatctctgtctgaattcctgcaaacgatttgagagcctgtgtggtatagtaatgaagtattaagatacaaccagatcacctcagttagtatcctagcatcaattaaccttggaaaatccacaccacctctgtttgcactgatttgctcatttaagaattggatcctaacagtacctacctcatgtggtccttatgagtacggaaacagaaaacacatggaaagcccatatgaggactcaatgaaaggtggcattattctactgtgtgccgcaggctacagcatttgattatttgttgtcatggtctgcctgaatggctttctaaggcatgacatatcaagattctgaaacacatgctgttgtctttttccttggttggatttttctatatccattgtatttttttaatgtaaatttgctgagttaggaactatataatttacttgtttatttcttacagtctttggtacaaagctaaggatttttagcccttaaaattctagttcttagatctgcacgggactgcagaataatgtattagctacaaggacactgaaggcccagggacctgaagttcacgaccacggctcacacggtccattgtacttccgactatgttatgtaattcttaccttattataataaagaaaatctaaaattagaatgacttttttttaaagtacgaaggtttgatatggtaagaaaaaggatcgagcattattgtactaaattatatataatccagtgtttttgaaaggataaacttaataagttgtagccatgatttttttctcattgttttataactgcataattataactttattgtaacttaacggttttctcctaaattaagcattgtatatttttgatggcctttcggtgagttgaatttggaattattttccacgggctgttgcccactttgaactgactgaacctttctgttttaacaggttgtggtggagagctgtctggggccacaggctccttcagcagccccgggttccccaacaggtatccaccaaacaaggagtgtatctggtacattaggacggaccccgggagtagcattcagctcaccatccatgacttcgatgtggagtatcattcaaggtgcaactttgatgtcttggaggtaggaagtgagatggttttttcagcacattccaaagtttggggtagaacaggaaatcactctgccaagattccgaattctttccagtagtcagcagtgttctattcttagacattttaatgagcatcagcccttcggtgatcatttggtagacatgggattaatgtgtggtttgggttttcctgaagcaatgcctgagggccttgcagcagctgagttaggaggtaatgccaggaagccggagcccaggacgagtgagtgaaggaaaggaggagggggaaccagcagagggagcccctgggggcaacttgggctccatccgctgggaccttctgaaggaccacagtggaggcactggtccgccaactctggttcccattggtaaggactgcacttgggatggctaacacctcacacttgcagtctgagaaagctcccccagaaagagcattcgtgtggcggagcatagagactgggcactgccaacaagcacagggacggcctaccagggctgccgctgctcttcaaggggccgccagggccatctgccgcagagcgcttttgtaaaaaaatggccacctaggtagcatgaggcatttgaagatgaaaattttcccagcacttctgcgaagggtgtgtcttggatcattaaaacagtctttgagaatcttgagcccaaaagtttattataatcaatgtttaattgcaggaatttagtcattagaatatgtgtgtgtgtgtgtgtatatatatatatattttaaatatatagctttaaaatattttgttgtagtttataaaattatataattcattataattatataatgtactatatagttacattatttatgtaatattcttatataattttataacatatatagatatgtcccagatatatgtaatatattatgtagtatattatatacttacactataaattataataattaatcattacaataattaatatttattataacagattattatattatatattttaatgtaagtatataatacactacatattatgtaatatgttatatatagttacatgtatgtaacacatttattatgtatactttgaactttgacctgtctgcaaactttaatatcttccaaatacacacaaaaatcctgtgacctcagctctagggactgctgtagcacagcatgacaaggattctatatccagtagaacctaaattccatgaggctagatgtttgtttgctttgttttactgctatattcccagctccacagagtacctggcaaagagtaaacactcaatagatgtttgtggaatgaatgaaagcatcaacgtctctgattgtcacaccataataatgcacatttagggcactgtacagaggaatttttacctccatgttctcatttaaacattaaatcgttccatgaggtaagaggggaattttattcccattttacagtggtcaaaactaacgctcaaaaaggttaatgggcttttccatgaccacatggaaggggagtggaagagctaataactgaagccagtcactgctcaacactccagtaaatcctgagaccatagatgggtgcagggtgcaaggggtcgatacgaatagtatggacgttacaggaaactttaacaaaaactttaattataaaacaagttcttaccttgaaaagaaatggaattatcccctcagtgagagtcactaggaattacttttagtaattcatcacttttagtaatttagtaaagtcatccttctcagtgagagtcacaaggaattacttttagtggctctaaaagacttaccatttctatctctgatttcatttactgtagctctacagacaatttactattgtaattgtaaatgaaatcagatagaactggaaagtcttcacggaaggactgttgccaagtcatgactccatctcagaggagaaacaaggtgcctcctgaaattcacactcacagcacaaagtaggactagcatccatgtgcagaatgttcagatggcctcgctcgcctgcaaggatattgcttggttgcataagaccccttatcacttacaaagggctggaggtggatcttccacagctatgtgcaatgttccaaaccctttattttcatactccaaagtgcatgtgattgttgcccacttggcaaattataaatgggccaattgtgtttcgggttgtgtcatacccattacgggagaaagtagagacaggggctgttccctacaagcaggcctggggcctcagggacgaaatcagggactccaggcagaagcggctttcaaggagagccctatgcctgacagaaatggctgtgagaagacgcacagtctgcttggggcttatttttattatgacaagctgacattgcagtggcctcccgtgttccaccaaaagcagggtttgggggactgttctgaggctcttaaatatttggggaaagtttttttctgaaagctaaaaggagcaaccctctgacattttgttcaaaagccttgttttgcttttctgcaaatgttcatttggaaaacgctgtaataaaattgggctaatggtggtggaatggtttttttcacccctccctagctgctgataacatgttagtagtgggtttaaaagtttgttacccatgatgggcatgtgatctaaaaactttgctgactttctcagcctgcatgtgagtgtagtcaagtggggccttacagccactaagtattgggcttacctgggtttcacaaaatttattcagaagccatttttcccttgaaaaatcagagtccggaaagtggcccattgcaaaaagcagcagctgtttggttactcataaccccggaatgctgacttgattgtaacaataaatggagctaacagagcagaaagaaatgttcaaaacagattaaaaccataggctttgaaatgtcctccatcctgagcatttgctaaaacacatttttaaatctctgatcatcagaccacttctttttcccccaaagtttagtcatatgctgtagttgaatgaaccatgccctgaaattctttccatctttttcttcttttgaagagtcatgtactatcggttttatttgtggaagccagaaggaccattgtttcggtcatggaaacactctgcctgattttactttaatctctgagaaagtctttagagagattctgaactggcattaggcagaaaaggaaatccactccttggagcagtaaaccaggacaattgcttggtgtggacagttacctcagtctggcctctctgcgataggcttttgtgagctcagccttgcaagaagggaagtaaataatgtccaaagtggcagtgtttattcttctagaggcttctgggtccagccaactcatacccattatgtttgtgatctcaaggggatgtttgagcagagaaaacaaagaatattttgccgacgtgcgagttttctttgttagaacttaacacttggcgttcagtggtctttccaaatatgtgctgttgattgggcttgggtgattgggagcacatgctgtcagtttcatgctgtggggactgtgccctaggcgagggggtagggagatcttgaaaatgggaaagaaagctggctctacacaccatgcaagcttgcttctgccatttgcatatgtgtacgtgtcaggggccacacagggctcttcctaaagccctgcttttgatgggacttggggggagtgcacaaacatcagctcctcctaataaaaataagcctgaagcagtcggtatgcttcattcctttgcaattactgtccttgtgctcagccctctgtgtaacagccgtttcattcattttggcctttaccggatggctggggggaattaatcagacaaagaaatcattatagattcaaatcacacactcctccccaaagtaggcttcttgttctcactccctctccccagagaacacttgagtgattttcctatcagtcagcagtgggtcctgagggtgggcaagggccgggggtgctgaggaatgggggcagagtgtcccgaggtgggggaaaggcacagagggagggtgggagggcgctgtgcccagatccccctgagagccgccttcctggctctggtcctgagtgcctgtacatggatggctgcagttgcagttatgaaggtctcagataccaactctttgaaaactgtctcccaaagatggtctttcttttacaaatcgaagtttgaaaagacctgaagatgaggagtcagcatcttctatttgattcccatcctgccttcgccaccctccccagccccacacatacacacaggagataaacaggacccagaggagactgagaaacctgtctgtgaggcctcctggaggcctggcctaggctctccttgcctgcaagatgccctccgtgagcccaaggagactctttccagaggactatgtcactggggtattggattccagtcagacagacagtttgggagatttggaggagcctacgtggtctgaagtcatgtgtgatagatctagaagtgaaacaagagagttccctgaccaccccgtcgcaggacctgtgacaggggtgtggcacatctgttcggctgtggtgccctcaaaccccttatgggagggggagcatgcagattggcaggtgcaggaacccaggcaagatgctacccacagtacggtctagtggtgggtgcctgtgactctcaaagcccccatgggcaggctacagtattcttttagctctgccatccacagagggctcaagtgttaaccagctcagtgactcttggtacccgacttcctgtctggcatccaggaagaatcaggtcacacacggacttgaaggatggtgaatgtggggattttattgggcgatggaggtagctgtcattggaatggatggggaactggaaaggggatggagtgtgaagatgatcttccccatagagtttcgctgtgctgtggatgatcaactgtctgaccatccccggccaaactcctctcaacgttcagatgctccttctctctccttctctgccacgttgttcttctcctcctctgctcttctattcatctgcccatctgctcgtggagcctggagttggaggtttatatgggtacaggagatggggacgtggcaggccaaaaggcaacatctgggtgtggaaacaagaatgcctgttcccgtttagggccgtgggtttccaggcttggggatggggcctttgccagggaacctccctcttctacccagtgtttccctgtctgctgtctatatcagaaggagccatctggagactaaggcagagtctagggcaatccctgagcagaaaagtgggatgcacttagtcaggttcctgggcatgggcgtgctgggagcaggcacagggagggtgcatagcatccccttccttaggctccaaaacacacccagagagctggtatttccactcctcctaaagaagcatacgtgttatattcaatgtgtggtcttagaaaacattcagtttgcagggtaggtggaaattcctaaaaatataactgggatattggtagccttcagtgaactcaactttcataacaaaatggctttatgctaagactaatcatatgtgccagagttagaaaatcagacatttctttttttaaaggtccccctaaaattcagaaaatcgacttaatattgtatgatctgtaatgtttctgctagagaaagcaggaaagcccacaaagacatgaaaaagacaaaaagaggagatagggaagattctggaataatctactccgtcctcctctgcaattctggctgatgaaacaagcaggcattttatgggtgattgaacttgtgtgttcctaaggcacagggagtgcctttgaaaactcagctcaagtttatagtgcatccccacccagggaggctgagatttcaatctccaataatcatagaacccaaggagccgggggtcaaaatgagccagagcaagggcctgtaattgcttaaaatattttttaaagtcttttttcctacatcccatgttagatctatggaggccccgatttccactctcccagaatagcccaactgtgtacccagagatcacctgagaaccccatgcaggtctccagcactggaaatgagctagcaattcgattcaagaccgacttgtccataaatgggagaggcttcaatgcgtcatggcaagcagtcactggaggtgagtgagaaaaggaggtttcctaaagtacttaagccgagccctcgttaaatttcatgaaatgcttgggaaaacgtatgaaggctacacactgataacttagtgacatcccaaagggcagcctactgagacctgacatatacccttccctaaaatacgtgataaagtttaacttcctaagggtcaccacatatgtgaaagcaagaatgtaagtgtgtaagtccatggtgagagcagaactagggtgataggccagacccactctccaagggctcatacctcttaaccagcctccatacctcatgccatagtacagacctttagattcttggcaaatatcaaacttgcaaacattaaatttgtgaatcccaaggaattactgtgtgttctatggtgactttctgcccaagattttaggtagtctaaataaattgcctgttgtatatttttaaactataacaaaaatctatggcacaaaatagtgtaacagatgttagcatatgcaactactagagatagccacatttgcagaatgcttactgtgtactaggcacttttctaactattttatgaggattatctctagtccttacaaccaccctgtgagggaagtccgcttcatatcctcatcttaccagtgtggacactgaagcttagaaaggttagtggcttgcccaaagttccacagctagaaaacgtcaaagcacatatgtgattccagactacgttatggccacacttcttcaactctatcataaccaaggtatctatataagagctctcccctaaagttaattatgtaggaatttaaataaacacacacacacacacagacacacacatttagtgtttagattacccctgaatgattctccattattagaaaatagtgccaaagttttctattattggcttatattatcataaatccaagaaatggtgggtcatagagaagacattgaactaacaggtatttgataacatcaaaggaatttttaaaaacctaagtaactgtactatatccgaatattaaatttttaaagggtagatattaaattatttttaaatgcatgcactactagattatcacaattctggaaggaaacatattattcttccagtatgctatatttttagaggacaatgaagaagcagcattccatggctttgtgaaaacgtgatttcatttgcgtttccttttaattatttttaaaataaattttggcatctgtatttaaagtgtttgaagtattctcttagtatcatccatgtcatcccttcttattctgttgggataaatggcttaatgtggatatcaaattcttcagtgtttttagcatcgactaactgattcaagcaaagtaatgtattgatctatacaaccaggtaatggattattttcgagcatccatgattcctctcatgaaataattgtgttccccacttccaggttgtggtgggattttccaggctcccagtggagagatacattctccaaattaccccagtccttataggagcaacacagactgttcttgggtcattcgggttgacagaaatcatcgtgttctcttgaacttcactgactttgatcttgaatcacaagactcttgtattatggtaagtgacataaatttcaagcattgtctccagtcaaacctcggtcaaaacactgccatataagcatatttagtgaatatattacttatgggtgtttttaatgtcgaatcataggaaaccaaactattggcaacttaaaatataaggacatttattttttacctaaaaacaaatcaggaagtagataatctctaggttttttagcaagtcagtttctgcgctaccattattagcctgttggcttttcattttgttgttacttcatggtcaaaaaatggctgcagtggtttttatctgaatgtcctacctgagtctacctctgaaaaaaggaagaagcaatagtgttaactatttctgttttgtttgtgtttcttttaataaggaaagcaaattttccaaaaaagcccctgatatatcattagccagaactgactacaaaagagatccagaaagtatcgtggaatagatttatcataaatgttttagatcaattattattattaagcatctgggattttcacaggattctgcttctcttgagacaaggatatcttgatttgctacttgaacaaatccatgttctgatagaacaggttgggagatgggagtggaggagaaggaatatggctatgaattggtcagatgacaaaaagagtttctgctactgagatgggaaagtttcctggactcctttacaggacttgcgaagggggtggcttatttgcttggctgcctagctgaattcaggagggagcacacgaatagacgaatgcaggaaccggggtgaacgaaccctagaactggctggtccctcctctctggtggaagcaggctctgtgcacggcccacggcagcgtccaagcttcttacaatgctcttttagctctgccatctcggagagggtgtctgcgaccccaagagccccaaagggcatgtgttgcaatcagtgctcttttagcatttgccgtccatggacagctaagtgttaaccagctcagtggagggtcagggtgacagccttttacaccctgacctcttgggtacccaagttcttgtccagtgtccaggaagaatcaggtcacacgaacaaattgaagggtggtgaatgtggataactttattaagaggtagaagtggctctcagcaggaaggcgagcttgaaagaggttggaggaagtgggttgcaggagtctggccttccttggctgaactcctctctgaccatagtctccgatgtccagctccttcttctcctcttgacgttcagacacttctctcttctgtgtgtgtgtgtgtgtgtgtgtgtgtgtgtgtgtgtgtgtctgctgagtctggggcttggagttcttatgggcaccagatgggcgcagggcaggccaaaaggcaacatttgggtgggaaaacagggatggttctcactttgagtggcagatccaggcttgagggtggagcactcaccagggacctcaacctcttctaccaagcattttcctgccttctggcccatcactactaccaacacttttaatgaattcctacctgaaactaatgctttgcgcttcatataagagtgaatgaagttctattttgaagggtttttttttctttctgtttttaaattttttggctacctaattttcttttattattgttattattattatactttaagttctgggatacatgtgtagaagctgcaggtttgttacataggtatacacgtgccatggtggtttgctgcactcatcaacccgtcatctacataaggtatttctcctaatgctatccctcccttagccccccacccctcgacaggcaccggtgtgtgatgttcccctccctgtgtccatgcgttctcattgttcaactcccacttacgagtgagaatatgcggtgtttggttttttgttcctgtgttagtttgctgataatgatggtttccagcttcatccatgtcccttcaaagtacatgaactcatccttttttatggctacaaagtattccatggtgtataggtgccacattttctttatccagtctatcattgatgcacatttgggttggttccaagtctttgccattgtgaatagtgctgcagtaaacatacgtgtgcatctgtctttatagtagaatgatttataatcctttgggtatatacccagtaatgggattgctgagtcaaatggtatttctggttctagatccttgaggaattgccacattgtcttccacaatggttgaactaatttacactcccaccaacgagtaaaaacgttcctatttctccacatccttgccagcatctgttgtttcctgactttttaataattgccattctaactggcgtgagatggtatctcattgtggttttgatttacatttctctaaggaccagtgatggtgaactttttttttcatatgtttgttggctgcataaatgtcttcttttaagtgtctgttcatatcctttgcccactttttgatgaggttgtttatttttttcttgtaaatttgtttaagtttcttgtagattctggatattagccctttgtcagctggatagattgcaaaaattttctcctattctgtagattgcctgttcactctggtgatagtttcttttgctatgaagaagctctttagtttaattagatgccatttgttaattttggcttttgttaccattgctcttggtgtttaagtcatgaagtctttgcccatgcctatgtcctgaatggtattgcctgggttttcttctagggtttttatgattttaggttttacatttaagtctttaatccatcttgagttaatttttgtataaggtgtaaggaaggggtccaatttcagttttctgcatatggctagccagttttcccaacaccatttattaaatagggaatcctttcctcattgcttgtttttgtcaggtttgttaaagatcagatggttgtagatgtgtggcgttatttctgaggcctttcttctgttccattggtctgtatatctcttttggtaccagtaccatgctgttttggttactgtaggcttgtagtatagtttgaagtcaggtaacgttatgtctccagctttgttctttttgcttaggattgtcttggctgtacaggctcttttttggttccacatgaaatttagagttttttttctaattccgtgaagaaagtcaatggtagcttgatgggtatagcattgaatctataaattactttggacattatggccattttcatgatattaattcttcctatccatgagcgtggaatgtttttccatttgtttgtgtcctctcttatttccttgagcagtggtttataattctccttgaagagatccttcacatcccttgtaagttgtattcctaggtattttattctctttgtagcaattgcgaatggcagttcactcatgatttggctttctgtttggctattactggtgtataggaatgcttgtgatttttgcacattgattttgtgtcctgagactttgctgaagttgcctctgtctcagcttaagaagattttgggctgcgacgatggggttttctaaatatacaatcatgtcatctgcaacagagacaatttgacttcctctctatttgaatatgctttgtttctttctcttgcctgattgctgtgacctgaacttccaatactatgttgaataggagtggttagagagggcacccttgtcttgttccgggctacctgattttctaacaaaaagtttttcatctttcatttgtgtatatcaacatttcattcaaatacaaaccagattctcttggttactggatctttcaatgttagtgtcctgatagtttcctacacaagatccaactggctagcttctttcaaatttaacccaagaaaactcaaaggtttgtttacatttttccaagtagtccattttaatggtatgatttcaatattattttacaagattaggttattaatgaaagttaagtttatttatcactgtatattaaccatccaaatgagtcttcagagtctaagttggctaagcatcatgcagactgaaagcgtagaacatccagctactctcctgacaaagaccatttcgaaattttggatgacatttacaaacatctttctaaaagtagccagtggttcatgaggtagtgtgaagtttctgagtgaatatctgagagaggtgtgagtccagtctttgggaccattttttcctgcagggcctttactgatccacaaaggtttagcagctcttctgagagcctctcaggacaaagaggaccaaagtttgagtccagagctttgttagagtggcagtcttggtaagccattcgtatcttaggtaaaatgaaaggaaaacagccttcactgagactgcattcaatatttgagttacctgagtgaatccccaaaatctgaagccatgaaataatgagagtgaatcttgtatttctcgtgcatctaggcactggacatccagcaaaagcaatttaaaatcttcttcaaagagagatattaacattctagacatcatttctacctataatttttcatgtgtaatagccgattaaataagagagttccctgacctccgttacaggacattcaacaggggtgtgtctcatctgttcaagtgctgcatgttcaaaccccttatgggcagggaaacatgcagacaggggtgcaggagccggggagagtgcttctggactccgggccccatggtagcatctaggggtgggtgcctacaactcccagagccctagtgggcatgctacagtgctcttttagctctgccatcctcagatggcttaagttttaaccagctcagtgtcctcttggtacccatcttcttgtttggtgtccaggaagaatcaggtcacacatggacttgaaggatggtgaatgcaggggttttactggatgatggagacagctcccagtgggatggatggggagctggaaagggggtggaaagggaagatgatcctccccctggagttcactgtcccatggccgatttcttctttgactgaccctggctgaactcctctcaatgttcagatgctccttctcttctctctttctctgctgtactgctcttctgctcctctgctcttctatttatctgctcatctgcttgtctacttttgaagcctgggtttaggggtttatatgaatacaggataagggggtgtggcaggccaaaaggcaaaatttgggtgtggaaacaggaatgcctgttcccatttagggccatgggtttccaggcttgagagtggggcctttgctggggaactgccctcttctacctagtatttccctgtatcctgtgtgtatcaccaacacactatcaaagatagtcatgtacttgaggggacaatataacaaaaatgagatgtaatatgagtaagagacaatagaaacaaatccactaatatgccagatagtaaagttacctggcacacttgctgtacaactgtgattactcaactcatggaaataaaagtcaaactgagaactttcagcaaggaactgcatactatagaaagtgacattgcaatatgaagaagacccaactacaaatttgagaactgataaataccatagctaaaattaacacctcagcagaaggctttttggggggactaggcagagatgaagagataaatagtgactacagagaaacagtgaactggaagataagtcaagaatctactcagaaaaaagtatggataaaaaaaggatgaaaaatatataagagaggttaagacacatagaacacactcagaaaatatataacacacagttaattggagtctcacaaggaaaagagagatatatggaacagaagcaaactttgaagagctactgactaaaatttttccaaaactggtggaagtcatcattaaaaaaatagaatctcaaggaacccaaacagcaaagcaggataaatagaatgacgtacttttctaaaaaaaaaataataataacaaagataaagagaaaatgttacagtcagctagaggagtaggtaggtggggaacagattgcttgttagaaagtagagactaaatgctgacttttcaaccaggattggaagtaaaaaaaatttttttaaagacaatagactgatatattcagattaaagaaaaaaaagtaactaccggccaggaactctatgctctcctaaaattcctttaagaatgaaggtgaggatgtgtatggtagatcacacctgtaatttcagcactttgggagcatgaggcaagaggatcacttgagcccaggagtttgagaccagcctgggcaatgtagtgagaccctgtctctacaaaacagttaaaaaattagccaagcatggtggcacagacctgtaatcccagctacttgggaggctgaggtgaaaggatcacttgagggtggaaggcaggagttgcagtgagcacagatcttgccactgcacttcagcctaggcaacaagcaagaccctgtctgttaaaaaaaaaaaaaaaaaggaataaaggtgaaataaatattgaagcaaaagaagggtcttggcctggcgtggtggctcacaactgtaatcccagcactttgggaggcctaggcaggcagatcatgaagtcaggaggtcgagaccatcctggccaacatggtgaaaccccatctctattaaaaatacaaaaactagctgggtgtggtggtgtgtgcttgtaatcccagcgacttgggaggctgaggcatgagaatcgcttgaacccaggaggtggaggttgcagtgagccaagattgcgccactgcactccagcctggcaacacagcgagactccttctcaaaaaaaaaaaaaaaaaaaaaaaaaagaaggtctttaagagaagtttgaatgggccagagacaaagctacttatagttttgaccatggtgggtattgctctaccccttgtttcctccctcgtctgcatggtgttcttttgtttgatacagtgcagaatccatggaatttaacatacaaagtgtgtcaccaaaccaaagcctaggtcaacagcatgccagcatggctaggattttccctcttgtggtcatgaggagggttttccacctacatgggacataaacacacagacaaggttttctatgaacactgccatatttcagcatgcagctgggcttggcttaacaaagtgcagcaggaggaaacagcaggagtgaaacctcaaatgtgatcgggtcttaggcacggagatggaaaataaactcaaaaacaagtgctgggaggagtttgggctggtaggtaaggcaaaatataaaatgtaataatagtccaaacaagttgtcagaatcagataatgctgtatgaagtacagttgactcttgaacaatgctgggattagggtcattggccccctgcttccctgtcgtgcagtgaaaaatctacatacaactttcaagtcccccaaaacttaactactaatacctatgacggacagaaggcttaccattaacataaacagtcaattaacagatattttatatgttttatatattacatactgtattctttcaacaaagtaagctagagaaaataaaatgctatcaagaaaattgtaaagaagagaaaatatatttactatttattaagtggaagttgatcatcataaaggtcttcatcctcatcatcttcacattgagtgggttggggaggaagagggagggggcgctagtcttgctgtctcaggggtggcagagacggaagaaaatctgtgtttaagtggacccaggcagttcaaacctctgttgttcaagagttaactgtaggccgggcgcggtggctcacgcctgtaatcccagcactttaggaggccgaggcggggggatcacgaggtcaggagatcgagaccatcctggctaacatggtgaaaccccgtctctactaaaaatataaaaagcagccaggcatggcgggaactcgggaggcagagcttgcattgagccaagatcacgccactgcactccagcctgggcgacagagtgagactccctctcaaaaaaaaaaaagagttaattgtagttggaaaatcccagccagtgggcagaagagacattagaagcaaatacctctaagaacccaggcaagacattaaaataagaagtgagccacaccgatagtgtgagtcagcacagtgcttcagctaagaaatctagctctaatatagggtggttctggggctgagcctggactttgtgatattctagctgtgttctttggaagaaagttaacctttcagcttcagtttccttaatggaaatggggataataagaggacctaggtcagatttattgttaggtatttgagataatatagatgacctgcttgctgtcacatagagagttctccacttgtgctagccattatgatgctgctgatggtgagtgttttgggggaggttcatttaatgaggactagaagaagagacagcgcggaatactaggagcagaaatgcacttagaagtcagagtcagacatgcatgcccgtgttcatcgcggcactgtccacaatagcaaaggcatggaatcaacctagatgcccatcaatggtggatgggatgaagaaaacgtgctacgtatacaccagggaatgtgacacagccacaagaatgaacaagaccatgtccttttcagcaacatggatggagctggaggccataatcctaaatgaagtaacacaggaacagaaaactaaatactgcatgttctcactcaggagtgggagctaaacactgagtacatatggacacaaagaagggaacaacaggcgccagggcctacttgaggttggaagctgggaggagggagcaagttgaaaacctacccatcacgttctttgctcattacctgggtgacaaaatagactgtacaccaaacccccatgacaggcaatttacctctatagcaaacctgcacatggacccttgaacctaaggtgaaaggtttttagaaaaagaagtcagggtcaggacttgccgtctgtaattctgggcctcaagctcttaagcagaagagcccactttcgaatcttcctcgtagtatagcacctaggatttagcatatctagggctcagtgctctggaatcattgtgaaaatggccgacatcattcatttgggcctggaagccagggaagcgttcacactggaggcgacatttaagtggcagagtctcgccagtagaaatgcagcagtgaggccacgaggggaggctgcaagggaaggatggggaaatggtgcacgcacatttgggaataaaaaatgagagtgttgtccctggagcgtgaagaaatgctggggagcatgtggagaccaaggggctacagaagacatctgagctctcttctgctccagttaagaatttgaaattatcctataggtagtatggagtcagtgaaaattttctgtaaaacgggaataacatactcagagctgtattctacagtgacaacaggcagcagtgtgtgaagaatggcttggcagagaaaaagaaagatggtagcatgtctgtttgggaagcaatggaaaaagcttggatcagaggtgataaggtctcatagtaggcagtggtcttgggacacatggagagcgcagggacacgtggagaactgtcacggtggcagtcactagaattagaggctaattacatggtggtgggtggggctggtgatagagatggtggggggaagcctatttgcttgaagaatgaatgaatggccgggagtgatggctcatacctgtaattccagcactttgggaggccgagacaggagaattgtttgagctcaggagtttgacaccagcctggaccccatctctgcaaaaaaattaaaaaattagcctggccaagtggcacatacctgtattcccagtaactcaggaggttgaggtgggaggatggcttgagcatgggaggtcgaggctgcggtgagctgtgatcacaccactgtactccagcctgggtgacagcatgaccctgtttcaaaaaaaaaaaaaattgtgaatgatgaggccattaactgagtaaagggagtagatgatagtgagtttgacttgtaaacttttgggtttaaatattatatagtttgacataagagttcagagcttgggataggatctgagctagacatatacaattgaggataatttctgtatattgggtggttattaaagttgtgggagtaggtatgatcacttttaggagtattttaccaagagaaaggggccaagccaactcttggggaaacactgccatgtaacgggtggatgaaagatcagaggagaggaggctgaggaggtgcgctgagtgcttggtggagaaccagaagagagtggtagcattcaaaccacgagggaagctgaatttcaagggtgggtgatcaaaggtatcaaatcccatgcaggatgccaacgagcgtgaggattgcaacaaagcccctggattccgtctttaataacctgcaaggagcaggattgtggcgggtggtggtggaagactcaaggtcacagtggttaggaggtgcaggagcttctgagcttttccccagagttacggaaatgagtggcataaggagaaaatgggcagtaaccaatgggttaaccaaaatcagtggagagttggtttttaaaaaaaaatggagaaatataagttgtgtgaagagggcaggtggaaaaagagcagctgaatgtgagagccaggcgaacagtagagaaaatcatgttttcagcacagagacaccaagaagcgccagattggttctatgaatgttgtattttttagaataagaaattgaaacccatggcttggcacaagatttttctgatttataaattcattatgttaaaaattgcataaattgtatacaaactaagtcattttttcttggatgatttataaatcaactttacaaaaagataaggaagttttaaaagaaaacaagactgtccaggtaagttggggtagagatctgctatatatttgccaaatgtgcccacttaaggggacaggaggtctgcagaggtttggaaccagaccaggcaatgccctggcaaggctggaagcttgttagttagttgtccagggattcatgaaggccggagttgaagcaccagccctctatctttacagccagatggacactggacgggaaacgtaccccaaagtccaacatcttacataatatctctgcagtctcagttcatataaagccaatccttcattttggagacattcaagttaatgtcctgttcctgttgcttagacagagttattagcaaagagaaaaatattcagttgccagtgatgctgtcagataatgttggggttcaggagatttttaatagagttcaagtgtactctttaaataccagtgaaaattatgctggaatgggaccagccatcctgttttttcaaaacttctataacaatttgggttgttagaagaagaaatagtaatttagctgtatgttaaatatgatttcacatatgattaactgtcataaacctatagatacatagaatgttaaggttggaagaagaaagcttagagttcgtttgctgttgtcacctaatttttttaaaaaagacattgaggtggaggtggggcagtgcaaaaaataaaaattaattaaaaaataaaaaagatactgagatccagaaatgtcagggtcaaggctaagtagaaattaacagcaggatcagcactaaaacgaaagccttatgcttcctacgaagtgaataagtattttggtaaaatataaaaattgcagttatgtacaggaaacggaatggcagactagaaaaatagagggagaaaataaacttagggtcaggctggagccactttgattttttttttttttttgagatggagtttcactcttgttgcccaggctggagtgcaaaggcgtgatctcagctcactgcgacctccacctcccaggttcaagcaattctcctgcctcagcctcccaagtagctgggattacaggcatgtgccaccatgcccggctaatattttgtgtttttagtggagatggggtttcaccatgttggccaggctggttttgaacttctgacctcaggtgatccacccgcctcggcctctgattacaggtgtgaatgctgggattataggcgtgagccaccgtgcccagcccactttcacttctatatctgataagcccagccttcatttgtcaatagaaggaaaagtgttaagaattcaaatatgaaatggaaagtgtccttgctttgaagtcaggaggtcagggtttccttcattactttccccttcggtgccaaatatgtaccagacactgccaggcgcttgtttctggacgtgtaccacccctcaccctcttcatggcttggggttcttagtttgcttatttagaaaatcaggtgcctggggaacagaagcagaaagaagaaaactaaggaagaggattcagttaggagttgcatttgtgggtaagaaaaggaggacaagatggcagatgaaatggccactgagggcccagtgacgtcagtggtggtttcatcctcaaagttgaagtcaacctcaggcagccaccaggcttcacatgatctctgggttacaagactatccccatactcttctgggaatacaatagaaagctcttcttagagtaggcctagtccctataggttccaaattgaggcaagctaagcccacatgtaacagccattactcttggtgtcatggaaacaaaggcaaaattcgccaagtagaagaaacaaatgaacatttaaaaatggaacagtagactgggctcagtggctcacgcctgtaatcccagcactttgggatgccaaggcaggcggatcatgaggtctagagattgagaccatcctggccaacatgatgaaaccccgtctctactaaaaatacaaaaattagctgggttttgtggtgcatacctgtagtcccagctactcgggaggctaaggcaggagaatcacttgaaccccggaggcggaggctgcagtgagctgagatcgtgccactgcactccagcctggcaactgagcaagactccatctaaaaaaaaaaaaaatggagcagtaatacacagcctccatcctctttcacagaacccacagcagtagtctttatatcgccaaagcaccaatgtttttgatgcatgaattgttaatagatgcatagctgaataaatgaatttttgtcatctctgctcctgcaatgctcagtgctttggtggaaaatctcagaggacaccatcgggaatgtgctgtactgagttcactccctggcattgttattgatatacaatcttcgtgttgtgagccacatgagcacttagataacatcacagaagtgcgttttctagaattgcatgctgctataatgagaaaagggaaaaactggattttttgacttctgttgaaattgtgatggcatcgagcggagctaatcaggaagctggacttgaaggcaggtttcaacacatttggtaatatatttgcactttctgctcagtcaccttcaagtgtctggtgtaattaaccttgggctctcctcaatgacacatcaggagcatttcttgctaaggaagctgtgggacccatcggctgggcatggccttgtctggtcagcacgcaagtggcttcattacgtttcctttcacgaaggctgagtattaaagtgacctctggctgacagtttaattgcttaattagagcctttcttctaagtcttcgattcatgtagctctgcaagctcttattgatctcctagaaaggctgcttgtagctcagtgtgagagcaggaagaggaaagtccgttcagcagcaccagctggcccctggagattcctgacctctgcttccagcatcctctttgctcagatcattggaatgtctgctttgtgagaatcagcaaggagcagctcaaagcaagccgaccatggtccaggtcctgcctctcatttggaggaaaacacaaacgagggctaacagagcctggtaccaaaaagcaaaagcaaaagcaatatgattagtaacttctgaagctttttgtggctatctaggagaaagaaagaaaagtgtctgatgtgatccggaaaaaaaaaaaattccctgtgctcccacccaaagctgcaatgtctgttgttgttccattattcgacaataaaatgcagggtggaacagggcagatacctaacgcagcatcctcttttgttgtatttttgtaatacaccacccatgatgtgtttccttttaaaacactgatggtttccaaagcagagcaaacagacacaggaataatagaactctgggtttcaaagagatgatggaaacaagtcttctttaaatatttactgttttacaaacaaatccatgacagaaaccagtctctctctctcccctcctcttcctctctccctctcttttcctctctctctctctcttttcctctctctctctccctgtctttctgtccctctttctttccctcttcctcttgctctctctccctctcttcctctttccccctctctctccctctgtctctccttctctctctctccctgtctctccttctctctctctccgtctctccttctctctctctccctctgtctctccttctttctctctccgtctctccttctctctctttctccctccttctcttcttatctttccctttctttgttcttctctctccctctccctttttgtctctttctctctctcctccctgtatctctctctcactctctctttcttccctccctcctttatgccccacgacaggaatttttgtttccatctgatacttgaggatgatctttttcaaacgtttatcttgtgacttgcatttgtattaacatgcttagctactttgcttcctggtgcgggtgtcttattaacaaccaaatgctgagccagtgctttgaatctgcaagatgaaggaagagttgagttgaagccacagctctcaatctgtggacacgggtttggtttggcttggtttccatttcagctcagactctccttaaatgtttatttgtgaaagtaaaacgagcatcttagatttcttctcatgtcaacatttccaggaatctttgagtcagtgctcgcaacaactgcaaatttttagagtttatagtctcttgtaagatgtgaagactgagtgggagagtgtagcacaaagaaataggggtgaacgcatcgtgatatgagatgtggggttgtgaattgaacttagtattgaatttccaaggagcgtaactggaaaaaaatcactgacaaaggaaactgatgcttcctccttcctcagccccaagaaaagatgctataatgagtaatattttcatttccttccgcattcacatttatgactgtaacagcttgtataatttcctgagggatttccctccctatcacttaatgtttcctctattttggagaagttcgtattccaaagtgggaattccattagcagctataccgccatattataacatgtgaaaatacctcatggactctcaatcctcaaaatcactttgcacctccatgtgaattatctctcctgtgccctaaatgtcttattcttcaccacatttttgcaccctgctaagatcaaaggcaatccagggcaggagacctgtgttaccatctggagttaaaaatgtagcaaagcgggactggcacagtggctcatgcctgtaatcccagcactttgaaaggccaaggtgggtggatcatttgaggtcaagagttcaagaccagcctggccaacatggtgagaccctgtctctactaaaaatatgaaatgtagctgggtgtactggtgcatgcctgtaatcccagctactttggaggctgagacatgagaattgcttgaacctgggagacagaggctacagtgagccgagattgcaccactgcactccattctgggcgacagagcgagactctgtctcagaaaaaaaaaaaatgtagtaaagcataagggtccaggtgagaaagaggccacactagaccagagaatggcggttggaccagagaaggacaaggaggagcttcatatctgaatccaggaatagaatcaagtttatgtggcaacgatagaagttgtgggtttatgtattgaccccagacactgcgctctttgttacccattctgctaagtgagccatgctgggaatcccatgcacgttcactggaatggaatgcaggacagatgccaaccacttggaaagccacaggagcccagtacaagactttctcaaatgctactgaggatgcttgattgcaggttcagatgcaaaggatgggggactcccaccctatttccagagctgctgtggttttctttcttggagaccgtgaatatctcacttagcttcacagaatcatggtctctcaacattctaactgaatgaatacaacttgatttcaccttttctctaggtttaatcatacttggtcggacgtcagacagatggggtttgtatattggctctgcactgctaagcgtgtgattgggcaagtcatgtatgttttcagagctcagttttccctgctgcaaagtggaactgttaagaatcaaatgtaaacaaatgtatttaaagtacctatcagtgtctggttcagataagtatttgctgctattcctaatttttctattacaatgactcctgcttctattactattaactctatgttaaagatcttaaggaatcttttaaaaaaattttctccctgagcaagatgaaacttagtaaacaagataaaaaatccagtagaaaaaaattcctcacttcctactttccaacaatctcagggaatatattcctgtttttttttttttttttttagaaataaaaatacagatattactgaggaagctacaattcatttccccctcattcatgaggggtgcaaacgatgactgacatttcagtcaggtggtcacgagccatttaatcaccccagggttttgattacagcagagaggggcagccgctgaagtgctctgcatcacgtccatgtcaatcacgtggtctttagtgcttaggcaaagcatgcgtgattactggtctttatttcgtgcaatttaaaaatgtatgctcagctttactttagtatgtgatgttacattttagaaagcgcacgctgtgcactgagttgttttgagactgaatggaaggaagacacaaatggaaggcaggggaaatttcagggtgttgtagtggcctaggcaagatgtaatgaggccccacaccaagacaccagagagggacatggatgaagtagagggaaggagccaagcgatacatcggacaaacagatgttagaacatgctgatccactacatgtagcagggatgggggcggttccccaaacggtctggccgttgggtacatgcttccggcatttactgtggcaagaaatgtaggtaagggagaaatgagagggacaggaagagggcttcagtttgagacactgattttcggggtttgtggaacatggaagagatgatgtctacgatacagttgtctatacaagcctagggcttaggggagagggctggggcacagttgtagatattaggcaatgaacagatgctttggagatcttaaaacagaagccacgtccattaaacttgatacattcctggcggcagcaagaggctagattaactggcgttagtagccatctggcttgggtactgcagtgctgttatatgaatagtgccctttcatgtctgtatgtaatcacttatgcatccgagtgatgaaacactaaagaacttttaatatagattttatttttaaaccttacatgctcctcatattaaatttgtagaatacagaaaagaagaaataagaaattaatgccatccttagtattacaatatagatacaagctattgaaattttggtttatttccctcacaaacacacacatacaaatatatacacgcactcatgtacacacaaacatgcatagttaagataatattatatataattttgtatcttgcctttttcacttcatattattcgaaattttcttaaatagtttctttggctagtcaatgaaatggacgtgctgtaattcagttagccacggtttattattaaccatttggattattaatgggttttttcttttcttgttataacaatgctatgaggagtatctttatatgtgaatcttagtacatttcctattatttcctttatatagcttttcttttctttattgaacactctactatgaaatattttaagtatgtagagaaataccgactatataatgcatacaaagtatataacatacaaaaacttctccctgtccagactggccaaatcttcatattttgccacatttgcttcaagttcttttgttttctcccaaacagaaatgaactgttcaagacacaggtgaagtcccacgtgctcctatcattgatcccatgccctgttccccgtcccagaggaaactgctaatgagatttctggtttgtgattcccatgaaggtttttatagttttttcattatatgcatatatccatacacactatgaaatattattttgcatattttaagactttatgtacatcatgtcacacgctacatatccttcttcaacttgctctattcactcattattctgtttttcacattttctacattgtaatgcatacagatctaatgcattcttttagtcactacacattctattttatatatgcaccacaagtcatttgcccattctcctgttaatgaacatttaagttgcttgcaatatttttccttagcaactttttgtaccgaatattcttgaagcaatatctgtatgtaaccacctaagactttctctagtgtaaacctgcagaagtggaattgctagcttttaacttttctgtatgttaaatttcgttagaaatttatatatgaggccgggcacagtggctcatgcctgtaatcccagcactttgggaggctgaggtggatggattgcttgaggtcaggagttcgaaaatagcctggccaacatggagaaaacctgtccctactacaaatacaaaaaattagctgggcgtggtggtgtgtacctgtaatcccagctgcttgggaggctgaggcaggagaatcacttgaacctggaaggcagaggttgcagtgagcaccactgcactccaacctgggtgacagagtgagactctgtctcaaaaaaaaaaaaaaaaaaaaaagaaaagaaaagaaaaaagaaatgtatatatgagaatttctggaacgaaatgagaaaaacttaccttcatacttgtaatcagtttccacaaaactttcaatacattgtcttatttgatctttacaataaccttatgaggctgcaaggggagtttacctaccctcatttttagatgaggtctctgaggtggttactgcaaagagcagtacagcatgtgacttgaatacagcactggacagcctcattcttcggaagcctttgttcttcattccacacccgcagacttaccccagaacttaccagcttaagacaacaacatttacagtttccgtgggtcaggaagccaggtgccactcacctgcgtgcttcctggctcactcatgtgaatgtacacagggttcagttccttgcaggctgttggctgaggcctcccttgactccctgccacacaggcctcgccacggagtatctcagaacatggcaccttgctcaccagggcaagcaatagagaggacaagagagagtccaacaagacagaaagtgctagcaagagggcaggaaccatcttttctcacctcattatggaggtgacagactatcacttccattgtattctgttaattagaacaaatcacgaggtctatcccatacgccagggaggagattacacagaggcatgaataccaggacgtggggctcactgagagctgggtcagaagttgcctaccaccccccacccctacaatctccagttggaaaattttcatttcttatctctcccactcctacctacccatatttctggacaacccccaccccaccccttggttctcttttcttttttgcctccatagctttctaattccctacttcatttcttacacagcaatttagctcccactttgtctcactttgatactagaggctaacatctatcacatgcttactacatgccagccactctcctaagtattgtatcttttaacttattcttgtgaacagtatgagctatatattcatattaatccaattttgcagattaagaaatttagcaacagatgagaaagcaaagagaagggggcaacttgtccccaacaacataaaataacacctcccctactatactcatgttctgagagcctatgaagatattttcgtcaataaagattgcttttccggccgggcgccgtggctcacgcctgtaatcccagcactttgggaggctgaggcgggcggatcacgaggtcaggagatggagaccatcctggctaacacggtgaaaccttgtctctactgaaaatacaaaaaaattagccgggcgcggtggtgggcgcctgtagtcctagctactcaggaggctgaggcaggagaatggcgtgaacccgggaggcggaggttgcagtgagtcgagatcgcgccactgcactccagcctgggccacagagcgagactccgtctcaaaaaaaaaaaaaaaaaaaaaaagggattgcttttccctctaaaaggaatcctgccaccaacttttaaataatgcaacatgcttttaaataatgcttatttataggacaaaggtgtgtatgagaattaaaaagttccctttgcttggcttctttattttcccacattaccgttctttagaactatgatcacaggcctccagaactagaaatgccaccaggaagggatgttggtctcacacttgaatggttttcctcctgtgtcacttgacatgtgacaaagttgaacacatgttaactttagaaatgatggacatttatgcaaatctcctcaaggtatcgaagcatcaggtatgaaaattaaggccgggcactgtggctcatgcctataatcccagcactttgggaggctgaggtggcaggatcgcttgagccaggagttccacactaggcaatacagcaaaatcccctctctacaaaacatttaaaaattagccaagtgtggtggtgcacacctgtagtcccagctatttgggaggctgaggtgggaggatcccttgagcccaggaggtcaaggctgcagtgagctgtcacaccactgtatgccagcctgggtgacagggtaagaccctgactacaaaaataacaattataatactaattaaaagaaatttcataaatgtttggcttagttctcacttctggctagagctgaggatgtggaggggacttgatagcaccataatatatcatgtgttcagaatactctgggccttggggacgggtccaatgtcctctgcccacattctgcctctgccttctctcaccctgttggtgaagggcccctgggagcggagtgcatgacattggctgtgccctgtggttgggccccttcattctccttcagacctggcatataggaagcctgcccagaaagcagccgagctgacctccgtccccctgtgactaacctcttacccacaattgtgtctactatgtgtttacagcattgaatctatgagggcaaggacagctgtttcttaactcagggttttcctcaaccctagttctcaatttttagagaccagcaactgtcatacatattcatttattcatttgttcatcaaacatttattgcctgtatgtgccaggttctgtactttttaaaaagtctcctatttttatataataaagttaagctttttgtttttgtgggggttttttgtttgttttgttttgagatggagtcttattctgtcacccaggctggagtacagtggcaccatctccactcattgtagcctctgcctcctgggttcaagcaattctcgtgcctcagcctcccaggtagctgggattacaggcacacgtcactacgcctggctaatttttgtatttttaatagagatggggtttcaccatgttggccagactggtctcaaactcctgacctcaggtgatccacctgcctcggtctcccaaagtgctgggattacaggcgtgagccactgcacccggcctcatatgtattttgaatatgtgtgttagtatcttggcattttataaaattctggatattttacaaaaagactggtcaacttttctgtagaaattaaatgaccactccattagatctgcctctgttttaagagcttcggcagttagaattctctgggggacagtggccactttttattttgtggcttcaacttcaaatttttattttattactatcatctagaaatgaattagttgacatgtacaaagttttattttgtttgtatattgccctgacttttaccacttaagtaacgatcagaaaatcaatgctgaggcctagcaaactcttggcagtagacttaagtaagaattatatgttatattaatatatgtgtatccaatagtaatatcatttgctagctttgccttgggaactaaatggaagttaaggtgaaattcatatcgataatttttatgactttagaattgtaaatgaatgggagcaaggtttctcatattttcttccttgaagtgcttttcttgtggaattttataaattgaaactttaaatgtgagttgttttttgtctttttttttttttgagacggagttttgctcttgttgcccaggctggagtgcagtggcactatctcagctcaccacaacctctgcctcctgggttcaagtgattctcctgcctcagcctcctgagtagctgggattacaggcatgtgccactacatctggctaattttgtatttttagtagagatggagcttctccatgctggtcaggctggtcttgaactcccgacttcaggtgatctgcccacctcagcttcccaaagtctgggattacaggcgtgaaccaccacacgaagcctgagaataatgatttgatattataagtgttaaaaacactcaaatgaaagaatttatatttcaaaatctgttaaaaatattctccctccttgatagcctgaggtttcaaaatttcataaaatgacaattaggtacataaaacttaataactataatgctacggtttgaatgtgtcccctccaagttcatgtgctggaagcttaatacctcctctagtgtcaggaggtatggcctttgggtggtgttcaggtactgaaagccttgccatcatgaatggattaatgttgctataaaaagggcttgcaacaacaggttctctctcttctgcacttctgccacttggtgacatgatgttcctccccacaagaggatgcaccattcaaggtaccaccttgaagcagagagacccggctgtaacttgctggcagcttgttcttggacttcccagccttctgaactgttagaaataaatttctgctctttataaatcacctggcctcaggtattctatggtatcacaaagaagcagactgaggtgtgtcatgagcattttaaagagaagtaacatggtaaatctagaatttggagagagaagacgctgctactcactagtgatgtgaacttggatgacttactagcctacattgaatgagacagtagtttaatagcttagcacttgcctccctgtctttatttttatagaaaatcacacaggttaggatgtttgtgatggagcttgtaaaattataacatgctcatcacatttggggtgtcattggtatataatttgaattccgggacacatgaaaaccttctttttattgagatggagtctcactctgtcacccatgatggagtgcagtggtgcaatcgcagctcactgcaacctctgcctcctgggttgaagcaaatctcatgcctcagcctcctgagtagctgggattacaggtgcccaccaccatgcctggctaattgttttttgtatttttagtagagacatggttttgtcatgttggccaggctggtcttgagaaaaccttctatttttgatccattccttgtgaagtattacttcagccagatgaattttagcagaggtcttgtaattccaggacctcaggggctgggggtaggggaaatagctgggaagtctgtaaagcttctaggtgtgcccctttcaaaggacccccaaggaaatgggtgattcgggtgattttctgaagatttcagccttaatattttagtttacttttgttccccttatttcctcttgtcccttgagaggattccaaccactcagactgaaaacaaggactgtgagagggaagaaacaatatgtacttattccttggacctttgaatttcggagaaaatttttttaaaaccagaagagtcttattttgtgagtccatggacttgcaaaatcttagagttttttcttttttttttttttgagaagtctataaacaccatagaacccattgttccactagtttaaaaaattaagaaatgctagacacttaggttgattccatattttggctattgtgactagtgcttcagttaacaaggaaatgcagatatattcaacatacttatttaatttcctttgtctgcttatcccaggagtgagactgttggatcatatggtagctctatttttgattttttgagaaatgtccatactgtttttcataatggctgtatcaatttacattcccatcaatagtgtgtaaaggttcccttttccccacatccacaccagcccttattattttctaattgggattaagtggtatttcactgtggctttgatttggatttcactggtgattagtgatgttgagcattttttcatttacctgttggtcatttgtatgtcttctcttgaagacaaaaagacttatcaatggatgaatggatttttaaaatgtgatatatataaacaatgggatggtacttagcaatagaaatgaacacaatcctgtcatttgtggcatcatggatgagcctgaaggactttatgttcatggaaataagccaggcacagaaagataaatattgcatgatgtcactcatttgtggagtgtaaaaatgctgatctcgcacaagtacagggtagaatagtggttaccagaggctggggacggtagcagggaggaaattatggggagatatttgtcaaagggtatacaattacagttaggtaagaggaataagttctgatgttctataacacagtagggcacccacagtaaacaatattctggtttataaatattatagtgtgttaaaagtaactagaagagaggattcttaatggtctcaccacaaataaatgataaatgtttgaattgatggacatgctgaataccatgatttgataattacacaatgtatatgtgtattgaaacatcacactatccctcatacatgtgttcaattattatgcatcacttaaaaccaaaataaaaaataaatataaactgtatatattcataaaattgaatcttaaacttttataaaaatgaaaaaatgctattctaaacaaataaatgaataaattatcttgagagaagtaaatagtctgtgccttaagattcaattggtgtattctccatactctgtaaccacagatgttctaagaaggtattcattatcctttgatattaaaactaagacagtattaatagaatattactacaagcttaggacactgtatctataaccttaggacagcataaaaccaagtatagagataataaagacttgaattaaaccaatggtggtgatatttgagagtagactcaagtatgaatgtagtaagaggttttgtagtgatggtttaaatgtcattttgtctactgtttacagtgttcaacgtgttcaaaggaaggattcatactagattggaaattataatttgaattggttagaaaaatggaatttagtttttaatcaatctttgttgaatgaaaatcagtcatcaggtttcatttattggagatatatatatatatatttaaattttgaacattaaataataaaaaagaaaagatttgctgctccagaacagacccacatttgttttaaacttattattgtaagagctttagctcctcagaaagttaaaaatcctattgatatttgattcatgggcttgtataagccaaactgagaatatcctgccaatcatacctgtggctaaagagaacatgcagaatcatacctgtgtgctaaacagaacactgattataatcatcaccagatttttaaagtcacttgcgagtaacttccttacattgaatctccgaactttctatttttttccccaagattttcttatgaaatataaatggcaatttgtttttaatgaaatggccatattttaccttcatactttcagtcacattctaatggttggcaggttgatgcatgcgtcctgctcagttgataccttgcagtgaacaagaggaaagggtttcaattctggactctggaatctagtggtctgattcaacgtgacctgctccctcttaggaattgtgtgacttgggcccattacttaggctctctgtgcctctgttgtcctgttcttaaaaacagaaagaaatttgggaggataaaatgggacagtgtacgtgaagggctgaatccagttcctggcacatagtaagcactaatgaatgggagttattattaatcatccaagcaaaggaactcatttcccccctgatttacacataagagtattcaaaaattcatccagacactgagttccaagcaaattagtaagcttcaaattttacaaatcaatacagagatttcaggtatatgtgacatagattccatttcattacatgcctggagggtcagctaggtcccagcatggcactaggcaagacagagaccaacagttaaaaagagagaggtaattttcttttccttttttttttttttttttttttttttttgagacagaatctcgctctctgttgcccaggctggagtgcagtggtgggatctcagctcactgcaacctccgcctcccaggttcaagcaattctcctgcctcagcctcctgagtagctttgactacaggtgcacaccaccacacctggctaatttgtgtattttttattagagacgggggtctcgccatgttggccaggctggtcttgaactcctgacctcaggtgatccacccgcctcagcctcccaaagtgctgggattgtagatgtgagccaccatgcacgggcaaaaagagagagaggtagttttctaaatcagccttatatcacccctatcgtttgaaaagaattctgccatttctcttctcttgagcattaccctatcacgaaacttatgaagaacaaacaggtccaacaaatgttgggattctgacaacaaatgctcatcactcatcattatttctcgtctgttttctcatgtgtctattcttgcattacacatttccagcacatgttgtgggcatggcctgtgaggtgactacactggggttgggaaggaaggggagtgtggaagggacggcatttatgaagatatcaagaaatctaatagtggctctgacagaggaagtcctgctgaaattcacgtcagcatccctagaaatgaccaaagacttgttacagctgtgagaaaggacaataaagccagtttccctagatccagcaaacgtgtgattatccactagtatatcggcgtgcagacagttcgtggaatacaggccttctagatgtgaatctgaaccactgtttgccctgtctcctttcttgtaggcatacgatggcttaagctccacaatgtcccgccttgccaggacgtgtggaagggagcagctggctaaccccatcgtctcctcaggaaacagcctcttcttgagatttcagtctggcccttccagacagaacagaggcttccgagctcaattcaggcaaggcaagtaccctgtggatcttcccaggcacaagagaaatcttcagtgctctgtttggtgcaacagtgaaatgagacctgtgctcagaaattgatcacagccttctacttaacatgtaaaaaattaaatagaacaaaagaactgtgacttacaattatcccaactcctgatgcttgtaaccttctccttctctgacttcctttggacccgcatctctaacaagtttaaaagtgcttttaagactagaaacagtataaaaaagttttatccaaattcactgatctagcactacccaaggctttacactagaatgggatacactgctatcaattacaagacttgcttgtaatgtattcagatgccagcccctggaagcagtggtttccctcatttctgaatcctgccattgtccaactgaggagtcactgttgttttccatttatttttctttctttgttccctcccttcctcccctcttcttccccttcctctcctccccttccttttcctcatctctctttccctccccttccctttctttccacagggtctctctctgtcacccaggctggagtgcagtggtgcaatcacggctcactgaagcctcgacctcccaggctcaggcaatcctcccacctcagcctcctgagtagctgggactataggtgcacccccacgcctggctattttttttcttttttagagatgggatctgctctgttgcccgggctggtctcaaactcctggcctcaagtgattctcctgtcttagcctcccaccatacctggccatttttgttcttaaatcaccacttctccaagacctttttacccattgcctttcatctgctcgttctaagagatgaaccccttatcccatagtcagagatgacttgtattcagatgactcagaacattcactacaaatacatttagtctgtgtagtcattatgtctatcttagtcaactcgcttatattctgtagtaaagagctctggatggggacagtgcctggatcgaggtctcccaaatacgcaccatagacctttagactttggagcaagacagactatattcttgttgattttaaagaaaaactagtttcctaatagttcttttgcatgttattattcacttgtttgttgcttcatagtaaaaagtccctgctagctttcatccggactgtaacaacctcctgaaagtcacctacccttaccccatctctctccaaagtcgcctgtaaaagccctgctctgatcatgccattggaatgctcaatgtctgtcccgtctccacctggcctggagaataaagctcaagctcctgcagatgttaaccaagagccccagaacccaccctgacctctctccagcgtcagtcacccacatccctggggcaccccatgctccagctgagcctctatagatgctcctctgtgtctgctcaggcagtcccctccctggcctcccttttctcaccctccaagtcctagtttagcctcggcctcctcctcagcaagactcctcttacgccctccagcggtgaccgcctctccctcttcaagactcacatcgaattttgctcttctctagtaatctacagtcatccttatgaagccttattcaattgagtatttattttcctgaaaaaaagaggtcatttataagcagattatccctatgcctatgatttatgagtgggcagtgtaagtgaatccatgcaagaattttgtttgaatgacttaggcaattcatagacatttaatctgttgctttttgccacttcctacttcctgtagttgaagaataattgttaaaaatataaactgtgctcctgttttctcatggtttatgtacagctctccttatggagaactttcttggcgtgcattttagaaataagaagaaaaatcattgatggttttattcatcaaataattgttttgtacggtcagtagaaatgaaaagcatatgacatgtatgtgtgtttgtgtgttccccagcctgcggaggccacatcctcaccagctcatttgatactgtttcctctccacggttccctgccaattatccaaacaatcagaactgcagctggatcattcaagcgcaacctccatgtaagtaacaaaaatgaaaaagaaaaggcacacaggagagaaggtgtctgtgggaaggtcagtctatgagtaaccttcttatctcagtgctaacaatcgatggccttcctcttcatcttttgcaagtcccaattcctgatgtgcttaagaacaagcatttcctaatctgatagggaagtcatttctacagttgcttctaaatttaaaaacaatttcttttttttcatgtcaaggcctagcaaaggttaaaaaacacacacacgcacaacaacacaacacacctacaaccttgctgtattaacaggcgtatgcaggcgtatgagattgggggtaaaccaaaataatcgataaatagtttttgacatgtgtgccttgagtatagctgatgttcaagacagttgctgagtgaacaaatgaagaagagtcacagactggagaatcagtgactcacgggccagaatgcaatgcgcgcacctatccatcaaagcaaacattcataaaacctgggctctcctgcaaggtactattccagcacaggcctagaagaaacattgaataaacgcttactttcttttcttttttggaaccctagaatcttattttctgacctggtaacagtccgatggtaaggacttctgtcctcattttacagacagagaacatcaggaaatgcccctcaaggacatgacagaatggctgcaaagcgggtgatgctggggcccttctgaatcctgtttcagaggagccctgccctcctttgaggtttgcaggaaaatacagtttcaggcataatgtaggaaagtctttaagttcttcactctgcacagtaattaatcgcctgtgtgaaaatagggaagtcacttaagctaatcaggccatgaaaaagtaatctgcaaaatgaagagtttggcttaaatattctctagcactttcccctgggatgtcaggagttaacaaattgctagtatcttcattgacatgcataagatgtggcagccgatgatgtcatccttagccaattcaaacggggaggtggagccccaaagaaagttgccagccagccagaaactgagctgtagataaagaagccccctcccttgaactgagaagtttgtgcctgaggattattttctaatgagttgtaaagcatttagatgaaagatctcactggttcaagaacagcaataggaaaagatcctattctgaagattagggagcttaaagaacaacaaaaagaaaatgtatccaggtgcttgctgttctgcaagtaattcaaaactttcttgataaatgtctctgaaccttagggcactagctctagcctgaaaataaaactgagtgagctaaaatgtgggctccagggagaaaagaatgccttatttacaagcacatgcaaagaatccgaatttaaggaaatgagtctattgagaaaaatgcttctgcgaggaacacagcaatggtgatataaaaactggaaagacggcattttccaacaagatattcccttatagtgcctggaatgaacctacccaggagtcctcttatttaccactgccagtgtttcagatgccacaggcagtttcaaaagcatctattccgttactcttcaaaggaaaccatctattctattactcttcaaaggaaaccatctaggatagaagttgtccccttcccttgctttatcccttcaaccatgtgcaaatccgcctcattcattacttctctgctggagaacccttacatgaaattaccagaagtaaaatttatctccctgtatgttttttaattttaattttattttgtaaaaaaattttattgttaatttttgtgggtacatagtagatgtatatatgtatggggtacatgagatgttttgatacaggcatgcaatgtgaaataatcccatcatggaaatggggtatccatcccttcaagcatttatcctttgtgttacaaataatccaattctactcttttaattatttttaaatgtacaataagttattatcgactacaattaccctgttgtgctatcaaacaggtcttactcattccttctattttttatagtcattaaccatccccacctccccgtcttgccccatctccctgtatgttttatttgccagtactttacgagagagtcttctcttttttcttccagtaaatcatatcaccctctcttttacccactttgaacttgaaagaagcacaacgtgtgcacgtgactttgtagaaattttggatggcggccacgaagacgcgcccctccgaggtacctcagcgttcactcatctacatctgtggtcttggctgtgctttatttatagatccgcatatttataggctgccattctaggttgcaatgtttccaataaatagaaagagcagcctaagccaaataaagatgattagagggtaagaaagcaggcttgaatgtggggttcagggaactcagcctgtttattaatatattcaaacgtgtgaatagtttgtgtatatgttttaaaacatttaaaaattgcagctgctttaaagaatagtggaatgcaacccatcccagcattaggtagcattctatcagaaatttcttgttaatatttgaccaagttcttacattcacatggagtatgtttctttcagccttgtccttagtggaagcgaaaaaaaaagcacttaattagataattaattaattaattccattaaaaatctgtctttttgtttgttagacatcccaataaaattaaagagtgccgctatctagtttctgaaatgctctcaggcaaaacaaacaaacacacacacactacacacacacacacacacacacacacacaccaggccatttaagctttctccgtaaatttcctaacttttgaattttgttgtaaaaacttctcatcctgcactagaagacaaggtctgtcagagaggagactgtttggcctgttgcctaattcccagtgcccaggacagtgtctgagacaatagtgaacaatcaatgaactctccacaccctatgcacacctctcacagcatttgttagtaagcatttgaccaaggataagggtatattatttaacaagctgttacatagcaataccttgcgctgagtactgttctcagtatgttataaatagtaggtcaatccttgtaatcttatgagataggtttcattattttcaatatgcccctttttccaagtgaggaaactgaggcaccaagcacgtaagtcacttgcctaggatcacacaactagcaaatggctgagccaggggctgaatccaggtagcctggctccagcatccacacttttctgtgctacaaaatagtggatattagtgcatttatttgtatgggtccgactgggctggagatttttgctttaggtacatgtgtcccttggtcatctaagtttttcctctggtcctattgttcttgatcatgtttataaatcacctctcctatatatagctcctatatatagtttattttaaatcatcaggtattgtctcaaacattgaccctgaatgaagtggttctcctagtggcaatttcttcactttgttttggtctcttgtaattcgagtaaagatgtgtttcctagaaacagcggtctctgccatgttgtcattcattctccttgtcattatcttcattatttaggccgttactgtggcaccgacatgccccatcctatcacatccttcagcagcgccctgacgctgagattcgtctctgattctagcatcagtgctgggggtttccacaccacggtcaccgcatcagtgtcgggtaagaaaccctagcacctgactctagcggttaaaagggatgtggtagaaattcttggtttgttattggggactctgaccttcgtagttgggagccagtttcctgagatcacctctgggccaaatcttaccttcttcccaattaagtgatcgtgttgtcaattctagcaataatgaactctggaagtgtggaggattggttggaaatgtagctgtcttttcagctacatgccatgctatcagatgacttggtgttcttttgttgtttttgagatggagtctcacttggtcgcccaggttggagtgcaatggcacggtcttggctcactgcaacctctgcctccccaattcaagcgattctcctgcctcagcctcctgagtagctgggattacaggcacttgccaccacacctggctaatttttgtatttttagtagagacgaggtttcactatgttggccagactggtctcaaactcctgacctcgtgatccaccagcctcggcctcccaaagtggtgggattacaggtgtgagccacctcgctcaccctggtgttctttttggcttgtttgttaaggcagccctaacctggggaggagaggaacgaggagctacccaggactgggtttcttagcctcttagcccagagagtgctgttggtcactgccatcttccttgtttttagtggttaaaagctacagaacacctagaagattggtgtgtgcatttcggtgctctactgagagggaaagcaagcatgctgcgttgggttctaggccagggttgaatagaatcctggtcacaaaagccaagtggctgtaggatggtaaacaagtcttttattcttcaaagttaccgttcacaggaagaaacggctttgagaaaagacattgcagaaattccttctaatccaccacactgcatggcccttggtcttcagtttgcagaattgttcccttattttatatgacatgaatgttttaaaatgtgagatggaaatactatctattcttttacattgataatggctctagcgttctttctcctttattttatagtgtctgatgcagtctttgctctgatactcactttatttctattttcttccagcttgtggtggaacgttctacatggctgaaggcatcttcaacagccctggctacccagacatttatccccctaatgtggaatgtgtctggaacatcgtcagttcccctggcaaccggctccagctgtcttttatgtaaatccttttttatggtgtattgtttcagtgctaatgaatctgtaggaaagaagttctggtgctaataggatgggcaactcatagtgtacgtgaaatttaggaagtatttttccaaatttcctctgtttcagtcatagtttgagttataaatagcatgaagtttctctcgaccatggttcttgggtcctgtctaacatttccaaaagtacattcttgagtccttggtgaatgaatgaatctgtggcgcattcatgttcagagtacaggaatcttatctttttttttggaattagacacattaaggttcttccagggaatcactagtattgtttattccagcagagccctcccatctcaattaagcattctttacgcttttatcttatccctacctcaatccacctttccttctatttctgtcagaagaatggttctggggctgggtgtagtggctcatgcctgtaatcccgcactttgggaggccaaggcgggtggatcacttgagatcaagagttcgagaccagcccggccaacatgacgaaaccccgtctctactaaaaatacaaaaattagccaggagtggtggcgggcacctgtaatcccagctgcttgggaggctgaggcaggagaatgccctgaacctgggaggtggaggttgtggtgcactgagattgagccactgcactccagcttgggcaacagagtgagactccatcttaaaaaaaaaaaaaaaaaaaaaaaggaatggttttggaagtttttttaacttccaaacttaaacttacttaaactttaaacttaattttttagaacactttcatattcctcattgcactataacactttttgaaatggactataaatatggaattagtagtaggatcctatcacattctgagtggtcttagattaaattagacagcaacaataatatgtcctagagtagatgtaaaaagcacacattttaatcaactgatagagaggtatatgtgacacgtcacactgataatggatgcttattatatattgagagataagatcctggaatttaaattgccgttttgaattgaaatttatttaccagtctattttacatattactaggctgtggttgggattgctaattctgttttgaagcgaatataagtaacttatggttgagagaagaggattgttttgaggaccctgtcctgtttatttaaaagtcttacttttcttccaagacttgctaatctgtgcatcaggaactgattaaaaatatgggacaactatcctatttgtggaccaagttcaaacatctcaagttgctttttttaatccatcaatcagacagagcctcttcagggtataagtggccttgtgttaaaacaaagacaccctctgcatgccgaaaggcaatgcaagtttaagctgcctcacaggaaggaggttttggtttgtctttttttttttttttttttttttggagacacagtctggctctgttgcccaggctggagtgcaatggagtgacctcagctcactgaaacgtcgcctccggggtttaagctattctcctgcctcagcctcctgagtagctaggattacaggcacatgccaccatcccaggctagtttttatatttttagtagtgatggagtttcaccatgttggccaagctggtctcgaactcccaacttcaagtaattcacccaccttggcctcccaaagtgctgggattacaggcatgagccaccgtgcctggcctggtttgtctttgtcttcactaagagcacagcgttctggatgggaagaaatctatatactttataatgtttaccagacatatatttattctttcactcaacagatatttattaagctcctaatatgtgctaggcatgtagttggcacatgctactctcctatgaggtgccttctatatattgatcaataaaacaccatcattgtccttagaataaaatccaaagcccttcgcacagctttagtaggcctatcagaattgccaaataaaatgatttttttttttggtcttttcctgtttgtctctaccacattcacattgttgactgctctcattcagtggttgccaggaactgagctaggtgttcaagacagataagatttcaggtcttgacaaattactcataagccaacattaagaagctatttaattaaattcattttatttctgtgggataataataacaagtttctataaacaaatttatagtaatttcaaatttctaggactgtgaaggttaaagaagatgtcaaatttaaaacgcataccacacagctagtgcatagcaaatgtttggtgacttaattctctcaatctttaccatttctgaagtatcttctgtgatagctcacaaataaatccaaacgggcagcactaggctctccttccagaggatgggagattacacacacagaaagcaagtttcatctatttcagtgcttaatagacattacattttaattaccatatagaacatcgtaatgactcagctatttcctttctcgcctgtaagaagttaattttgattcctctgagttacttgcttgagttttatttttaaaatggacgttttaggctgcaagatgcctctttttttgcagttgattaatgagaaggcaaggcctgtgagttatttctgccctggtctaaattctatccagatggatgcttggaaacattaccctggggtgtgtgagagcgtatgagaagcatgtgtatcacatcaagttctaaaacatggggctgggattgtggtgaaactgagtagggaagaagactggagaaattatggttgaatctgcaacaaaaaggaacggggagaaataaaacctaaaaaggagttttttgtaagacatatatttaaccatttattacccataatatgaccaaaaatgtgaatatggtaaattgttttcttctgcttctcagaaagcagaaagggaagaaagggagatcattttcctcagaaggtaaattacatgcagttgtctctaaaatctttctattcaaagtgcagtgcaatctttctgaccagttacttcacccctgcggtttggtgggcagggaattgacagaaattgtattttatacttgcagagtgcttttagaaagtgataggtctcagttcaagaatcagaatgagataataagaaacagtgattgtactatttttgttccacatcctacatttactaacagatctaagccaaagggtgtagttgcttataaaatgtaccagcctaaagcaaagacttccaagcataataaagctttttttatagtttaatttaatccttctaggtatttgcctaccaccatgtccaacggaatgtcttttctgccatctagcactggattgcagtagtcaagtacttagaaaagaccttcactttgtaatcttctggagcatcggacagaatgctaatgtgcatgttgatcatctaggatcttgctgaaattcactttctcactgagttggttggtggggccagattccttgtttcaaacaagctctccggtgatgccgatgttgctggattatgcactttgcatagaaagattttagaggcaacttcgtgtaatttacgttctgaggaaaatgatctccctttcttccctttctgctttctgagaagcagaagaaaacaattttgcgtatttcacattgttgatcatattatgagtaataaaattgagcctgaatgtatacacaaaagttggcagccatcccaaagatggatttagaccaattccttgcaaaataaaaaaaagattgaagatagaaatattgtgttataaatcatcagattgtcaaaggagacaaatatgtggtttgttttgtctgatgtggatatatcctgatttcaattatcagttatagcttgctgtgaaaattccatctagtctagtccagatggtctatactgtagtgacccaccttggtgggattctgagagccaccagcttaccaccaggcttactgatttggttagagacctaccaatgctagtatctggcttgagagctaggttagagcagagctgaccagttacttcacccctgtggtctggtaggcagggagtgaccagagatgtgcctggtatattgattagtggtagggcttgaggtggtcagagcctccaggctggttatctctaactattctcctccattagctgagatagagccccaggggagcactatacttagcataaagtaaaatcttgccatggataatgttgagcattaacagaaagatacacatgacagagaagtacatttttcctttcctttccccttccccttccccttgccttccgttcccctcccttcccttcccttcctttcccttccccttccccttcccccttcccttccttttcccttcccttcccttccttttcccttcccttcccttccctttttcctttaccctttcccctttcctgtttgttcatgctttcatttcattggggtataaacctagaagtgaaattgctggttcatatgataatactatgtttaactttttgaggaaccaccaaacttttttatagggatggactattttacattcccgttagtaatgcgtaagagttctaatttctccatatcctcatcagcacttcttattttctatttttaaataatagtcttcctggtggtttgtagtgttatctctttgtggttttgatttgcatttctctaatgactaataatgtttgaaaatcttttcatgtttttattggccattcataaatcttctttggagaaatgtgtattcggtttgttttccattttaattgggttatttgtttttaattttcgagttgcaggagttattttatattcaggatactaccttggtcatgtgtttttattttctttgggtatatatttaggggtggaatttctgggcattaattggatgtacatttaattttatgagaaactcccaaataattattcaaagtggctatgtcagtatgcagtcccacgaggaatatataagacttcagttgctttgcacgcttgtcaacaattgatcttgtcagccttttaattttagcccttatgatgggtgtggaatgatatctgactgtggtatttaagttgcattgctctgatgactaatcatgcagagtacttttcacattcttggtagccattttcttgtcttcttttatgaatatctgttcaagccctttgtccacttttaatttggttgttttttcattatctgtaggaattccttttatatttcaactttgagtcccttgctagataaatgctttacgattatctcccatttccccaccccggtctgtaacttgccttttcatttttttaaatatatatatattttctggacagagtctcactctgttgcataggctggagtgagtggcacgatcacccctcacttcagcctctatctcccaggcttaagccatcttcctgcctcagcctcccaagtagctgggattataggcacaggccaccacacatagctacattttattttttgtagagagggggtttcactgtgttgctcaggctggtctcaaactcctgggttcaagtgatcctcccacctcagcctcccaaagtgctgagattatggttgtgagctaccacacgcagcctattcattttcttattcatgtctttaatgaaatgtttatttatgaattcaaatttattaattttttatcttgtggttagtgctttttgcattctatgtaagaaatatttgcccatcccaaggtcacaaagatttttctccgtgttttcttctaggatctttatgtttctagcctttatatttacatccttgagaaatattaagttagtttctgtgtacgaagataggcagaggtagaggttctttttttcctctctctccataaggatatccgttattgcatcaccatttgttaaaatgagttttccccttgatttgtcttggcaccatggattgaattggattgacagtgtatttgtgggtccccttctggaaattctttcctattccattcatccatttgtctacccttacaccaataccactttatcttgagtagctcatgtttttaagcagtaaggccaagttttgaaagtactcaactagcacctacatgttccagactctttagatatgttacctatgaacatcatatgaggtagatactatttcctatcctcgactccccaacacatcgtagttgcagaatataagacaagttgaataggtcacattcaagcaccagcgggtgttgttacaaatcccataattttgctgcctctccagaaattaagtacatacacctttgcagcgcatttaagtgccacctaaatgatcccatcatattgccccagttacatgttttaatggtttctttttttttattatttaccttcagccaacccacaccatgtcttagaggtactcagtgttttaaacaaaccaggtatctcgtggttttctgaatatgtcccgcccttctctgcacatgtgccttggtggcatgcttctttgcccaccatctatagtgcttacatccagctcacatgtatatttccatctcaaaaagtcttcccatcaagctattgcagagcaccacaatcaaatatgatgcctctgctttgcaattcttaaacgccactttataactctgatggcactcacactattctgccttatatattttttttctgtattctcgtccagttttgcccactaggaagaaaactccttgatggaagtgtattcgtcgtctttgtagctattggatacacatttcaacaagtccgagtgaaagaaattttttgagacagccaaataatgttgtgatcaaagttaaagaaagtttaaaaaagtgaacgggttaacctagcatgtgatccgggagaatcccaaagtctattctctcaatttaatccctttaaatatttttttccccaaatcagatctttccagttggaagactctcaggactgcagcagagattttgtggagatccgtgaaggaaatgccacgggtcacttggtgggacgatactgtggaaactccttccctctcaattattcttccatcgttggacataccctgtgggtcagatttatctcagatggttctggcagcggcacgggcttccaggccacatttatgaagagtaagttgtttctattttagtgatagcttccagaatatgtcttacaaactagaaataataattttctcagtaatatattaagcaagaacaatcctaaactctacactattttcctacattgtctttgtgaattaccttataacatattagaaaaactgaattgcatatgaatggctcaataagggcaagggagagcactctcaatggttctattgttctttttaagctctaatttctacctaatgttaaattagtttttttcatgacgttgtgttagagtctggtaatatattatagtttgggtttggtgtatttatatcaagtgtgtttcatttgatttcataaactctacgttcttcacatttaagacatttagtattactttgggattggcttaagtgctcacatataacaacaataggggattcttctaatagtataaaatgttaaatatttttattctctagctcaacttttccattattggctatttcatatgtaatttcaaactatcagtttttcttgtaaatttctttaaatgttccattcttttgaaaaacaaagtaaaatagataaaccaaaattagagagtggggctgctcaccccaccttcccatgtccccaagtcccctaggggctcagaaccccttttcacatgggaagttgtggcctcttttcacaccatgcaacgttttaaggaccttttctaaggaagtgatagcccagaaaccaaaaaggaggcagtatttctttccctagtcagaaaagaaatcacagtcaattaaaagtccatccttttcaacaccctttgccttttgtttttttcatttgattaaagagcaattctaagtgggtctgatttactactctgtcttccctcctagtatttggcaatgataatattgtgggaactcatgggaaagtcgcctctcctttctggcctgaaaactacccacataactccaattaccaatggacagtaaatgtgaatgcatctcacgttgtccatggtagaatcttggagatggacatagaagaaatacaaaactgctattatgacaaattaagggtgagtttccacatgcaatcaatgttcataaatattggtgaattgctattggtaaaaataaatccaaggtaacgtctattcaagcatttgcaaatcatgtgggatagtctgctctaaatcatgtttagagcagactgcctctagattacatggacaaaggcaatttcagtattgtatttattattttccatttcatatctaaggggttttttaggattattataattttcctgttgagctttgtctaagcatgcatgtatgtcctaaataagtatttattctgtcttatttcctactatcctctttgtttttatgttagagtattaaaaattttaatgatcatataaaaataaatataaatataaaaatcatggtgatcattgctatccagacattggctaccatatcagttccagaaacacaatcggatgcttacaggctatgaccccaccttattcatcttggattcttggtcatgaatagatcccagtgcctgatgggtgcccaatatgtatgggaatgactattacataatttgtttggtagagtattttataataactgttcatatgaatttgtcctgagctatttaaaaattatcacagaatatgcctcaaaataggtaatttgagattttaaaaccaaaggtaggagatttactaagtgctttgaacatggtgagccctacaagttttggctattttgttgtcattaattcttctttccttctgtggaaatatggactcctttaggatacctgtccactttctctcattaaagcttttctcttcttgttattttcccttctttcttcctaattcctccctttgaagccccaaagcacatttattaagtactgttggtaggcaaccatcctggttcctatttttccatccacaaattttactgtaaatcatcttatgagtgattcccacagtgcatgtttattaatataattctgcaacaaagatgcaaatgttttcaaaacattaaattaccttcaataatattttatattctctggcagtatgtgttttaagctaaaattaaatgtttactcatttgtcatttttttgttatgataacattgtaataatataaggcatcttttttattttatctttttatgaagaaaaatatagataatacaatgctctattatctgtttttatgtacagatctatgatgggcctagcattcacgcccgcctaattggagcttactgtggtacccagactgaatctttcagctccactggaaattctttgacatttcatttttactccgactcttcaatctcagggaagggattccttctggagtggtttgcagtggatgcacctgatggtgttttacctaccattgctccaggtgtgtttggtaataaatgaagttctttttaggactgatatgtgcaggccaatgtttcaaaggatcctatcataacaggggtcagatataaaaataagtacagccccaaagcccttccaccatatgttcagatgttgttttaaattcataaacactaccttttgtagaaattgtacgtttctttctaaaaaatgcaggtcccattatattttttatattaattaggggcttgatatccataagatcgtctacttacaatttctagagaccactttagaaatccctgaaaatttgatttgcagatactacacatgtacattcacacacacacacaatcagttagttaaggatcaactcataaaagtaactatttttcctctgcattttatttcaaatgtagcttcagaaatgcttcagtttctccttagctggttgtaaatttccatgtttcaaagtaaaatgggccgaattttaaacttttattttacttttttacattcctaatcccctcagtgaaagtgatattgagctagcattgtttggggagacttttttcttgaaaaatttttaaatgagaccgggtgcggtggctgatgcctgtaatcccagcatttttggaggcagaggtagacggatcacttgtggtcgggagttcgagactagcctggccaacatggcaaaaccccatctctactaaaaatacaaaaattagctgggcgtggtggagcgcgtctgtagcctcagctactcgggaggctgagacatgagaattgcctgaaccaggaggcagagtagagtttgtagtgagccgagaacatgccactgcgctccagcctgggcgacagagtgagactccgtttcgaaaagaaaagaaaagcaatttatttaaatgaatttgagcgtttcttatggatttcaggattgacatagaagaaattaatcagatatttcttggaggatattctaagtccttgaatgcttgattggaacacagaatcacggtatctcattgaagaatattcgaactctgaacttgttctatgacttaaaagattagcctatttgcttctaacttcttatatcagcagaagtcactaatgaagataatttgtacttatatttatttaatgtcccttagtattccattctgaaatgttgttcctacctctctaataaggtgctttcatgacactgaatacaaatctcttacttaaaatattgatctgtctatctaagagcaaagaaccatcagcaagactgacaaatgcaatttagaggcaacatttaaatctggatggatatatccagagctcttagaaataaacttgagttaagctttcttttatatttacaaccctcaaggtagaaaaggaattatttacttgtgtaaaatattataccaacaaattttcttctaatattttattacgaaatttcataattatatgatgtaagtggacaggtgaagaagagagccataaaccttatttttcttagtcaagaagaaaaagaaaaaaggaaagtaaggggtcaagagaattttagagtttactaattatctagatggcataagtgattatcctgtaatgataccacactgtgaaagtgtcattaaaacttaaaaaaccttaatattttgaaatatgtcaacttattgagcattgtcctatcagtatttctttctttttttttttctttttttttttttttttgagatggagtctcgctctgtcgcccaggctggagtgcagtggcacaatctcggctctctgcaagctccgcctcccgagttcataccattctcctgcctcagcctcccaagtagctaggactacaggtgcccaccaccacacctggctgatttttttgtatttttagtacagatggggtttcaccgtgttaggcaggatggtctcgatctcctgacctcatgatctgcccacctcggcctcccaaagtgctagaattacaggcgtgagccactgcatccgtcctgtcctatcagcatttcttatacacacatatatttattttaaatcaacgcatatttattgagaatttattatggatacactgagaagactaagaaaggaaaatgaggtacaatctctactctccaggagcttaaaagtaatgggaaccaggcacagtggctcatgcctataatcccagcactttgggaggctgaggcaggagggttgcttgaagcccaggagtttgagaccagcctgggcaacagagggagaccccatctctacaaaagattaaaaaaattaggtaggcatggtggtgcatgcctgtagtcccagctactcaggaggcagaggcaggggaatcacttgagcctacatgctgccagtgagcagtgatcatgacactgcactccagtgagaccctgtcctaaaaataaatacataaatagtaaaaataaataataaataaaagagattgggaaagaaaaaacactcatatgtgagttaagtaatggtatcgtaattaaatgggtacatgacaaagcaaatggtaacagtagcaaataagcaagggaagaaaaatgagcttactgtggactagggtcaactgaaggaaattcaatgtgtcaagtaggaaaagcagtcagtgtgtcagtcaggaaaagctcagccatatggcggtaacaaacaatttcaaactcttaggtgctgaaaacaacaggtctccttctacatgttcctctcgtgttaactgggtgcctctcatcatccatcacttcctaactcaggctgttggagctgccattgtctgcgatattgcctgagaccatggcagtaggcaaaagagcccttggatgtctcggtttaaaagtgctcactgtaaagtaacacatgccttttgctcatagttcattggccaaaactggtcaaatggcctctctcagccacttgcagaatgcagttctaccatgtgtttggaagtggagacaaaggaaatatttggcaaacagcactaatgacccacagtcattataaccatattttacaaattcaagataagaaatatttcacatagaggaaaaccttaaaatttgaagatactggataacattcagcattcagattttccatgtgaaattgctttaaaaaaatctgtagcctacatagtaatagggtaaagaaatcaggacctagttctacaacattttatattcacttcctgttggccctgataagattcaaacatattatggtgtacaagttgtaaacttctgaaatggtgaagattggatctctgaaatatattgctacataaaagtgatggcaaaaataattgttaaaatcaactttttgagaactctggaaatagaccaaagccttatagcaatctgcggcatatttattcaagaaaaatcactgaatctaagtaagagtcatttttgtggcattctcttcctattcccatctctctctctcctcctagctttgtagtagcctcatgaccacagtagctgtgaaaatgagcagctttaacagctgtgggtggtggggccgcagaggtccagaaaacagcgcatctcctcagcattgccattattccagttcagcaacttcctggaaaactgcattctcaggtcttgtcttcacaggacctgggcaagagctcactcttttgtaaacagccctgtccctggggtctttgccgaaaacaatcagcaacagctgtttcacatcacaaccgtgcaaggcagtgacaccagttacagctaatgagaaactgaccagtaaacttgaaaggaaaaaatggggaaggagatgcccactggggctttgaaaagctccgacatgtttctggaaatctagaaggccacacacatagcccagctgtgcacatgcccaaaaatagaccccgagaaggacctaatctgtcaactcaaaattgcctagatataaattacaaaagtaactacgcaaaaatgataaagaaacatgagaaacacaggaatgaatacagttctacctcagtaatacaggggatcctctacgtgtctttattgatgcctaaatagtcagcacttgatattaaatgggttatatagcaaaattatggtgaaaatggagaacacaatgcattttttttacatcaaagatcaattgcggaaattgcagctttccgaatcagtgggttacatacgatattcattgatttctctgagaaattgtttcaattggttgcttcttttcagtagagggctgtcactttcaagtgaaaaagtgctagctagcgtcttttccattagggctgtgtcaaagatgttgctttctattctacaggtgcttgtggtggcttcctgaggacgggagatgcacccgtgtttctcttctccccgggctggcctgacagttacagtaatagagtggactgtacgtggctcatccaggctcccgactctaccgtggaactcaacattctttccctggacattgaatctcaccgaacgtgtgcctatgatagccttgtgatacgagatggtgagaacattataaagaatgctgagtttcaaccctgacacataattagttctagtccattatcatcagacttgcatactgcctccatccgtttggtttggaattacacagatattatggtcaaggaaggcatcagtaccagaaatggctacaacttctgaaggacatagaaagtattaaattaccggtcacagaatatcaggaatagcacatttctataaggaaaaaaggcttttttagaggcttaagaaggaaagaatagtctgaatgtcaacattgttcacctgtcctattgagatacctctgagataaatattgatattttatgtttctggctgaaaaaaatacttataattgtaatgtgactggacatagtggttcacaccataatcccagcactttgggaggtcgaggagaaggatcacttgagtccaagagttccagaccagcctgggcagcagaatgagaccctgtctctaaaataataataagaagaatataaaatagtaatgtattcatttctctttgtcccctgaatgtgggtagaataggtagagttaaggggtgatattgttgtattctttcctttgtacacaggcatggtgttgctatgtgacataaagttagagacataaatattgctgatgtatgccttatacaaaattgggcttcacagtctgcatggactggaatgaaggaggacagcagaaaggccacatcctccacgtcagtatttctcagtgtggcccccagatccacagcatcatttgttagatgtacatgttctcagcaaaaagaaacgtgtttgtctttggcccacaggttgctagtgtgcaagatcttgtctcccttatccctgatccctagacccctgccgagtgagaaaaatcgaatggtgaaggtgctttatgtcccttctgtagaggcagaacactaagtagagactcaaatcaatcatacacacatgatgagatgtcaaagcatgacactccccctttttcccatcagcaatcggctatcagcacgttgcacagaggagtatcaaagcaccagaatgccctcttcacatctaagccttcctgtgcatactgaaatttaaaacttttcatgtaatggaaaggatgtgcatccttgcacacatattctagtgttcagaacctactagaagttttaaaaaatatctttgaaaaaaatcttaagtaggtaactgcatctatgaagtaaattatggttattcttttaaaatcacattccattgagttgtttttgttccatcactaacttctcttggaagcagagagtctggggagcagtccttttttcctgtgtggctttgcacaggtcacaaagtggctccaaacccgttctacctgtgagatagacaaatacctccctcacaggctttttctgaggattaaggaaagtaataaatgaaatctttttagcaaaagtacaagcattttgtagatgatgaatttggaatagtttagatttcagtttacttagatggaaatttctaagagaggtttaatcagtgcccttgctcaggcacagggcggcttgaaagagctaaagaaactcaggtgcgtgccaaaacaacacaaatgttttaaagtggttatgcggcctttccgtatggattcctttttatgcactggcaatgtgagtagatgctcaataaggttccttccttcctcatttgtttaattatttattcaagaaatagttattgagtgcctagtctgtgtcagttggtgagtattgtagtcatttacacattgttaatatatttttatgactaaatttgatgtttttttttttttgagacggagtctcactcttttgtccaggccggactgcagtggcgctatcttggctcactgcaaactctgcctcccgggttcatgccattctcctgcctcagcctccctaatagctgggactataggcacccgccaccgcactcagctaattttttttttttttgtatttttagtagaggtggggtttcactgtgttaaccaggatggtcttgatctcctgacctcgtgatctgcccaccttggcctcccaaagtgctgtgattacaggtgtgagccaccacacctggcctatgactaaattttaaatcccacttcaattatttgttctttgcccagccagccttttgcttctgagtagcagaagcatgtaacattctgaagcaaatatctaaagccaactggccacagacaaagatacttataggctattcctgctcatgcaattggcctgtcatcacaggcctttggccgtatggaggctgtgaaccttcctgggctaccccagagagggtcatgcagcattcttgggagaactgagtcactgtcccacctgcttattcattttatagagttgccatggttcaaaatgaatcagtttcttccagaccacgcatctacccattctgtataccaaagatccctccaaactgagagtccatgaaactacattggtcctagcaaaacttttaaatagaaaagaaattgtataaaaaaatcagtaatcctttaatctagttccagatcttaagtgtactttcttcatgaccttagataaatcatttaatagcatggttttggggcatctgaggttaatctgcaaaggttaacatcactgttaacttctatctctatgcccttgcatacagcaaagtggcttgtaactcctgtaagattcagttcctcatatacaaaatggggataaaaataaatgcccacctaatagtgtcactgtgaagataaaatcagatagtacatgtgaagcacttaaaggggtatatagtaattgctcaataaatgtcagtcttgaataatcttggggcctcagtgtctatatctgtaaattgaagaggttggactagagaaagaattgccaagttgccttctagtgctagcctttactgttctttgacttcccctcctctttaaagattaggctcaagattaggctcaatctttctgcaatctatatgttgaggttttggaaggctccagaaataccccagtactcagtatgaagactgaaggggtggatgggcaagtaacaaaccatctgtgatttttgggtcatcttcccactaatgagtaggctaatcaacaagcacttattttgagataagcattgtttcaccagatgatctggagtgaattttagaaaagaaatcaaaatcaatagactcaactcactttcatccagtgataaaatatacacgtgaactaataacatataataaacttcaaaattttgtagtacaggtaatcagagaataagtcaacaaaaaataatattgggtgaaatgtgtagcaaaatagcataatgaagtgcacttactataaatgcaaaagaactataagagatacacttttgaattataaagaatgcaaaagtttccagcgatcagaaaccctccaaagaatgccattttgagcattttgtatttataactctgccattacatttgtaatcacaagaatagaaaataacttattttctaaagtggttaataatgaatgagtttcaagttgtagtcagtgccacaaagaatccatgtggctggttgtataaaagggcatatttactcatgtctcatattctatttttgttttttataaactcgaaatttattaattctctgccttaggacaaaagagaaaaaaacaacatattttcccagccacggcatccaagtctgctataatcccctttgctccattttggtttcagccggcacaggggctttgatcaaagcttatatccaagataatcaagatgaaaggagacgtgtggtgcccctgctgtcctttgtgtctctgtgggggtggggcacagttgctggaactcttctctcaccctccacacaaatgtgtggttgtttttataccaaaacaaacaaaagcaatgaacaaacacagatgaaaagttttgtttaaaaaaaccccactggcactgaagaaagggcacatacaattgcataccttttggtgaatgatattgtaacattagtgtaggatctgaggtcaaagagccaactgtttttttttttcttttacctacttgaccttcagcaatcagagtaactgaggtcagagtctctaatcgacagacatatcatcactgggtctccatcgcttcccaatcccaggtactctgattttgagttttagtgacagggagaactggcagccagtttttagaaagacggtggaaactgtcaaagacgtctttatcaaaaagggtaaagaacccagcactttgggaggctgaggagggcggatcacttgagatgaggagttcaagaccagcctggccaacatggtaaaacccctgcctctactaaaaatacaataattagtcagaagtggtggttcacccctataaaaccagctactcaggaggctgaggcaggagaatcacttgaaccccggaggcagaggctgcattaaaccgagactgtgccactgcactccagcctgcgcaacagaggaagactccatctcaaaaaaaaaaaaaaaggggggggtggggtggggtgggggtaaagaaaagggcaggaagcaccattgcaagctggagccagaatgatatcacccctgaggggtccttctttttgaggatcccattatctcctacgagtcctgatgttctgagaaaaatgtgtgagctgctttggctaagctgcaaatgattgtagagtagattctcaagatgtattttcatgttgttccctttctttcaacgtaggagataataacttggcccagcagctagcagttctctgtggcagagagatccctgggcccatccggtctactggagagtacatgttcatccgcttcacctcggactccagtgtaaccagggcaggcttcaatgcatcctttcacaagagtaatgagttcaaatattttttaatcccatgttatctcatctcctctcttttcctctctctttctctcttcctaatataatgtttttgggcaccaggacacaagacaagtcagaggacatgggtctctgcccaggctctggatggctggctccccttacatcagtgctgagtcctcatccaaagcactggggccaagtcgtacaaaagtgtgctgccttcaggtctctggtgtggcatcttcgctccaaaggaggtgtgtccagggaatgcatgagagagagctttaaagcaatttttcagcctagctgagggctggaactagatagagcacagctcatatccataactcatcgaaggagcaaaacgtcatcatttattctcataaattacttggttgaagtcagccatctgagggttggcaggaagagtttgttgctcttgaaatatgaatttgatgagtcaaaagcgggcaccatatatgggataccatcatgcacagtatgattgagacttttcaaacttgacatgtgaagtccagtaacagccttaaatccaaactaactgaaaggtgataaagtagtccaaggaagagtgaaagactctcatgttttgatcaaaaaacataattttaaagtagattctcaatctaacattaaaaattaatctaatatttcctccatgcttatatataccttttataaagtagggagcaactgaagataagttgtgttcctcacgctcaagggaggcaggctgcatagtggcttaagagcatgggctttggaactagacctaagatacattttcacctctacaatttaactagctgtgtgagatgtctgcccttactgatgagcttctagtccctgacaactggagaattaatgcctcctccttttatcctcttcctttatctcctgccctctcactctcatgtatatattactatgtatcgcaactcattatacatacatacatgtatacacatgtatgtatatagtaagggtggaaccattggaattaatatgtgtgtttatatatgtatataatatatataaatatgtgtgtgtgtctatgtatatatacatacttggcagctcccggtctagaatgtatttcaaatttaacctgtgagtggtataatggactttggagactcagaagcggggaggatgggtggggtatgagggataaaaaactacatattaggtgtaatgtatactagtcagggaaccagcgcactaaaatatagacttcaccagtatgcaattcatccatgtaacgaaaaaccacttgtatcccaattagattagatagatagatagatagatagatagatagaaaaaaaaatttcacctttgaaagttgaacactttattcccacccttttccatgccaccaccccccaattctacactcctcataatctcagcaaatggaaagtacatttttctcattatttaagtcaaaatcttgatgttatttttgacttttctgtttgtctcacacttaaccatcaacaaatcacactggctctaccctcacaatgtatctagattccaaccacgcctctccatttctgttgctaccagcctagcccgtgcacctatcatctctccttggcctcaggcggtcccctccttattggacactctgctcctgtccttccctgtcctccaccccttacagtctaaggactgcacatagagtgacattttcaaacttaagtgagatcatgccattctgatgcccaaaacccttcaacatcttcctcttcttattcagaataagtcttttcagtttcctgcatgacctagccatgctacctttggaatctctcattctgcctcatccattctgacttccatgatgtacctctaacacatcaagcctttacactgttttctgaactggaatgttttctcccccataactatctggcttgatccttcatttcattcatgtctctgctaagatgttactccaatgacgtggcttttctaacttaactctaacaataaagtacccttctccctcctctcatccatttttctttatagaatttatcaccatctcacatatcatgtatttgtttattgtatgtcttccccagctataaagaaatctttatgaaagcaggtaatttgtcttgtttacttacctctgtatcccagatctcaatgaccaccacaaactgagtagccaatagcatgtgctcaatacatgcttgttatgataatcatttcctgcactctggctttattttcaagcatttttattgcctccactttgaaaaccccccaagaaaactaagaaagcataaaaatccagttgccaatgctatttaaataaccgacctttgtttctttgtgggaaggctgcggtggatatttgcatgcagacagagggatcatcacgtcccccaagtatccagagacttacccatccaacctcaactgttcttggcacgtcctggtccaaagtggcctgaccattgctgtccattttgaacagcctttccagattccaaatggagattcttcttgcaaccagggggattacttggtggtaggtcttgctgctaccctttctaattacattttccatagacttcattcagaaaacaaaatgataatttttctctcctgggacataaatggataagaattgcgtactccttcttttgcaatgtaaaggagttgatgaaattttaatttgtctttccagctaagaaatggtcctgatatctattctccacccttgggaccccctggaggaaatggtcatttttgtggcagtcatgcttcatcaactctgttcacctcggataatcaaatgtttgttcagtttatttctgatcacagtaatgaagggcaaggatttaaaatcaaatatgaggcaaagagtttaggtaagtattttcactgagaattatatctgcttttcctgcaattgcttgatcttctttgatataaaattttcttttctgaaccaacagtaatagaattaataagaatgcctactctcaagtacttattatatttgatacattcaatatctcatcgtgactacttttcaagtaaagtatcattatttccattttaaagataaataaaatgaggcttggacttttccaaggccacatacctaattagtgaccaaagtgaaattttccatgagtataaaataaactattcttcttgatccctggaattccttagacctttccattataagatgtctaattgtaagttaattctagttacagaaacattataagacttacatttgccttattttgtaataatttgtatgctgttttcaaaagaacacataattttttgattctattattactgatttaattatatattacatgatatctgtaattgcttgtacttaattacacttgattataattgcatttaattctactgtaatgatttgattttgatgacatttgctttttagtaatgtttaattgaataaataaataaataaataggcatcacttcaaaaaaagggagtaatgtcagtagaaagtaatataataataaatttttcctttgtcccaccagaagttagataatatagatttcaaaatgatcctatgacttgaatcccagattcatatatatatatatgtaaatgaaatcatatgttttattgcacattgtatgagatttaaagtcaacatggtttctttattttggtaaaagagatgaataagagtcttcaccaactgacacacaaaaataagcaaatagcttgagtaaggtccagaacaccagggaaggagctttggtcacttcccagagctctggcacaaggagggagctttaatgcagctctgtgggcacccgcgccattgctttctaagctgggaccttctcatccctccatctcttgatgctgagctttgcagctgagtcatgaatgggcagttttcacctggtaccaaagcatttcaagagtagcagtgtcctgagtctagtgagtagacgtcagcccatcctacccatcctacataactctactcttttgtttttgtttataatagactcagtcttttttttctttcttgagacagggtctctctgtcgcccaggctagagtacagcggcatgatctcagcctactgcaacctctgcctcccaggctcaagtgatttcctgacccagcctccctagtagctgggattataggcatgcaccatcatgcccagctaatttttgtacttttggtaaacatgggatttcaccatgttgcccaggctggtcttgaattcctgagctcaggtgagccacctgccttggcttcccaaagtgctaggattactggagtaagccaccgtcctcagccaatagactcagtttgatttatatttttaaagtcaacatttagtggtaattcagatacactaagagatacactaagggtgtgtttgacattgcacctcttctattcctttgtggattcactgttcatgcaagtatggttatggccattactttctccctgtctttcttgaagcttattatgactgctgttaacatcagacttaaaagtcttttgatttcacaacctgttcttggcaacctgaaacaacagcatcactgttatttctctctacttaccaactcaagattgttccataactatagccagccttctacttcccacgtctatctggctatcttcccaccatatctatttccatgccactcccacttctcagcctttaacctaggtccttttgtgaacattttttgacatcaaatcacctagttttataccatttttctccagagacactccttcgctatggttgattgagatttctaggaccctgtggtagatgccttttattctcacctgattaataggcctgttaattaattagtcaaacatttacaaggtgtttcacatcatgcaaaccaccgagttctgccaaggagttcacagtgtggtaaaggagacagacaagcaaaggcacaattagaacatgatataaggctgggcacggtggttcacgcctgtaatcccagcactttgagaagccaaggcaggaggatcacttgagcttaggagtttgagaccaacctgggcaacatagaaagaccttagttttcaaagtagctgaacatggtggcgcacttctgtggtttcagctgctcagtaagctgagttgggaggatcacttgagcccgggaagttgaggctgcagtgagccacgatcataccactgcactccagcctgagtgacaaagcgagaccctgtctcaaaggaaaaaaaaaaaaaaagaacatggtatatggtataataagtgctagaaagaggaatgcacagaacagaaacacctacttcagcccaggacatcagagagggttccaggggaagtggatgaagagatttgcccatcagtgataaaaagatgtgaatgcatagaaaatctcaatgttacaagtcatattcaataatttgaaagaattcactactgctagagatcagagtcaaaaagagataaacataatagtgatgaagcaggcaggaatcactctgctcagggccctggatgccaccctcagttagttaagatgttaatcaaaaggttatgggaggcattggaagtttttgctccaaagcctgaacagcgtgatcagattaaaaacactaatgtagctgcaacactgaaaacattggagatggggaaggctgaagagagagagaccagatgaaagagtaatttagggaaaaaatttactccctgaactaaggcaatggcagtaagaaggtaggagagagggcatatcaaagatattataaatacaggattgagtgaatttggcggtcagttggatgtgaggcaggagggaagggatgggaggagccttaggagcagttgttaggtttttggctgggtggatccattcttcccacagacatttatcaagaactttccatgggacagacactgtatcaggccccggggatgtggcagtaaacaaacaaaatccatgtcctcatggaacctaattctagtgttaagatgcagacaataaataagtaaaatatataatatgccatatggtgaaaggtatcaaggagaaaaataaggcagtaagagtggatgcagagtgtccataggaagaggggctgatgctgtcatcagcagactcaggtatggagctctggatgacgagcaaatgagaatgttcatttgagacaagttcagtttgaaatctctgaattacctccattggagatgcccagtaagtggtcggaacaggaatctcgaggtcagaacagggatctagactgaatctgtaaatacggaataatcaacagactgcttatcatttaagtcatgaggatgtatgacagcaattggggaattattcagagtgagatgaaaggcctacaggaggattcctgagggcctccagcaatgtcagggaagccctggagagatgcgcccaagggccagaggaagaatgacatgaagagtaaaaggaggagaagagcttggtgtcagaagccaagggacaaaaatgtaaagaagaacagtgtgatcaactgtgttaaatgctgtggatataaaataagaatttaaaaagttctttgggcatataactgtgaggtgacttgggagaacatgagtgctttcatagggttgaagaaggaagggcaaaaagagagaaggagagagacagacagacagatagggagagagagattaaatagggcaagatcctggaggagacagtaggatgggaacttgatccagagatacaggaagttaatgtacagagggaaaaatagagtgtagagatgcagattaatttattgaggatagtaataaattaggggtaacaaatggaagagattctcatctgatttcttctactttctttgtaaagtggagcctaatgtaatgtgcttagaatcaagaggaaatggggaaagtcaagggcttagggagtaaagttccaaacagccattgtagtttatatgaaaagtaatgggtgaattgcttggctgtgttgagatgggagaacatatatttgcaggggcatcaatttccttgaatgaatggcttgaattgaacacaaccacggagttggtattttgcaagggaagtttgaaggaaagacacgaagcaagggagttggagctcatcaaagggatttgcaatttagagtttcagagatgggggagttggaagtatgacagaattcaggatgtgactgtaagtggatgagtgacagtggacacaaatgttctagagttgagcagatcaagtatgtgtatggctaagtgattggacaggttaatttcattggcattgtaagtacttttactcctatctggtttgtttgttgaaaatgccaaagaatatttattgataatagaaaaatattttttgataatgctttggttttttagaaaagaaatattaaaaagctcctttatcctctggcataacattactaataaattatttcattccattgatcttggttctcaaatgcatctaaatcctgaagaaatctaatgaatgaatgctccccgagttgtgcaaagatatatctgcttagtcttttaaatataccaagatcatagctctgcatcattctgctgtactgaatgctcagtgggaagctgtaactgctagcatacttacatgcttatcgaagtggtggatatttattcatgcttctgtgatgttctgccccgtgcaccatgtgccataatcatttggttggctttaagaaagaatgaaatttccaatgagaatagataaatggtctggcaaaataaaaagtgtcacacctcgtagctccctcgatagcaaattgagaatttgtttgctggaaaagaaaatgaggatcataacagatgaaaggaaatggagacaaaatacagagaagtcgactttaaaagatgatttgtggccattgactgcatccccttcaccagatcatagactgatttaagtgtgtttgctcacagcctgtgggggcaacgtctacatccatgatgctgattctgctgggtatgtgacctcccccaaccaccctcataattatcccccgcacgctgattgcatttggatcttagcggctccaccggaaacacgcatacagctgcaatttgaagatcgattcgatattgaagtaacacccaagtatgtcacttccattttcatttttttcctaccccaagttagtattttttaaccgtcatgtctcaaaacagtccatttctttcagtagcacatactgcaaggaaatctaggggaaaagggaaatgcttaatggctcaggcctgaaaacacagtcggccagccactctcccatcagctgagccggttatgtacgtggatactgtcccttgtgaccctagacacttcctgcaagggacactgagggtggctacttgagattgatgttatccattcttcctcccacaggaaatatatcatgtttctgatagatgaatatttatttgaccagcctcatattcggtgtcacaaatgataaaatgtctgtttaacaaatgggaatttgtgtggtgtgtcaccaggggtcagcactgtcggaacagtactaaagcatgcacagtataatttctcagtctttatttaataagagttctgaaaggattacaaaacagtaagtcttactatgttgaagagaaagaaaaactatattgatcgtagaaaacatttttctctttccttgaacaaaagtatgtatacatttgcatgaatgcagctgtggtgcaaaacttggatataagatcttctgttgctatttctggcactgggtctaatactacttttccactcatggagcattaattggctaatgtgacttcctgaagaaacgttagatacatgcttatctacttttatggacacagaaaattccagttgggacgctccattagtcccaattacagagctgttagagaatttatctttgtcctgtgaaatgtatcaagtcattgtgtggaacaaaatatttgttgttttttgaaattcctagggactaatttgaaagcaacatttatgtttgtaaaaccaatacagaatatggaagggaagtaaatattcttgaatgtagaacatgtaaaacctgtcttttgagctactaataaaagaatgtattattaggaaaaatatcatacagcattttaaagtgacatggcttatgctgattctatcatagttttttatgctaagaaatgatgatttaataatatcttcaaagaaagtaagtaaggttgtcattatcaaaataagcatctgaccatgtaaatttaacagaattttgttcccacttcagctgtacttccaactaccttgagttgcgggatggagtggattcggatgcaccaatactttccaaattttgtgggacatctttgcccagcagtcagtggtcctcaggagaggttatgtatttgagatttcgatctgacaacagccccacacatgtgggattcaaggccaagtattctataggtaataatttttttaaaacttttattttaggttcaggggtacatgtgcagatttgttatataggtaaattcgtgtttgggggtttgttgtagagattatttcatcagccaggtactatgcctagtacctaatagttattttttctgctcttctcccttctcccaccctccaccctatcaaatgaaagaaaattccgtgctcatggataggaagaatcaatattattaaaatggccatactgctccccaaaatttacagattcaatgggattcctatcaaactattatgacattctttgcagaactagaaaaaactattttaaaactcatatggaccccaaaaagaacccaaatagccaaggcaatcctaaacaaaaagaacaaagctaggggcatcacaatacctgacttgaaactatactacagggctacagtaaccaaaacagcatggtactggtacaaaaatagacacatagaccaatagaatggagtagagagctcagaaatacggtctcacacctacaggcatctgatcttcaacaaagctgacaaaagcaagcaatagggaaaagattccctatccaataaatgatgctgggagaactggccagcagtatacagaagattgaaactgtaccccttccttatatcatatacaaaaattaattcaagatggagtaaagacttaactgtaaaacacgaaactataaaaaccctgggaaacatttttatattaaataagagttattatagaatgaatatgttaaaacttttttaaaaaccatgactttttaaaaataagtctatttgcctaattttaaaaatattttaatgctagaaataagtaaggagtgtaaatgtttgaaactacagtcattaatcaactttaatttctcttttaattttcattttaaaaagtaatcttagtaaacttaaatattttatattttctctaacttatttgtgaagaaatatatgtggttaaatcaaactcctgtttcttcagcttactatgaaatacagtagttctctcttatccatggtttcatgttccatggtttcaatgcccttggtaaacagaggcccaaaaataggtgagtacagtacaccaagatattttgagagaccacatttacataacttttctaacagtatactattatgattcttctattttattattagttattgttgttaatctcttatgtctaatttatacagcaaactttatcataggtccatatatagagaaaaaaacagtctatatgtctgtatagggtttggtactatctgaggctttaggcactcactgggggtcttggaatgtatcccccaaggaaaaggaagaaatgcagtatgtttattactttaagtaataaaaccatttaagaaccaggtaactctatttagcacagtgtctttgaattcctcatcaaatataaaataattaaccttttttttctctgagtctctagtgccaaatcagtcactggataaaaagcaaacatgtcagtggggcatggtggctcatgcttgtaatcctagcactttgggaggctaaggcaggtggatcacgaggtcaggagttcaagaccagcctggccaagatggtgaaaccctgtctccactaaaaatacaaaaattagccaggcatggtggtgggcacctgtaattcctactactcaggaggctgaggcagagaattgcttgaacccaggaggcggaggttgcagtgagccgagattgcgccactgcactctaggctgggtgacagagcaagactctgtctcaaaaaaaaaaaaaagaaagaaaaagaaaagaaaaaaagaaagcaaatatgcctcttcagcattttgatttccttatttaaaaaatgagcggttgaagattcactataatatggtcacaatagcacataatttggtatctaataggtttagacacaaaccaaacaaatatttaataccgcgaaagttcagaaagcctagtggtaacaatgtttaactacaccatagatcgtgttatatcctgagtcaagctgcatataattcaattagctatcacacccagctaataagacataattgaatagtaattttcaaggccctgagatatcagttactgtagtgaactgtttagttgagagtaaaactaggaatggcaggtgtccccacagtaccccttccagctgagcttgggttcagtctttaggatcaacacagggtactaggcaggccagatcagcctatcagttggttcttgagatgaaacttacttgcgactattagctcttacatagtgtcccaaaagaattaatgtgacattacagaatattccatttagtcatcatcttctgtttcccattattgtattggacttgtggtatcatttctgtttacatcaacagtagaattcaaataatgaggaaagcactaaccgttttcagaatttttaaaacttcaattcagagtcacttggcacctaaaagttttcaaatgtgctggtgaaatgaagaaaacaaaatttgtaatagaatcaatctttcttgcttgcttgctttcttatttatttatttatttttattttttgcagctcagtgtgggggaagagtaccagggcaaagtggtgttgttgaaagcattggacatccaacacttccatacagagacaacttattctgtgagtggcatctccaggggctctctggacactatctcaccatctcttttgaagactttaaccttcagaattcttctggctgtgaaaaagacttcgtggagatctgggacaatcatacctctggttagtaaaatatatctgctctcttttgggtgtttattttcacatgtacttattcagcctctgaagtttcttcacttccaagaaaggcaaaagcacatctatactctgcagagaagtgcagactaatgagctttgggcagtactggtgattctctccctcaattctaccattaacaatggatgcccagagcccaggtgtcatatagcccaccctggaggccacttggggagagcaacggtagtgggaaggcacctcttgctgctgagacatcccattgccacatgccgttatttgaggggtgttctatagcttgagatggggaagggatcatgcatgtctcctagtggtagcataaggcagatacttgtcactgttgtctcagatcattttttcaaccaaatgagcaagccttcctcattgtgctgagatatccttcccctaattggttgcatttttttcacttcttcatgtatttgaatatgttcatttttattcatgttttcctgttgtcttgacagagattaacgtttcttcataggcagggtcttgttttttattattttctttgtacacacaggacaccttgaatagagggtaaaggaaatcaatcacttggacatgtatatttaattatttgtctctcacaggaaacatcttgggcagatactgtggaaacaccattcctgacagcatagacacttctagcaatactgctgtggtcaggtttgtcacagacggctctgtgactgcctcaggattcagactgcgatttgaatccagtatggaaggtgagttcattgattcattcaacacaacattgagcacctgcattggacagacactatgctaggcaccagtgttaaaatatttgaaaaacaaaacaaaacatgacccctattttcttggaccttaatcagaaattcacagtgataaatgaaaaattacagctgtgatcaatgctataagggaaaataactagtatcacgagagagataataagaggatgagagttatactgtaatgcccaccttaagagagtcctgtagttactcagaatttgtcttactgcaaacccaacaaactcaaatgaaataaagatcttgttcagaaaaactgggtacttaacattaactttctgattttcctcttttttttttttttgtgaacatggggtcttgccttgacctcccaaagtgttggggttacaggtgtgagccaccactgctggccaattttcttgattcttttttttttcttttctgagacagtgtctcgctctgttgtccaggctggagggcagtggcatgatatcagctcactgcaacctctgcctcccgggttcaagcaattcttctgcctcaggctcctgagtagctgagattacaggcgcacgccacgacgcccggctaatttttgtatttttattagagacgggatttcaccatgttggtcaggctggtcttgaactcctggccttgtgatctgcctgcctcagcctcccaaagtgctgcaagtgtgaaccaccatgcctggcccgattttcctgattcttaagttcattacattcattggtctctcatttcttgggccatgatgataactaaattgctgcctgtggactatcacccatggaaggcagggttaaatattaatagagataaaaaatgaatgtatatgttcactaaaatcctcatgcacataaataaatatggagactaattttatctagaaggataatttttaaatacctgaattttgagagctttcttgatggaaggaaacattttgatttgattgaaagttttcttggctttttccccacgtcagagtgtggtggggatcttcagggctctattggaacatttacttctcccaactacccgaacccaaatcctcatggccggatctgcgagtggagaatcactgccccggagggaaggcggatcaccctaatgtttaacaacctgaggctggccacgcatccgtcctgcaacaatgagcatgtgatagtaagtgttccctgccgcctgagatgttatattccatcatttaaagagtttaccgacccataaatcatagtcagaaaactaggtcaggaaaattgccatctatgcaactataactcagacaaattctaagtattgttgaaagaacaaaatcacagtaacctgtcaaaataattgtaaaagttgtttgaagagactatcagctatcactctgtgcatcagggtcatagaataaattttaagagtgaatgatcacgacaaatggcaaaaccggagaggctgtgggaagctaagcctacagcagcacacagctgaatgggaccagagtcacagcacaagccaccacgaaagttctgagcaggtgggtggtcctgcataagcactgctctctccaggggtacagagggactcttggtgggagagcactgctacgtgacctccatgtcaccaacctccagtggtttcacatgtgtcttcagcactctcagcttcctgcagtgaaagaaagcaaatgagatccctgagtgtgaataacaaatagattgttaactgtgaagtgctgtgcacacatatgtgtgtgtagataggaagattggattaatattagtaaatttatccacccaacttgccccttctgcagtgtttgttatctcagtaaataattccaaacttctggttgcttgggtcaaaaatcttgatgtctattttggaatccttcctctcacaccctatatggcatctataagcaagtcccattgggtgtatctttaaaaatatccacaattgaactatttctcatcatatctgctactaatacccccaccgttcacttggattattttagaaagttccacctcgtccccctggttccgttctcctctccctacgttctcaacacagcagcatgtgatggttttaaacctcaatcggatcatgttgctgcctttgaaaatcctctaatggcttctcatctaactcagaggaaaatcccaaattgcacctgtggcccacctggctgacattatctgctgcccctccctcttctacctgtttgtcttatctcaaactcctctcttctttgctctctgggatccagccacctggcctccattccgttccctgaatgtgctgagatgctccccatctggctgttgccttcatctggaatgcccctccccagatggcggcctgctccacaccctcacttcactggggtctctgctcgaatgccttttaatccataaggtctaagtaccttatattacagaccccaccctggcctgacccttctctgccatgttgttttgcagcacttcacacctgctgccatacatcattttgatttgttcatcagtttattgtctgcttcccccactagaatgtgagctccttgaggtcaagccacagtttcattcactgctggggattcactgaatccccagtgcctgtacataatagagataaataattgttgaatgaatggatagtagaggtactatcattatcccttttataacaagccacttttgttttcagtttaatcgtctcctgttgggtagtgaatttcaaaaatatgaaatatctttgtatcttatgaccactttgtattgccgtaaaatgatctcattcaaccttcagattttatttccaagttctaatatctgaaggactgaactgttttctttcagatcttgaaaataagaaaccaagtgtgttttcttttatttgagagccaggaaattttggactaaggttgtttattataaagaaacttttttcctattattgattgaattatataaacaaagatgaagtagaaaaaatactaaccactcccactataccacattttgattcattttctcatctcttcttggcaaagcatactttatgtacttgtaatcatgtgatataaatccacttgaattctgattttaatctatttttctggttataaatataatggatgcttattgagcaatatttggagagttcagaaaataaaaaatataaagatatttttaattctactcatgtattactaaaattttgatgtatgtgctaacagttgttttttacctttgaaattattttcatagtttaaatcatactgaatataatgattatcaggaattttacaagcagagtattcacatgtcctttaggaaagagaatatgaacagtcatagttttagatctcaaataaaagttacagtcacaaccacaaattccaaagcagatcttacttgtcatctccctatcccttaattatcaacttataactcttgcagctactgctggtgggttttatgtcattatttctaaataatattcctattctactactccttgctttttttggacattatctatccacatcctactctagaagatgagacttacccctttgccaccacaaacacacatggggtatgcaatgtttatatactttcccaatcgtctcccaaaatacgtatgtcacgcttttgcttaaattgctgttcagttgacattaccatgattatgtaaacaccattcacaactgagccaagtagtgtagtatggcaacatttgcttttgttttcctaaggaataataataattgggtcctctttacattttcttgggttttatgcattgatcaccaattcgtccacaccctctccaccccagatgtgcatctctaccttctgtagtaaaacatatcagttccatttcttttcctcagtaatatccttccttgagcctttgtacgtcagctgcaagcctgatgctagctgtcatttcagaatttccctttgccatcaaatgtgcaagttccttcattcttctcctgggctagagagctgactttgtgatgctatgcacgtccctttcttggttaatttcctcttttggtgaggcataccctcttgcggctccccaaggaaatgggcaagggcaataaatcttttgaaaaatggtatacctgaaattatctttattttaccataaatctttgaaaagtatatatttaaatattttatatgtttgatatattaatatatatgaatatattaataataattttgaagttttgtgttgctcatttggggtcagttttcttcatgttcctatctcctgtttactaatattggtctctgccttttacattagtcacttccctaaatgtctgctgatccttggctattcattcgtatttaagaatgaattactgaaaggatgactggtatctctgtatgcatgagggggccctgactctttagcaaaacctgcaaacctacaaatgtcatatccacaggtcttttctcttggggaggttaaaactccagcgacgaatcactttcagaattaatttttcttctgagtctttagttctaatgtccacattcctttttttgaaatgtatttttatatgttcaatgtttattttggttcctctttaccctgctccaaacaagggcatgtgggttggcctttgcccctactctatttgattgagaacttgccgaaaagaggaagaagaaagatgaaagaggaagaagaagaaagagaaggagaaggaggaggagaagagggagaagaagaagagggagaagagagggagaaggagaagagggagaaggggaaggagaaaaaaagaagaacaataagaaggagaaggagagaagaagaaaagaagtagaagaaggagaaagagaaggaggaggagaatgagaaggagagggagaaagagaaaagaagaagtaaaagatgaaagaaaaaaaagaaaagagtgaagaagaaagaagatctgctggtgcagaggaggcagctttaactttcattgcactgcttcctagctaataccttatccagctggaatgagcctaaaatttctctaaacccacctgcctatctgactctctgtacagacagagaaaataaaaagctatgccacccagtgtgtcctacaataagacctgtgtctgatgttgtccctgctcatagcagatcctaaatctcacgtgcctgcttcctatccatttgtactctgagagttgtagtttctaagtacaaaagggattagaggacaatgatgggaattgcattctggttgcttctaacagcagaagtccatgtgataaatggatgactataacatgttcagtcattgtgattctatgccaaaggcagactcagaggcaggataacagccattgatcacagtttccgacatgtcccattaaccttatggttggttctaatcccttttgattccatcaatgtggtgcccattcctgttttcagcattatagaaatatttttcctcatctgtttctttatgcattacttaatggtttggaatcagagggatggtttgaatcccagttctattattacatcatctttctggattctggtatcttaatctggaaaacagggatactgttatctgcctgggagggtgttttgttgattagataagacaggctgagtggatgataagcaaagactggcatttttgtctgctcagtaaatgatagcaaactcttcttctggtccagtgagccagaagacactttacaccagaagcccccagagagctaaatttgattaattatagtaaatttaaagagatgacatcttggccgggcgcggtggctcacgcctgtaatcccagcactttgggaggccgaggcgggtggatcatgaggtcaggagatcgagaccatcctggctaacaaggtgaaaccccgtctctactaaaaatacaaaaaaaaatcagccgggcgcggtggcgggcgcctgtagtcccagctactcgggaggctgaggcaggagaatggcgtgaacccgggaagcggagcttgcagtgagccgagattgcgccactgcagtccgcagtcccgcctgggcgacagagcgagactccgtctcaaaaaaaaaaaaaaaaaaaaaagagatgacatcttttgttgtggagtgcattctccttctgcataactgttagtgccatagtctgagtcattatttctaatcttgagtcattcaaatccttttaaaaatgggaatatcaaccattcaatcaatgaattattgttcagttatttcatctagattttttttgaactgtgaaaaccagtcatgcaaattcatttgattttataaagcattggaagaatagtttgcgaattattgtaactatgtgaatgactacagctattatttaatattttagagtcaataataatccattattggaaattcaaataagtaagaaaattgaagctttgaatccataactaatgaggaaagaactattatgtttaattgcagatggagattgatttttcaaattacttttcaaagtatttaaaaatatctgcttgctgggtgctgtggctcacaccagtaatcccagcactttgggaggccaaagcaggtggatcacctgaagtcaggagttcaagaccagcctgaccaacatggtgaaaccccatctctactaaaaatacaaaattagctgggcgtggtggtgcatgcctataatctcagctgcttgggaggctgaggcaggagaactgcttgaacctgggaagtgaaggatacggtgagccaagatcacaccgctgcactccagcctgggcaacaagagcaaaactctgtctcaaaaaataaataaataaaaattaaagtaaataaagaaaaatatctgctttattatgtacatgaaatcatcagaaactgatatttaagcttcccttcctagtaacaaatgtcctgatgcattgttaagaaaaactgcccatcagtgagctctgcagaccacattgtaagcacaatggctcatctcctttacattgagagcacagtttccagttgcaaagtgtatagcagcttttaatctatcaccacatggcaggaaggcattactgcaatactttcattctagtgaaatcaccctgaagtcacaaaatgtgctcggggtaacagtggcttgtggcactgcgatagaaacctgcattgttaggtcattcattttggggcagggttcccataaaaggaagtgggtctgggctggaaatatcacctcctaggaaatatgcagtaagatggattgtgtgcctgaaggttaaactctttttccaacaggtattcaatggcattagaagtaactcaccccagctagagaaactgtgtagtagtgtgaatgtaagcaatgagattaaatcttcaggaaacacaatgaaagtcatttttttcacggatggatccaggccatatggcggcttcactgcttcctatacctccagtgaagatgcaggtaatgtaggatgttgtaaatgccccccattttaatcaggggcactgcagatgcccccagctactgccaatggcagcagagccatccattttccctttagtgatacttgaaatctttgacataagacaaacacacataagcagatgaaaaacgcactgcagacagaaaaaaagctttctgatttcagaaagaaactgccatagtgaatttaaaacttttaatgctattagattagcttctagcacagtttcaggtcatgttaccatgagggttggtgacctgttccgtagtccctggtcaattcttttgtgctgaaagaaaccatctacctcctagagggtaacttagtctcagagagtaattaattttgctggggacagaacaggctttattgtttctagtcatctatccacacacatatttccagtgaaaataaatgggaggtttgatttgatatagaatattccaaaattaagcaagatatggcctctaattataaatatcctcctatttcctgaattgggttcaaaattttaaagggttttaaattttagaagtgggagtgttttaaaatttagaagttttaaaatttagaagtgggagtgaatattaaaagaaaaacgctaagttatttcattggtacaagaagcatctgttcctttattaaaagggggcaaattaatggcaaattaatgtcctattatcggtttgatttaaaataatttattagatcaagtggagaattgctaatcaagccattaggacctgccaccattatatttatgtattcctctaaagtaaatattaatgaacagtaggcctcaatatttggacctattgatacagagccaaacgcccaccacttaatctacagcaacaggaaaatagagaagttgttgatttttgcacatctttcctttataaacttgcagaaacttccataatttgcatgccttttacccataagcttgactgcatctagaaaaacaaatcaaagcagtaatgttgatgttttagttactgttcctgtattgtttatctcttccgttgtggcctgaatcttactactactttctctgttgccttctgttttcttagtgtgtggtgggtctcttccaaatactcctgaaggaaactttacttctcctggctatgacggagtcaggaattactcaagaaacctgaactgcgaatggactctcagcaatccaaatcagggaaattcatccatttccattcactttgaagatttttacctagaaagtcaccaagactgtcaatttgatgtcctcgagtttcgagtgggtgagttctatctaagaatgcgttctcccatttatctacaatattctttttatcttttttgttgttgtcgctgctgttgttgttgttttgagacaggagcttgctctcttgcccggactggagtgcagtggtgtgatcataactcactgcagcctcaacctcccaggctcaggtgatcctcttgcctcagtcccccaagtggcttggactacaggtgtacatcaccacatacaactaattattaaaattttttgtagagatggggtctccctatgttgtccaggctggtctcaaactcctggcctcaagtgatcctccctctttggcctcccaaagtgctggggttacaggcatgagccaccacggctggcctacaatattcttcatatgcttggagactactaacaatgaagggagtcaaatggctctaacataggtacacacgatccaaaagaactctgttcgaagccataattctgtgtgtgcccagctgaggaaaacgaaccccaggaacagtgagtgaggcggatcactgtacaactagactctgtgttacagtcacttcgtttcccggcatgtgacttttgccgaagcgagagtccactactatcaagactcctttccaaggagactgggacttagcatgctcagcatgtgttggcagtttcctgaacttccaggatttatgaaggggctgtgaaattctcctgaggccttaggagttaaaagaagttttgcaatataccagatggagaaacacatggaagctatttggggaaataaccccaaagcagtcatttgtcttggttttcgtgatggaaaaggattgcggtgtactcaataaaccataattctcttaagaatttttaaaactctgtattcaaagaggatgaatcaattttctttctttcccatagtcaaggtgtaggttattcattaggttgcttccatgattatgctgacacgtttttctcagtaaataaacaagtagatagaggaagacaataatattgtaaatagtacgtaatcatccatactgtaaaagttttgctgagttctgtgtaatcccaaaatttaaagaaaaggaggctgaaagcagcagaagctcatcagttagttggtggagaagtccttgggaaactgagaggtcaatgttaattacctttgagaacgtgagcgacagaattttcaggaaggagaatttgatagagcctgtacccacgggccaagggcctcagccagagagtcctccaacctctctgaggctgaagagtctaaaaaggcttataagggaaagggaagttgtggtttgagaatgttctccatggaattctgataaaccctcaccccctctgcctgtttcaaaaccaccggcttgtggtcttaagcagaacagctgtatctcaaatttcagtcagctaaatgctgtcttctctttatttgctcaggtttagaggcagttaaaatactatatatcattgatttagaagaccagtgatgtttatctgacagaataaaaagaaagcagataaatgagagctctgttggtgctctgtacatgttcatcaaacccacgaaatgtaatcttcatgaaaaatattaggctcagatctgacagctcttggcctgaatgccgaatatggagtccatttcagttgattgaatatagtgaagaaatctttcaaattttaggcaatgatcactttatcttgaggatatattttatcactgttggtattatatttcttacaccctacaaaaggtgtgtccaaaagtgctattttaattcattgtatctctgtttagatatgctgaaataactatgaaaacacaaattggaacaaaatggtgtccatcatagaggttcatttcaaaattgctttgatttttttgtgtttgttttacccccttggagggactttctgttgcagttaacagagacacacaaatattgtgcaatgtctgctactaaatcagaatttaagtgtgtgtcaatgaatatcttgaaatttgtttttatcaaattcattgaatgtatttctcaaaagctgtatcaatgatggcacttggtatattattttgttcaggtgatgctgatgggcccctgatgtggagactttgtggtccttcaaagcctacattgccattggttataccttattctcaggtatggattcactttgtcaccaacgaacgtgtagaacacattggattccatgcaaagtattcctttacaggtaagaattataattaagatcttgataaaattacttataaagattaatgatttttttccataaagatttcatatatattttgttagatttatttctacatagctattagttttgttaatattatcaatgagattttctaaattacattttttaattggttgtggctgatatctagaaattttataatttgcataatttaaaattattatttaattttaaaattattcaataataaactgcataattttaaaattattaaattttaaaattatccaataattatttaataattaataataataaataattattaataataattattatttaataattttaaaattattttataatttgcataattattataaattttataattttgcatacatgtaactttagtccaaagatctagctatcctcttattagttttaatatgttgtctatagattctctttgatctttctgtgtaaacttctgcaaatgttagttctttatgctttcagtcataatacagaatttcattttcttgcatccttttgctagctagggccaccatcgaatattgaacagaaggaatgatagcatcttgtttctgacctggatgtgactatgacattttattattaaatatattggttgctcttaagtttccaataaatatcttttgttaaagaaagtcccttccatccttagtgtgaaaaagctttttttaaatgtaaatgggcataggattttatcagatgattttctgcatccattgagatgattcaactttttctcctttcataagttaatgtgatgaattatatgaaagatttatttctcttggtaaaccatccttgcatttctgggataaatcctattttgtcatgatgtgtgttttatacatataatgggtattatttgctagtgttttgtgttggatttgcatatgcaacattcagagtttgtgctggaaaacccagccctactcttgactgcttcccttggcaatgggaggttttctagtcccttttcacgagcatgccagtttgtttagattcccaacttcttgtaaaagtctcaattccagtcctgccttctgtggagacccagagccctatcttctcctcctacccagtcatcaaaacctcagagcccaaccctgggacccaaacctgcattctttaccctctcagacttcactctttcactttcactcctctcactttgagtacacttactgcttctagattttggggagctgcttttctttccattgagtttgctatgaatcaaaatatgttttagttatggttttatctaacattcctttgtgttataaccaaatggctggttgaagaaggagtgaaattgattatctactcactcaaccatcttgccagttgattttccttcatcagattcaaagaagagtcaggtttcagtaaacagtattatttgtattgaacatcagaccatattattcttcagaaatgtatttgtttttcaattttcaattttctatgctaataccgtatggaattttgttattcctaaacttttacccaattttacttttcttctatttaatttcatttattttatacatatatatacataaaatatacatacacaaaaaaatacaaaatatatatatacaaatatatatactatatatacacaaatatatatgtactatatatatacaaatatatatatactatatatacaaatatatatagtatatatatacatatatatactatatatataaatatatatactatatatacaaatatatatactatatatagtatatacaaatatatatatactatatatagtgtgtatatatatactatatatggtgtgtgtgtgtatatatatatactatatatggtgtgtgtgtatatatataccctatatatggtgtgtgtatatatatatatatacacactatatatggtgtgtgtgtatatatatactatatatggtgtatatatatacacactatatatggtgtatatatatatatactatatatggtgtgtgtgtgtgtgtgtgtgtatatatatatatatatatactatatatggtgtatatatataatatggtttttttttgagatagagtcttgttctgtcaccctgactggagtgcaatggcatgacctcggttcactacagcctccaccttctgattcaagcgattctcctgcctcagcctcctgaatacctgggattacaggcagacgccaccaagcccagctaatttttgtatttttagttgagatggggtttcaccatgttggccaggctggtcttgagctcctgacctcgggtgatttgcccacttcggcctcccaaagtgctggtattactggcgtgagccaccatgcctggccttactatgtttttaatcacaaaatctgatggttatgattactacttactttggcattatcggttcttttttttacttctgttttattgagagggttaccaatctcatttcagattgtggcggaatacagataggtgacagtggagtgatcacaagccccaactatccaaatgcttatgacagcctgacccactgctcttggctgttggaggccccacaagggcacaccatcactgtgagtgctaatgactgggtgaaatgcttctgagacaatagaaccacaatagcctgtcctgcatgaaaatggagctcttttattaagcaagtgattagagaaggctttgattctacaatgagatcactgtttttccctaacattttctcactagagcacatacattggcatttattattcatgaagagtgaaatctcttttttaagcatagggaaagatatacacagaagataattctgcgtcttagagagaagtgtattcagtttcttaatatgtgttgccatcccaaaccagggaaatgtcttttctcaaaatttccaagagaaccttcaataaggaaaaaaaagtagaggggaagggagaattaaataagagacaaaaatacaaattataaaaataaaaacaaaattaaacgatttgtaagggccttatcttcgtaacagttgataaaagctcactgacaaccattttcttttttctcctgcagctcacatttagtgactttgatattgaaccccatacaacttgtgcttgggactctgtcactgtcaggaatggtgggtcccctgaatcacccatcataggacaatactgtggaaattcaaaccccaggacaatacagtcaggttccaatcagctggtcgtgacttttaactcagaccattcattgcaaggtggtggattttatgctacgtggaacacacaaactttaggtaaaagaaatgtttgctccatttgattttctttttagtgatgtatagtatgaactcataatatgtacattttgtacctactttacatcaggcttagttctaaatatttgcacatgtcatctcatgcagcaaccctggtgggataacacaatatcaatacctggcatctctattttgcatgggcagagactgaggaagcatgggttgatcatttgcctagatacatagccgataattggtagagtcgggatttgaataaaggcaattcagtccagaaactttgatctcaacacttcatgatgctgccttcatcggcaaaagggtatggcacaacctgggaatctcaagtaatagaaacatgagttggaatcccaagtgcttgaaaatatctggagcctaaaagcagaatgctgagtggtgagctgagggcaggaaaataagtccacaacataaagagccttggtttatatgttatcccttgaacaatgggaaactgttgaagagttttgaaaacgaaggtgacaagatgagatttgtaatttagaacaaatgctgtagtgaatgggtcctgagtcaaaatatgacagatttcattttaaaagaatagtttttgtgcatagaaagtataaacattgtgaaaattctcagaaaatacaaggacttgtatcacatactttattagggatttctgtaaatcttgtatatcacacaagacaattatttctggtagagtcacagttattatgaagctctttgttgactgagtcagacttcccctggttaacaaccactggctgttattgaagtgagaagggagttttaggtgaatccctgatttccaggggtttcacagcaaaagattcggagaatgcctctttaacttcattttgttttgtatgaaaattctagatttttcttcctttgaatctacataattaattttgatccatcagtcagtttcaatatgaatcaatcagattgcttaataaaagaattttccccaactcaaaatcactttctctagtccagttagagtaacgttgcaaatggagtgtagagtaatattctcatgtgtgaatggtaataaaatacagaacttagcattgccaggttacatatactacataggctcaaagagaataaaaatacagctcttgtttggagacaggatggaaatctatcctctctatggcacggattagtgttcttggttgaattcaatatcattgtaacacaactgtaacagctgaaattttctctcaatttaactcacctttccatttatggagagagcttgctgtgcacctgactggaagatgatcacttgtaaaaaatgatgaattgaaatctcacatttggaaatgttccttctgtagcagtcttgagtttccaaaattactttccttgctgattgatggctttttacatggcaatatttcaggttgtggtggaatatttcattctgataatggtacaatcagatcccctcactggcctcagaattttcccgaaaacagcagatgttcctggacggccattactcacaaaagtaaacacttggagatcagctttgacaacaacttcctaatccccagcggtgatggacaatgtcagaatagcttcgtgaaggttagtacacttgttcatttaattggagccaagttggttttgtgaacattagtgtttaagctagaaatgattcattgtcgctcaaagtaagaaaattttgctgcctggattccttggatgaaaagtgagaaagtgagaaacctcaactgttaggagctagaatttcttttctttcttacttttctaatagatcctaaagggaaaaatgccctttataatatagggcactaccacaggcaaaatttaaagcatgccacaaaaattacggaacgttgaaggagcagctaatgccagccttcaccttgggcattaagaccccacagtctgaaaaaaccgtgagaaagccatgtaaaaatgatgggaatggggcatcaggagagcaaagctctttcaaaatctaaagttataaatgctgctcgtgtggcagtggcttgtcactttccactgacttgtgactatgatgactgtcttagaaattcatttcatctgtactgttttgcatcttccaagttatatctctaaaagtctgtgacttttagagaaagagtgccttatttccactgtgcctttccagtggaaataacactggtcacgttagcccctccattcatgtctgtcatacctaccacctgcatgttcttctctgagctacttaaacaattggcctttaagttattcaactgtagaatgaagagcatgattccttcttcagtggggctgttttaagcattggagataatacgatgtaataacataggtagtgctaagtacttggaatttaaagtcacttgatgagtcaaagtggcttttattgtcagtgttattacttcctatcaactctcaaatgatgttttatatctcattgacccatgcttactgtttaaatgaaaatctcatatgtgtataacatatatatatatatatatacatataataaaatacatttaatatacacttttcttaatggctttttccatgaactaaatgaactctcttctcatgaaatgaatcaatatcaagtattcagacttaagtaaaactttcaagtgctccagttgtaaaactggaatgtggaaaatggcctaggctcattccttctctggattgaatgggggtccctctgataacatcgggcaagcccaacgctgctgccgagtgggatgtattaggaaccctgccaaaaataagtggccgtgggaagcactcgtcttctcctaatgggcccgagatgcttgtttctgccaagaaatgctgtgtgggtggacggaaccagtaaagggacccagcttcggcaagcagcccccgcaggaagccacttaacacctgtaaagctgagattctctttacccacccagagacaccagggtaggtgggactggaaaaatgggtcccagtcacagaaaggggccagtctgggaagcctctttgtccccacaggccagacctgctcctcttccacccagagacattgaggtacccgggggtattggtaggggaaaattactataccctttgccttcaactgagaaacacacagagtccctcaggtagcaccagcaagaaccagtgagagccccggtagcaccaatgtaaaccaagcagaccagaattccaccacacagattctgaatattgaagagcaactggaactgtaacccacaaaatgtgcaaggcacgtggtaaacataaacagggtgacagcctgctaaaataaaagatttgaataggacccaaagttccctaacataataaatgacatgtcctgggtacaatcagaaagaacacgttgtatcaggaatcaagaacatcacaacttgaaagagaaaagaatcaagtgatgtcaacagtgagataaatcagatgttgaaatatatgacaaggatgttgaagtagtttccattaacatgcttcaacaatcactgacgagctctcttgaaacaaatagaaaatatcagcaaaaaaacaatggttacaataaagaactaaatagaaattatagaactgaaaaatacactaacataaataaagaacatgctgaataggctcaatagtagcatggagatgacagagaatagaatcagtgaacttgaagatagaacaatagaattcacccagtctgcacaataaagagaaaatagactgaaaaaacaaacaaactagatcaacacagacttagggactcatggacagtaacaaaagattcaacattctctcaaagggagaggagagagtgcagctgaaagaacaatcaaagaactagtggctgtaaactttcccaaatttggcaaaagagacacacctataggttcaagaagctgagtgaacctaaaccaagataaacacaaagaaatgtaagttcagacatatcttaattaaacttctgaacactgaaggcaaacaaaaagtcttgaaagcagtcagagagaattgggacattacctagagaggaagaccagttagaataaaagcagatttctcatctgaaaccatggaggccctaatgaattgacaatatattcttcaagtgctgaaacaaaggaattgtcaaccatacattttatatctggaaaactatctttcaggagtaaagaggaaataaaaacttctcatatgaaggaaaactaaacaaaattatcactaggaaacctaccattaaagatggtcaaacagaagttcttcaaacaaaaatgaaattattaaagaaccgtggagcatgagaaaagaaaaaggaaagtggaaaaagcaaaaatatgtatacatacaatagaatatccttttccccataaagcttgtgaatcatatttaataaaacaagaaattataatgccctctgttattcagtataatgatatggaaaagttgaaaggggacctaaatggaaatcacatttccacaagtggtcagatgtggatggtggtagactactataatcacataggcacattgtcacacacagaacaaccactaccaaaactgtgtgaagaaatgtacagaaaaacgctaatatcaatcaaaatggaatccccaagatatcaagaaaagagaaatagaggaccaaaaagcagataaagtaaacagaaattatataataaaatgtagacacagaactgatatatatcagtataattgtaaatagtttagttagaccaatcacaatacaggttatcaagccaaaacatgatctaagtgataataaactgatttccaattcaaccacgtaggtacatgaaaagtaaaaggatggaaaaggatgtcatgcaaaggttaaccaaaaaagcaggagtggatatatttatatctgatgaagtagactttagagtacagaaaattacaacagaaaaagaggaatcttacataatgataaaaggatcaatccaccaggaagacataatgatcctcctaaatgtgtatgcaccaaacaacagaggcacaaaatacataaagcaataactgatagagctaagaagagaagtagacaaatcttcggttatagctgaggacttcaacactctcctctcagtaattgatagaacaactagacagataattgacaaggatatagaagaactctacaaaaccatcagttaataggatctgattgacatatatatgtgtgtgtgtgtgtgtatatatatgtgtgtgtgtgtgtgtgtgtataaatatatatatgtaaaatacaccacacagcaacatcagaatacacaattttttaggaactcttgtaacattccaaggtagatcatatcctgagacatggaaaaacctcaaccaagtcaaggaattgaaatacagagtgtgttctttgagtatattaaaactgaactaaaaaacagtaacagaatatcttattaagcactgagctgagctggagagaactgagctgccaattgttggagcagctaattaaaacaacaggccaaaatgtaagtaacagtcctgtctttcatcattttctgctgtggtgtaagaggccaaacaggagaaagctctgtctccctcaatcgtccattctttcccatgggaagtgcctggtaaggatcagatggatcagtgtagatatagaaatggtctcattgccaagtaagccccaaacaaatatgtgcaggatctgagtgctaaaaataatgaaatgctggcataaacctaaatgaaagagacaattatatttatgaattggaagactcaacatagtaaagatgtcccttctccccaaaatgatggataggtttaatgcaattcctatcaaattttctccaaagtcttttgtaggcatagacaactttttccacaacttatatgaaggcagagacccttcaatggctaaaagaatcttggaaaagaagaataaaatgggaggaagaattctaccttactatttacctaggcttacttatctaagttacagtaatcaagacaatgtggtattggttgaaaacccagatgaaaacagagaacctagaaatacactcacacaaacatcctcaattgatttttgacaaaggtgcaaaaactttccaatgtaggaagaatggttttttcaacaaatggtactagagcaattgaacatccacaggcaaaaaatatgaatctcaacctaaacctcattattttgtagaaaacctcactcaaaatagatgatagactgaaaagtaaaatataaaacttctagagaaaaaaaaatagcagatgtcttcaggacctggagataggcaaagaggtcttagattaaacaacaaaagaatgattcataagagaaaaaataaaatgataaattttaccccatttaaattaaaaatcttatgccatgtgaaatattttcatccagtctgtagccagtctgttcattttcttcacataggcaatgtactactatgtaaaatatataaagaagtctcaaactcaggagtaaaatacaaacagttctattagaatatggacaaaagacatgggcagatagtccaccaaagagactctacagatgataaataccagaaaagatgttcaacgtcattaacttctggagaagtatgaattaaaaccacagtgagctatcactacacacctattcgaagacaaatatttaccaattgcataatatttaccaattgcactctgggcatttatccgagagaaatgaaaactatgtttacacaaaaacttgtttacgaatctatataaatagcacctttatttgtaatagctgaaaccagcactaaggcctttcaacaggtgaatggttaaacaaattgtggtacttgcttaccgtggaatgtaactcctgaataaaaacaaactatttatagattaacaatctggacaaatcactgagggattatgccaagtgaaaaaaggcagcctccaaagattacatactctgctgttccatttatataatattttgaaatgatagtgttttagaaatggaaagcagagagccagaggttagagagaaggcaatgtaggagtaaattgtgtgtggttataaacaacaaaagcaacttagggattcctgtggtattggaatttcagtatcttgaatgcaattgtgtacaacttgtatataacttaatacacacacacacacacacacgagttcaagtaaaactaggaaactgagtaaaattggtgttatgtcaatgccagtaacctggttgtgatagtatactacagttttgcaagatgtcagtattggaggaactcagaaatgtgtacaaggaatttctccatattatatcttacaaatgtatgtgaatctgcaattatgtctgtaaacatttgtttaaaaaatagttgaatgataaaatataacctacaacctgactgaattatatagaacactaagaaaaatcagaaagtttttgacctgatgacagttaagtaacattttgtaggttcaatatagttttgatgagtcctctgtcatatagccaatgaaatgagttcttgataggcaaggcagaaatgaatattgaataactctttaccattgtcatcaccattatcatcattattattaaacttatgttcccaggccaaaaggtagagatgtcgaatctataattaatgacttcagaaaagtataagcacttaagcattcttggattccttcattaaagaacttgaggctctttattaagttttagcccttcttactttgcctgtttagtaatgtttgtaaaaatatagtatatggcccaggcatggtggcttatgcctgtaatcccagcacttttggaggccaagacaggcagatcagttgagtccaggagtttgagaccaggctgggcaacacgggaaaaccccatctctgcaaaaaaatacaaaaaactagccaggcatggttgcacgcacctgtagtcccagctacttgggaggctgaggtgggaagatcacctgagtccagaaggtcgaggctgcggtgagctgtgattgtgccactgcgctccagcctgagtgagagtgagactgtctcaaaaaaatacatatatatataaaatatatatacagattatctattgataaattgtgtttataattttatgaaatgtggataaaaaactgccatatactgtttccttggatatattattagggggaaatctaattagagatcattaagtaaaattgagtaggtgcattttttttcctgacatttttattgatcttaggcatttggcagaatatctgcacttttgttctcagtaggtccagcgccaggcacctcccttatctaataaatggctaatataatttgtcttcagtaggatgactaacagctggatacccagtgcttaaaaatcaattgaaacaatacggctttaaagagctgagaattattaaaccaatgctatgaatcagtgctatttcacatctcttgctatggactgatttcccaatagaaatgtttttaatgacttgatgttttattgctgtgggtgaggaatatccttgagaagagatgtgtttggaatgagtaatttggtatcattccatgtgaagaaaatgttgaatagtcaagtaagattaatacacatccaactacatccttgtttgagatagttgtctgttgagagaaagggcatattgggtattgcagattgcgtagcaatagtcctggcccctacccactagatactacccatcacaccgagtgtgacaatagaaaaatgactacaaaccttgccagaggtcccaaaattgctcctagttgagacctctgaactaggacgagcttctctggttaatatgtttaatgtttttggggtttttttcccccaagttttgtatattcattacctaatatgcatactttccttgagtgactcagcattgtagataaccatgatctctcacctgaactagggcaaaacctacctgactgttttccggcatcctttctgactcctattttccgaattgtaatgttttccaaaaaccaatcttcttggtggctccttgctgtattcaggacagtggcccgagtctctaacgtgtcctgcagccccctctgcaggcttcctcaccccttcctccttggttttctctctcttctctgaactagccacggcctttcctgccatcggggttcgctcggggcaggctcacttcccccagttaggtaaagccaccaattatatattctcaacagccccatcataatgccttgtttatagctggaattttgcatgtaaatttatgattctgtgattcatgtctctgtttttccctggactgataagaattggtttgatttggaattttggtgctcaccgtttatttcctagcaactgttttttgcatgagtatataaattcagtcattcgaggtggccagaccaattaagtgacagcccaggtctacttgggagttgccaaccaaatttttggtgaatagcacacactgactggatgtcagcttttcatcaaaatggaccctacaattccacacagccaagaagtgttctgatttattccatttcatgctgattatacgtatacttggaattcatgcccactttcttcatgcaccacgatgtgcctcttgcttgctggtgttgtccagctgtgaccacaatctgctatcttcccaggagcagggctgagttccacctggctgctccgtctccctcagcacccgggaagctcggctaggtcagggcaactagaagttatgaggaaaccgaacagtgatccaggaaggtggatttttaaaaaatcaccacccagctatgcaaaaaggaacaccatctccttagagaagtcaagaatgggacatgctattttaaaaacagctttaaaaaaattattctcaaaagaaaatactacagatttgtccatgttttgtttactcttatgcttagttctgtatacgtgtgagtgccattattttgaaacctaagtgcattaaaatattgatgggaaacccttgagcattaaagttctgtgtatgtccgtgctaggtgtgggcaggaactgaggaggtggacaaagccctgctagccactggctgtgggaacgtggctccgggtcccgttatcacaccaagtaacacattcactgccgtcttccagtctcaggaggcaccagctcagggcttctccgcgtcctttgttagccgtaagtagccctaagaaccaaacccagaggtctttgcgggagtgtggttgtcacaggcaggcagggttggctaaacctgggggtctaggggaggagtatgggggtctacggggaggatgagtcacctaatcccaagaagacacctttcttccaaatagcagtgagaacagaactgaattgagaagtgatataaaagccatgaggggcactaaccaacgtctagaaataagcctggcatccagagtgggctgatattgggcagaagcgcagatggctagttcgttagcaacaaccagtgtggctggcctgtggcaccttgaccacaaaatcccgtggggggcttgaaacacatgcagattcctgagcctcactccaggcccaactgaattcagaatttccatgacgaagtctttcctgttttttttttttttttttgacacggcgtctcactctgtcgccaggctggagtgcagtggtgcaatctcggctcactgcaccctccacgtcctgggttcacgccattctcctgcaacctccacctcctgggttcaagctattctcctgccttagcctgccgagtagctgggactacaggtgtgtgccaccatgcccagctaatttttttttttttgtatttttagtagagacggggtttcaccatgttggccaggatgatcttgatctcttgacctcgtgaaccgcccgcctcggcctcccaaagtgctggcataagccaccgtgcccggccggtcttgcatgttttaactgtcatccagagggttctcatgctaagtcaactttgggagccagtttctttgggaatgttctttcctaattttgattaggaaggatggatctccttttctagctattgtacactattagattcgtgggaaatgtagcagttttcaagtcagagaagcaatggtgtgtgcctgttggctgagttaaatcaagtgtagccactcatggcaaaccactgtttagggaaaagtttgaggaaaggaattagaggaagtaatacagtagacaggtttttcagactgaatcagagagtgctggaaaggaagtactgaaagacaaccctagaccaaatcttaggtctgcaggtggtccactgtgtaagtgtgcacgtgtgtacttgtgtgtgttttaatgtcaatttaaaaggatagagatattttcgtgcttgatagatcagagagtgaagtggattaactagtcaatggttatatgaaaacaaatcattttagtggtgaaaagatatttctttctgtttcgaaaaccagggatgcatgtaagaatttgataagagttgggattaataaatccagctagttttaaaaagcaaccattgttgtggctagattacaatggtaatgaaaatagcagttttctaataataagacattttaaaaacattaattgtgtaaagtactaatcagatacaaatcattttttatctgttttatttctttatctgcatgaaccatattctatcattgctcgtttatcctttcttaatatcttaatattaagggatttgcagtagatttgtggtaatattacgaggactcagtccataaaactctgcagcattttctaaaaatgtataatattcttattaagcacatatgtatgtttttaaatcagagctttattctcttcattcttgcttcttccatttggaatatctcagggaactatgtctatagataatttaggaaaatgcctctttccttcatggacaaaatagatacacgagaaataaatgatctgatgatgactttttgttcccacataggatgtggaagtaatttcactggcccttcaggttacatcatttctccaaattacccaaaacaatatgacaacaacatgaattgcacctatgtcatagaggctaatcctctgtcagtggtcctcttgacttttgtgtccttccacttagaaggtaagtttattcttttaaaaaaattacgtttaattgacaaacaaaaattgtatatttatggtgtacaacatgttttgacatatgtacatgttgtagagtggctaaatccagttaattaacatgtctgctcactcacttacttagcactttttgtggggagagcatttaaaacctctcttagcaatttttaagtattcggcaagtaatcaagtatttcaggtattcaaccttgttattcgctattggcaccatgttgtacagtagatctcctgaacttattcctcctagctgaaattttgtatcctgtgaccaatatatcctaaatctccactcccacataccctaccagcctctggtaaccaccattctactctctgcttctatgagttcgacatttttagattccacatccaagtgagatcatgcaatgtttgcctttctgtgtgtagcttatttcacttagcataatgtcctccaggttcatccatgttgtcacaaatgacaagattttattcttttttaaggccaaagagtattccattgtgtatatctaccacattttctttatccattcattcactggtggacactcaggtccattccatgtcttggccattatgaatcatgctgcaatgaacacgacagtatagataatctcttggacacgctgatttgatttcctttggatctatgcccagaaatgaacttggtggatcatatggtagttctatttttaatgttttgggaaactgccatgcatttttccataatggctgcactaatttacattcccatcaaaagtgtacgaggaagagttcccttttctccacatccttgccaaaacttatctcttgtcttttgataatagccttggaagataagttcattcttaagtaaactctaattggttcttcagaaatgaatgaggagtaagtagaggcagaagtctaaaactcaccatttaaagaaaatattgaaaatatgttacagagtagatttaatgtaaacgtgattaaaatttcatccaatttttaaagaatacaagtattattctatgtattccatctagaagtaaaaaaatagtgacagaactttaacaacacaagtattgcataaattgcttaaagaaaataagtctgaaatgtttcatgttaacatagcttttaatttattcacttgcatttaaagtttatagacatacgtgtgcacacacacacccacattcatgcacacactattaaccaaaccagtgagagaaactgtcttattgagtcaacataggtgttcgacaaatattgaataagtaagtaaattaataaaattaatataggctgggcacggtggctcacgcctataatcccagcactttgggaggccaaggtgggcagatcacctgaggtcgggagttcgagaccagcctgaccaacatggagaaaccctgtccctgttaaaaatacaaaattagccaggtgtggtggcacatgcctgtaatcccagctactcgggaggctgaggcaggagaatcgcttgaacccaggaggcggaagttgcggtgagcctagatcatgccattgcactccagcctggccgacaagagcgaaactctgtctcaaaaagaaaaaattaatatatgtgccctgcttttagtaaatactaccattgggcgttctttcttctgctccatctcggtcatcttcatcttctcagtcctgactcttcagtgcctgagttcctggccacaagtgccctctgtgttcattctcccactctagggaatgggccgttggcagagggaacagtagagatgccgatttgggctgggctttgactgacaatagacaccacttggtgtttaatggaggctttcacacagtggaaaggaaattccttcaaatagatgggtattttcaaccactcataaccatattaattttcttgttacatatcagctttctatttctaaaccacaatttatctgcagatttgtcaagctacctcggtatattcgaaatttcttactcttgggttagtctctcatggcagtgaaaagttacactttgcaaaatgttctatagcattcaacatctgggaaatgtatggtttataaaaatgacatgtcagaactcataaatggataaatttaacaaagcttgtctcacttaatcctttttcctatgacctcactgccttttcatacatctctgcagttgtaattttcagcacatgtgtttgcttaaaaaaatgccaagtgtaaatcaatgtatgtcactgtaaaaatggaatataaagtaaagtgtcatcttttcagcatttgctagcccaaaatcccagtaccataaaaagatgcccatgatatatgaaggcttgagggagggtaaaatagtttgtataagatgatccaattttctttctaaaataatgtgtgtgaataaaatctataaggctattaaccagtacattaagagttgtcaccactgtgtgatagatttattcgagatgcttattttcttctttatagcttttatgttatttttataattaggacaattattttaatagcaggggaacaacatgtggcttggattttgtgtttgtggtcattaagttaaataaacagtgcatctcacaagaccgtatcactcagactaagaaaggagactctagtaattgtactataaagccacagaaagcaatgctgataccagtggtatatgtattattataagagactctatcatgacctgagacagctccctgagctcagttgatcaggtgagaaaaaggggagcagccctggaatatctcagtatagtacagggaaagtgagcacagcatttaggatggatcttaatgccaggtcagccacttactgctattcaagtgactttgtgcaaattacttcacctttatttctgatacttatatatatatagcactttgctatatatgtgtgtatgtgtgtgtctaatatatatttattatatatgtataatagtagttctgaaagtcagataatgttagattgatttctgcttccgctaatggatttgccaatcctcactcagttgaagactgattcttttctaagatggtatccttacaacaatgccttgtgacatttccagtgtttaagtgttcagcattttcaaactgctgcctgagtaatttctggctatagattcatctaattatgatgattccccaaaagggtgactttaatcaaatttattttataattagcttcttatccttaaccatatcaatgctgacatttattgaataccatcaccgagctacagattcgctagctacagtaaaagtaacctttccccagcccttctaaagtgagcctgagggattcatgtgcaatatattgggatgaaaccgagaattgctctgaaggaaggtcatagctttattgagggagccttggcctttctagctgctataggcacttggaactgtttctgagagactctgttcaaatggctaagtatttctgagcccaggatcccagcagagccagtgttgacttaggtggtgatgaaggttctagatctgtcatcttggtggaccattagcacaaaaggtgggattggcaaggaaaagatgtggtatcccaggctacaaaatactgtgaggaaacacacttgtccctatatggcgtctactaaacattgacacctgcttagggagggttttaccatgaagggaaaaatacagattgttgaaccacactcaactcttaggttacaaaggctcagtgacctactttccgcttaccacaaagtaagttgctccaagtttaatgttggtctaaatttctctaactttctcattacttttacatttccagtactagacattccatgaactacagaccattgatgtttgtcctcattttggaatctggtattattaaataactgcttattttattttcccaaatattaaacagtccaaaattttgtgttctcattattcatgtggccaactagaagccctcaatctgctaaaaaaaaaaaaaattatagatccagttttcttatttcatagataaagcacttcttgaggcaaaatgaagcaagccagtgccttctaaaccttgattattctttcattaaaattagatagtaggccgggcatggtggctcacgcctgtaattcccccactttgggaggccgaggtgggcggatcatgaggtcagggggtcgagaacatcctggctaacacggtgaatccttgtctctactaaacaaaatgcaaaaaattagccgggcgtggtggcgggcgcctgtagtcccagctactcgggaagctgaagcaggagaatggcgtgaacccgggaggcggagcttgcagtgagccaagattgcgctactgccctccagcctggacaacagagcaagactctgtctcaaaataaataaatacataaataaaatttaaaaaatgaaaaaaattgggtagtaacattaattcaccttggtgataatgaggaatttagaaattctcaatttaaaaattctacacgcagtaaactgtaaactcagtgtttctcagatccagtaattcttgacaagcattggagggtgcagcagcgcttagctcgtgaggtggaaacaccaaagggacaaatgcctttgcttgttgtcctctagagatggcttcaaagccccaacaggagtgggcccagattcacacctaatatttgcctaaattctcttggattaactgaagtcccagtttatgggttatatctaatagaaagcttaaagaaaaaaagtaaaaaaaaattagttttagatttttctttttgacatttttttccccatcaagaagcacaataaatgagctttgtcagttttctttatttcctcctatttaaattttttaaaaactggtattgctcaactgctgtttcttctctttgctttctcagttgtttctaaagaactcagaatgtggtcgcattccacattactttagaaaaaagtgggcagtggtccttttgaaatgtttcctattgatattttattcaactggcagagcactggagcagatggtgtagtttctgtgaaatccctcgtttgcctgtgttacactccaatttgctttaatttgtttggccttcgtgcgcaatggaacttagctgtatactagtacatgcttccccctcctctgaatcatgcctccgtagaggagaccagtctcccagctactcagggtaaagttaacaagacagatgataggtctcagtcactgctgcctggtaattcatgtgcctctgcctagaacccatttctttcttccttccttcctttctttttctttctttcttcctttcctttcctttccttccttccttctttttccttccttcctttcttttcttttcttttcttcacagagtcttgctctgttgcccaggctggactacagtggtgcgatctcagctcactgcaacctccgcttcccaggttcaagcaattctcatggctcagcctcccgagtagctgggattacaggcaccagacaccatgcccagctaataattgtatttttagtagaggtggggtttcaccttgttggccgggctggtctcaaactcctgacctcaagtgatctgcctgcctcggcctcccaaagtgttgggattacaggtgtgagccactgtgcctggcccctagaacccatttctatttcctgaaaatacttgatcttatctacaacatggaaatatcccaaacaaagggttttccctcatctctagtcctctttggtgtctcggcccacgccctccccccactttggagaaaaactgtggtccaactctaaatcccacaagtttattctatttgtggaattactcatccttagttttccttcagttctctcatagttcttagaactatgatgaagtttggaattagacattgcccagtaataaatcccggaaaaatagaacaaaaaattaaattttactgcatggtatagagccttgcccattgcaaacgatgaatatgttttaaagtttttaggaaggatggaaaatagtcataaaaacaaatgatagggaatcgttttgcagctcagagatttcagtagtaaatgtctatcaaatcacttgttgaagacagagttaagaattactgagttcccggtcccatgacgtggactctagtccacggagaaagtattgttcaatttcagggtgcttctcttcctcacaagttcgcatatgtctgatcgaatgctgcctcttggtcataaactcaactgtgatatccatcttgcttcttgaagaagtttttccaaacctcaactaagtttccttctctccctagaagacagtcaccccaattatgagagtgttgtgtatattttgattatacatacaattggctcttccaataatgatgagaaagtgtttaatataattattttctgatgcctttagtctgtcaccaacaccttctcactgaagaatcaggctgatatttttgatctaatgcagtgatgggatatatagaactttagaatatgatatatgtgtgtaaagtacttaatgtctagtgacacacatatccattttcttgcatattactttgttgatgttaattttttatattttcttagactttagctaattttaccagcttctaatattatgtacatgtttgatttcttttggagagaatttgaaagggcataacatcctaccttaaacaaacgactactagaaaggatacaagaatgttttaatccatgaaataagttgccagatattataatttctacattttactgaattaggctttgagaagcagactgtcttacataatttgtttagttagttgatattctattgccatctacaaaaaatctaaaatcccttgtcaacttcctctgcatttccccaacaaacttccttattgttcaatacagacatttaataaattgttgatgagttttgattatgtctcgtaccactgccatttcatgaatgaactttctgtatttcagctagttcctttaatcaactatttgtcaacataatcaagtataagtgacactataccttatgtttcacagccttttcactgttttctaagacaactgccactgtgatcatttatatcattagcccacaacttaacaactaactctttaatacctaacacatgcatagcagcctatttgatcaaatgtgggaccaagatttcaatccagcatcagcaatttttccctacattctgtgattttggttttataacttgatatattgttgctaaataatttctataactaatgcacaatttttttattctcaaactcatctactttgaattttttaaaattccagtggagcttttgatgtcttaaagacaaatactgaggttataactaaggtacataatttggcaatattcaaaccatgaatctgagtttaacttatttcttttttgtcctctttttccacatcatattgcttctaattacatgaaaaggccattgaagttcagtctttcactctttcaacttatagatttatgcccaattagaaatatttctattccagcattttcaaaataagggaattctttgaggttaatttaaaaatgtatatcttgaattgatacctcaagatttctgcaggctgaatagaaacttagcgaaggagctgaatgtattcttaaaatgatttaagaatgtgtggtaactctttaatgcacagagatgctttttaaaagtatttgtcaagattctttgaatggcaagttatcttcaaaagttagcttagatacaaagtagggtttataagaaggatactgggtgatttcatctcatcaaaggaagggcttctagaacaaaggaaaccagggacaagaatctgtcagcatgctctctcttccccgctctttttgctgattgctgcacaacttctttttcccttacggcagcctggcttccttaatgtgtcaggaaacatggctgcagacattttttaagtttagtatctttggctcctaccattgactcttactcagttgcagtttggacacatctgattggcctggattgggtctgatgccatgccttgccattgattgactggaattatcaatcagtcaatcaatcaaccatggtcaggatggtggggttgtataaacaatagcaacagtgactctaatcatgaaaatatctaccatatccattaggaggttttatggcacaattaacaggaaacttgattcaacctggtttaaacacaaaggagcaattcattggtttttaattctggaaggtttcaaagttgggtgtgcctcaaatctctcaattcagcattttaattatgtcatcaaatattcaactgtttctgtttttactttgtgctactccagtgtgagcctcatcctaaggctggctcctctcattgctgtaggggtgctgctctcacagtgggtactcctcacccacatcagaaagagagatggcttctatcctgtggtaagctagagttgggttgcaccatcttgcaagagtcaattttgctcatctattcctattctgcatttaatgacttgttgttaatagcttgaaattggctatcgtgggagtatttatacgatggaaattggcaaatgccacaaatctctcggagagttggttgttatatttaccagcatactactacctctattccaacttccaaatatcaaacaagggtgttgaaattcacctttattggactggattgggtcacacacccacctttgaaccaaggtctatggccaggggacttggaattataaagtaagtgtgcataacgattttgtcagcgtgctcttgtaggaagagtattctaacagcaaacagcaaacaggatgtctgatttcagagtccaccgtgccatagcatgtgcttatataaaataatgtagtttgggtcattcccaatggggcatttgtaagtaagtaaattttgtgtgttggggtgatgtggatcattagatatatgttcaagttagcatcgccatgaaatgaaagcattttgttcttgtggcttgtaaatgaaaatgggaaaatatttcacattgttaatcatcagagcaattaaaattaaatatcacaatgaagtttcgtttcgcatgcaccagaatggctaaaattaaaaagactgacaatgtcaaatgttggcgtccctgcagagcactggaagtcccacacatccctggtgagaatgtatactgatgtaactactatgagatatagtttggcagtttcttgtaaaattaaatacatacctaatttgggggctaataatttcactcccatttatatacccaaaggaactgaaagcatgtgcccacacaaaatctcatgcatgaatgttcatagcagcattatccataatagccaaaaggtggaaacaaaccaaatgtctgtcaactgatgaatagataaacaacatgtgctatcactataaaaaggaaaatattcagccataaagaggaatgacatactgacacatgctactacatggatggactcaaaaacattatattaagtgaaagaagccagccacaaaaggtcacatattgcatgattttattcatgtgaaatgtccggagtagacaaatccatagaggcggaaagtagtttagtaattatgtagggcaggagaccatatacaggaaggatgagactggagtgattgttaatgggcataacattttcctatgggcaatgaaaatgtagaattgggaagaatgtcagatgccaaaaatgttgtgggagagtaagtcggcaacaccaatctagggatcatttggtaacctgaaaaatagtcttaccttagtgccagtatctaacttctgaaaacttattctgatgaaatgatgaaaaacttcctcaaatatttatgtacaggaatgtttgtttcaacaatatttttatttacagaaatgtggagaatatagaatttcaagcaataggggattgatggaatgtggatggcacatctatatgttggaatttgatataggcattaatatattatgttggtgcaaaagttaggctggtttttttcctttcctttcataataatataatgttttattttatttgagatggagtcttgtgctatcacccaggctggagtgaagtggcgcgatctcagctcactgtaacttctgccttccaggttcaagcgattctcttgcctcagcctcctgagtagctgggactacaggcgcgcaccaccacacctgactaatttttgtatttttagtagagacagggttttgccgtgttgcccaggctggcctcgaattcctgaactcaggtgatccgcccgcctaggcctcccaaagtgctgggattataggcgtgagccaccatgtctggccctaatataatgttttagaagaatatttaatcacatacaaatgcatgatggatgtaatttcatattgatacaaattaggttaccatatgggtgtcatttcctattaatacaaattaggtatgatccaagttaatattttaacagtatgtgttcacctacaaaaatcactggatatgttgtagtggacacacatctttttaatttcttgtttattttgttttatatttttctttgggggatggtaggctggagcatatattcacattataattggcaaacaaaacaataatatatattttatagtccttaaacactaatagtgtttgtgtgaacatctaaaatggttgttcaataaacattaaggagtttctaatgatatctccatgataggagtcccttatctggacataagcttggagcaagttttctcagtagcagcgctattgacatgttgggctaggtagttttttgtgggtcccagagggtccggggtgtaggtgctgccctgtgtatagcagcatcttcaggagcatccctggtctctactccactctacagtgtgacagcaaaaatgccttcagatagtgctaggtgttcttggggaggcaacacggtccccagtttacagtcactgagttaaaggaaccgttatctaaagaaaggaaattctgaattgtttcaaggtggaaagtgtctactgtgaagtcctacctgttttatcatacctgtgcttgttttgtagttagagtaaacattgtttcaacaggaaactaagttaaatatctcgtttctcattttaatttttatagcaattgcatgagtcatcatcacatttttgtttttatttttatggccttaattgtttgtgtaggttctgatcataatgcggttgttccatgccttttccagctcgttccgctgtgacgggaagctgtgtcaacgatggcgtgcacattatcagaggttacagcgtcatgtccaccccatttgctactgtgtgtggggatgagatgccagctcccctcaccatcgctgggccggttctgcttaacttctactccaacgagcaaatcacagacttcggattcaagttttcctataggataatctgtgagtagccataatgacagagtttggaattttcttcttttctgagtaatgtatacaaagagttttcactgcgattcatacagcactaacttgaagattcagagaatttaagggaaaaagattgtcagtgaggttcatggttaaaaaatacatatacacattttttcttaaaaagaagaggacctttttcaggaactttggctagaactactctgaaaatcaaatgaagaattgacatttgttttgtaatttaatttaaataaatactactgctatttttttgtttttcttaccttacacaaagttgcctgttggtccaaattatccagatgcctgttttgtttccccaagtcattttgctaatacaaaaattaatattttatatatttagaagaaatataagagaatgtctttacagtctgataggaaagacttttttaaaacactatgcccaaaacaaaagccctaatggaaaagattgatatattcaactatgctataatttacaacttctctgcatcaaaggcaaagagaaaagaggagcaatagactggacagaggcatttgttgctacccagaaaattctaagattgcatttcctgatcttgaatagtcttttcccctcctgcctggttagtttgctgacaatatttatgcactatctaatagacatctcagctgcagtcaaactggcacacaaatcttgtaacatctttcttgagtctatttcatctttgctccaccaaacccattgctaaaggtagaaagttaaatagtttcccttggaataaattattgttcccatctccagagaagactaaaaacatgtatttacttctgaaaaggccctccataatttgttcacattagctgctatcggcatcctgactcccacagtttgtaaagtatgactacatatggctgtgtagctctgttggctctagcagaatagaaccacgcaattaacgtttcctctcccgtcgtcttgttgaataaagagaaggatggatttgttttattcttttggcacaactgctgctttggagaggtaaactcctgctttatattcttcttctctttaatctctcattttcctacaaggaagtagtcaagattcaatatattctagtataagagtcccacttaaagagtgtcgttgatgtgaagacttcaaatgctgatattgtgcaaagatgggagttatttaggccttgataaacttccagagaccacataattgtgtataaagtgaaaaggagtgattgctacccttatctgacatgtaattcacttttacagatggacctgggggtctgaacacacaagtacttacaggcacatagagaagagtgctccctgcaaggtgggctcagttgaggcaaaaacagtaaagaaataaagagcctgacatggcagcctcaatttgttcctcatttctgaggatgtaaagtggaacgtgtccactgatagtgtataaaccatggaaatacttcaaaatgcgttaaccccattataattttagaatcataaatatacatagataggtctttccactgcagggagagtgatcatcaggaggtacaatctgatcctcatatgtaaacccaagcaaaaataatcactttatattgtggataagaaggctttattacatttttatgtctgtcgttttattgactaatggatctagctcaaggctctgagctgttaattgctggaatcctggagaggaacgggcctggcctcctcctgcttgttgaggattgaggatcagtgatattaatacaaactggggcaagtttagtccttaccagtctcacaactgactgcaaatccaccagactggagagctatacatttgagcccacagaaggaactaaactggaaagctccaaaaatgatttccagtagtttaccatataatattctatccctgacaggagagacagggatctctattatttcagatttccagatcacaaccttcctagatctgtacgcccagaacatcattctggccgccttttccgtacttcgttactgttgtcatccctctctcaacctgtcaatgaaatacagctaagtgatggtgaaatgttcctgctcgtcattttcactctggccattaatttgactcagactgattcctttccaagatgagcctttaaatattcttccctgtttctaccctcttgctgtctttcatcttccttcctagtggaaaaatcagaattatgtgtaaacacaatgaagggagatataagtcactttaagaaaaataattattacctcttttagggaaaaatgtacaatagtatagaatctcttaaaatcatttttccatgctgggactaatcgttgttctcttcatattcccttgtcttctgttgcagcctgtggtggtgtgttcaatttctcttctggaatcatcacaagtcctgcctattcatacgcagactacccaaatgatatgcactgtctgtataccatcaccgttagtgacgacaaggtgatcgagctcaagtacgtaagacaaattggctttcttaagaaaatcctttcagcattatttatagaagagccattcgtttattgatggagggcactgattctcatcggcagtctggagggaaatctacacagaggagtgatgttcctagatgacagttcaacctgggaaatgacgctccccctctccacacaagccggtagtaactaagggcaaaaaacaagcactcaccagttaaaacagtcgttatagtttcccaacaattgtgaaggagcatcataacatggattgtcaaggtataataagcccatcttgaaatcaaaggagagaggaagggcaagagaaagcagttgccatgtgttgggtatttattatacacaaagaactttgattcacacgtgccgtaattgtctcattgtattcttaaaacagtcatatgaggtatatatagattctagattgggaattgtatagattattcccatttcactgatgaggaaactgaggctcagaaggatcaaattgctttccaaaagtaacacacacataaagagtcaaaatgtgtattcatgccaggcttcctccaaacaccacatcctcaatgtttcccaatactgtctctcaaagtatacattttcttttttcttttcttttttttttttttttgagagaaggtctcactttgtcacccaggctggagtgtagtggcacaatctcggctcactgcaacctctgcctcccaggttcaagagattctcctacctcagcctcctgagtagctgggattacaggcaggcgccaccatgccctgctcagttttgtatttctggtagcgacggggtttcaccatgttggtcatgctggtctcgaactcctgacctcaagtgatcctcccgcctcggcctcccatggtgctgggattacaggcatgagccaccgcacccagcctcaaaggatacattttctaactacttaagaaatctatttttatacctgtgtcagaacacctctaaactgatgctatgagagatagcttgagtcactggtcaattttcttcccagtcttacctattcccaacaagactgatgagggcaatgcaacctcccactctccagaatgataaagttcaagactgttttcacctgacagcctatttcagtgatatacgtatggcatgtggtgggaaactctgacagtaatattgttcatggtcatgtaggactttccatacagaagcctgatgggctaagaccacacctacctacctacctacctacctacctcccctctatttgtctgtgatcattttctaccctaaagattctgtactccctgcagtttacttccagaggcctcatgtatcagttggctctccaagtgaacaagagatgtcttgatgaaagacatctctcatcaagcctgatttggttcctgtatcaggcgttctataggctggacctcgaagaaaactgcagctcttacctggactatttgtaggaaaacagagtgtcttttaggtcttggggacaaaagaacagaaactgtcagatggccaggagcaggagttctgtgaagtatgcctgcacaggcgtgaaagtgtaagggggagccatttgctactgtgactcactatttgtttctcatatgtgtaggattgattattgccttgttctgttcaggttgctttaacaaaatatcataaactgggtggcttataaacaacaaaaggctgcaaaagtccaaggtcgaggcagattcgttgtctggtgagctcctgttttctggcttatagaaggtaccttcttgctgtgtcttcatgagctggaagggcctcttataaaacactaatcccatttgtgaggggtcctcccccatgacctaatcacctcccataggccccacttcctataccattagcttagggaacatatgaatttaggggaacacaaacattccaaccatggtatacataccaactcatagaggtatgttatatattctctctctctttatctgtctatctatctatatatatatgtatgtatacaatctaaatgtattttttcagttttcagcctggatcctggagctcaccataatgaaatttacatctgcatgtttattttattttacttatttatttatttgagactagctctcactctgtcgcccaggctggagtgcagtggcgtgatctcagctcactgcaacctccacctgctgggttcaagcgattctcccaccttagcctcctgagtagctgggactacaggtgtgtgccaccagcctgggtaattttttcttttgtatatatatatatatttagtagagatggagttttgccatgttggccaggctggtcttgaatccctgacctcaagtggtccacctgcctcggcctcccaaagtgctgggattgcaggtgtgagccaccacacccagcctacatctgcaggtttagaaaattatttattgcgcactaagagcctacattctaggaaacagataagattctaggtgtggtagaagatgcagacattaataaaaggctctcaaaagattgtggttacacaagcttttctgtcaatgggcttttcagatctcttctgtgctctcctgggaaaatgatgtaaaataaaaagccaaagcagatttaagtcctcttagaaactcagattttatctctctttgtggattctttttgtgaaaaataaatgtgttgtctgtagagaattaaaatgaatacagtgttgttggaaattatctagctattgttcttccctgatcttttacaataacattaaatgttaaatgtggtaaaagaaaatcaatacggttttcatcttgttcctcatcagtctgaaaaccttcaaccaaccaaaaccttttagaaaaaaaaccaacaattttttttctcaaggctgttgaaaggaagcatttattatatattttatatataaatatatattatttagtctatattttcaaaattattccatattatgaattgtttattagagctactgccaaaataaattgaaaatgcaggctgggcatggtgtcccatgcctgtaatcccagcacagggaggctgaggcaggcaggtcacctgaggtcagaagttcaagaccagcctggccaacatggcagaaacctcatctctactaaaaaatatacatgtaattaaaaaaaatagccaggcatggtggtggacacctgtaatcccagctactcgggagggtgaggcaagagaatcacttgaaccagggaggcagaggttgcagtgagctgagattgtgccactgcactccagcctgtgcaacagagtgagactctgtctcaaaaaaaaaaagaaaaagcagaagaacctataaaaatgaggacaggatatcaaatattatttttttaaacaagttttaaaaataagctataataaacccaccacaaaactctaaagtaaatccatgtaagaagccttgcttgttcaggaactctagaaatcgttatttgaaatgacaaagaataagacctgaattaaacactgtataagacagagaaaagttagggatgcatctgtcaggataggttatgcacatagtaacaaacaactccacctcacagcagcttaactcaacaagttgatttctcattgtaatgagcatgttcagtgtggcctggcatggaagctctgctcatcgtggtcatccaacaacccaggctgatggaagcttcgtttttacatttgcttccatgatcatcactgcagtgggaaggcagtgtggcaaagcaagtagtcatttgtaaagcttcttccgtaaagtaatatgtatcccttctgcttacatttctgtggtcaaagcaactcctagcagccatgtcaagcctcaaagtgtgcccctagggcaatcctaccagtgctggggaggcagagagctgggaccatgtgcagaagtgtcagtgaccaccacagaggtcttaaatgtaaatttcctgttcttcacctgaccttaacataaacttcattttaaaagaggaaaatgagactgtgaggagaatggagctgtgattctaaaagcagcatttcttctattatattaacatgcttcccataagttctacttcatctcataaaataacaagggaagagtaaatatggtatttttaatgagacctaaaaaactaaagtattgctgggatagtaaatatcagttcaacttgtcaaaagttgttctcagatggactttaatatgccctagactgtgaattccttgaaaagtaagactgtatcttactcactttgacatccccagctgctgtcacagtttttgttgtattgtaattactaaaaacaaatttggctaaacttttgaactgatcagtaaagtactgtttgatttctaatatttcatatcaagtgagttttgaatgctctactggtagttttttccttgtcattttttttgcaagagctaaagctacaatttaatagaagtccaaatggaaacatcagtattaacaaggtacatttcacaggttcagtgattttgatgtggttccctccacctcctgctcccatgactacctggcaatttacgatggtgccaataccagcgatccccttcttggcaaattctgcggttccaagcgcccaccaaatgtgaagagcagcaataatagtatgctcctggtgttcaagacagattcatttcagacagcaaaaggctggaagatgtctttccggcagacattgggtaagaattctggacttgtaaatctatttttcaggactgttacctttctgctttatttaatttccccaccccccccccacccccacctgattatgattgcttttccttgaagcttagaagaatatgccatgtaagggcttggttttaaaacttacgtatgacatattttaatgttgtaaaaaaatcactcaacaaatgtacccagcactttgggaggttgaggcgggtggatcacctgaggtcaggagttcaagaccagcctggccaacatggtgaaaccccatctctacaaaaatacaaaaattagctgggcatggtggtgtgtgcctgtaatcccagctacgcaggaggctgaggtgggagaattgcttgaacccaggagatggaggttgcagtgggccaaaatcataccattgcactctagcctgggtgacagaatgagactctgtctcaaaaaaaaaaaaaaaaaaaatcactttggtagcacagtggaggaaggctagaagaacctacaacatgggaaggaagaagcttatgatagaaatctagatgggaagtgtcaaagccttgaacggacccagaggggaaagagataaagggaagggcagaaatctgagagacggaaggcagaatacattggaagcacagtgtttggactctgatgatattttaatgaggacatgaattgaggatgactttctataggtaatttgttggatgatggtggcttaggagactaagatttaagggagaaatgttttatttaatttggagtattttaagttggaagacctgtttaaatggagctgtctagttggaagctgatgcttgagaaggaatttggactggagagggtgatgtagcgggggtaggtaaagttaggtgagaggataaactgaaaatatgccccagattactcccactgcatgtgagaaataaattatccacatcaaacaccactggtgagaaatacccatatcaaattaactcagaattttgaataatttaaaataaaaggtagttaatcaattacctgtttggctattctaacagcatcagtgacacagtctaagatcattaatattcgactctggaaagtgttttgatccttttccttttgaatatagatgtgattaatgttctaaaaatgcacaactctccaaacaaatctcatactctgtgaagactcagaaaaatccaggcagttttctgtaataataaccctgattcacttttcaaactttctgtttcttccatagtgtggataaacttcgtttctctgatgcaaaacggagtttaccttcaacttcttgatattgggcatgtgaatttttccatgcagtacttgaggaaagcaattagacattgtgttttgaaggcttcccggtaaaccacacacctcaagacaaattgtatcagaaaatccctttgccacctcccctacttagctgtctcaacagtaacttgaaagcaagtctcacgggcagtgagagagtgttgccttaacagaattgtgtaggtgaagtagcatacaaaagccagaaggctattttgaaagaaaaattaattttcctttggagatttttttttgcacaaaaaagggatatattcttgcctttagcacagactttagaccaaatgtcctatgtctgcatttgctttgctacctttcaagttgtttttctttttcctaatatagtctcacaagaaaatggtaattgttgtgttaacaatctcctcactgctatcatctgcatgaagcttctcaagtgagccagggttccctagcctcattaaattaccatgtctttccaagccacaaagaagacatttttagacctattgtgatttaacagaaggaaaagtcttacactgtcagaagcattctctatgcacgagtcattgaacaattacagtcacttactgttttcctctggccacagttagggaaaaggtttaagtggagaatgtagaaacggaactccttgccagcattgtgttacccctgtatttcatgaagatgatttttacctctttttcatctgcataaatgccatcagccacttggaaatacttcaagtcattgtaactactctttgatggtaatgtttaagtgaaaacctaagtattatgattttgcattgcagtggtcttacaaagctttcaagaccacacactgacaagtttattgatcattctgcataactttcaaattttgtttcattttggtttttattgtttgtagtgaggagagggggaaggaacaataagaatagctttgactgtaaggtttatagggtcgtttagttatagctttggatgaagacaaacttggctaataggatgccccttttgcctccaactcatttatgtaaaacaactctgtctttcccctgaagagagggaaatcaactttgtggaccagatagtggattttcatttacaaagctgtttgctcagcctggaaaacaatatcttcacttagtaaataattgatgtgaagaggagaccattttagtctatgacatttccgtttcgatcttaactaaaacactaagtagggttttgcagatttgctatttagattatacacttggcaatgttttatgtacatctgcttcaatttttcaggatgaagagattggcttatataattatgtgactattaggttcaattcgccttgtgcatttgttatatttgtattgctagcgagtcacagcaaatttgggggaactatccctagttgctaattactaaatatgtagtgaaattgggtctcctttttcctcggaacttctgctgctggaggcccatatgcatggatgcaaggtaaggagaaagcacatttggcaagcatgagctgatctctaactgcaatggaaatgtgcctgcttgtctcccccctgtgctccaatgctatatgaataattgatcctgaatggctgacaaccagcaaaatgatcacactgggctgcagcaatctgtgaaactctgaaataatctgcaaatcggagcatttttcctaaccgagttcatagtttgcatcagattgtcaatggcttctatgctcctataaagtttaaaaagctgttggttctgtggatttggctaagtgggcatggcctataggcagaacggatgcttttaagtaccttctgtcctgttaacttctgctagtttagttgctgccccttcctttaccagcagggtcgtctcctgccttgactctgtttatgtgtgtcctgtacaaatcacttcacacttgcaaacgtatttttaaccatcagagcctccagttcttcctgagggggtctcataccagagagttgcttggcctattcacaatatgcatgtcacactacacatcaaacttctacacatagggttagatcaggggctttcagtaaacttatttatttactgtgcagtagcatcattgtttcattttttttttctaaaatgatgtattctataacacttcagcaaaacttcagtgtagaaaatggaacttggctctattagatgggaggtctgcaggcatttcaattagtgagttgccaaggagagactgaggggtgtcccctgcaagacagcagggggacagacagcacaggaagacagatggggaagacgcaccctcagggacaagtggtggcagtgcctgtgtttctggagttggttccttctggtgggtttgtggtctcactgacttcaagaatgaagccatggaccttcgtggtgagtgttacagctcttaaaattggcatggacccaaagagtgagcggtagcagggtttattgtaaagagcaaaaaaacaaaacttccgcagcgtggaagggtacccgagcaggttgcggctgctggctggggtggccagcttttattcccttattgccccctcccatgttccatttttgtcctatcagagtgcccttttttcaatcctccctgtgattgggtacttttaggatcctgctgattggtgcattttacagagcgttgattggtgcattttacaatcctcttgctagctacagagcgctgattggtgcattttacaatcctcttgtaagacagaaaagttctccaagtccccacttgacccaggaagtccaactggcttcacctctcacctggactcaaagctcccagccagcccctgttgcccagagcacacatgctgatgacgagggccactgtctgccttcctccacctggggtatttgtcacatggagactgagtcaggttgcattaaggtcagttcagagacctttgctaagagaccaaggcaaaaatacccaagcacatatataacaaggacagaatgaattacagtccaacaaatgtataaatatgttcaggtaggctgggcacggtggctcacgcctgtaatactggcactttaggaggctgaggcaggcagatcacttgaggtcaggagtccaagaccagcctggcctacatggtgaaaccccgtctctactaaaaatacaaaaaattagccaggcatggtggtgcatgcttacaaacccagctacttgggaggctgaggcaggagaatcacttgaacccaggaggcagaggttgcagtgacccagtgacccaagatagcaccattgcactccagcctgggcaacaagagcaaaactccgtcccaaaaaaaaaaaaaaaaaaaaaaaaaaaaagctgggcatggtggctcacgcctgtaatctcagcactttgggaggccgaggtgtgtgaatcacctgaggtcgggagttcgaggccagcttgaccaacatggagaaaccctgtctctactaaaaatacaaaattagtcaggcatggtggcacatgcctgtaatcccagctactcgggaggctgaggcaggagaatcgcttgaacctgggaggtgaaggttgtggtgagccaagattgtgcccagcctgaggaacaagagcaaaaaaatccatctaaaaaaaaaaaaaaaaaagaaagaaaaaaagacatatggccagatggaaagagctgattgatgcatgatatcattgcttggtgatacggctttagaaaagccctataacgttttgaatctcaatttttatctactaaaaaactgatcaatttgaaatattacaactatttaagaatgtgatggggataaagcagataatttctggaaagcaccttagctgtcagagtgaaagactctatgtattagaaagtaatattgaagtcccaaattttcaagccccccgcccaaccctatttccaaggttggagggtggctgagggtggggtgggcagggatcaacattctcaacaggaccacatcatgctacagtgatttttcgttctttcctacccactttgcagtgacacctaaccgtcaaatcctaaagtacattttataacctaaatctgaaatcaaaagctacattctgattaaatccccaggccttgcacaattgttactccatcgatattgtccatatgagtgatttacagaataaatggataaattgtgcctacttcaaaatcatattttataatgagatataataatataccatatagaacacattagattttatctagattcagctcattctcaaaattcaatcctggtttatataattgttgggtaagctctacacagggaggtaaattgaatcactttcatcttcagagaattaggaataccggatcacactcaatatttaggtcatctgtgtttctctcctgtgagtttttgcctgttaccttaacatctggaaaatgtctctcaaacacgttaaatgaagacagtgggagtggcagaaggaagttgaaggggataaaaaagaaggaaacaggaaagaaagaaagaaggagacagagaaagctgaagagagtctagggccacaaagatggaaaacatggtcacaacaaatggaaaaaaaaatctaacatgtccaattcagacttctgcttctagttatttttaagtttcccagttttggtgttaaatttaaactttgtgaggcattctaaaatagctaaacaatacaagaataaacttaaaaattcaatggcataaaaaatatatgtatatgtctctaggtacctcttggtggcctgattgaagttgtcagctcacgttactgttagaagtacaaatgtaataaggaagttgaattataacttgaataattggataaatcactgatcaaacaactctcagtttagcaataatgagggtattgctccaaagcaaccatggaatgtcatttttctggtttcctaatgtcatttgctccctgtgatgaagtctgagaatgagatgagctgaaactgtaaacccatttaaagaaaaacccaactaagcttatttccgctctttttaagccctgtaccttttactggtgattagacttcccttgggggatgatcctaaagacaaggttatcttcacgttattctttgtgggttttatggggaaaggttttttgctgagctgagaatgtgggaacgggataaagaaaccaacaaatgcttagttcaccaaaactttacaaaagcaagtagacaggagttaaataccaaatcagcaagaagaaaggaaaggttcttaataaacatatttcaacactggagtctgtgcccccaccaatgactagattgccactcctggtcttgaaggatggggctgtccttgtgaaaataaaaccacatggtattgtggagaccaaactaagtgataaaattgagttaatggtaaattataggataacattttgaaaaacactgaagggaacaggtgctgggaagaagcacttattatgtgtaatctaaaacacaagacgcgacctagttttgtcgcaggtaactggttattttgggttaaattatttgtacccataaattccctataataatcaacatccttactcagatcagcctggctttgttatagcattcccaggaacataaaaacaaaatatatgcagtgagcaataaaaattttaaaacattcttttgttataaataaactgttaggaaatataatagtgggaccgtgttcttctcttcattctaatatgtgaaaagtctgttaacattacatggtagctgtacattttgctcactcacaagtaaagacttgtcaggaaatcccagggcatcgtgaaaatcactgcttgtccctgaacctgtgccctaccagatgtagcatgagctgcttgatgtatattactttatctaatcctcagagctaccagatgagacaggaattaccccattttacaaaggaagaaagaaaaatttaagagattaagtaatttgtctgtggtccaaagggtttgtaagaggtaaagccaggctttgaacatgagtttgactgtcccccaaactcctgattttcttagtaagccttcattgcctctgtggcaattgataaaaatacccagggatgtgatgtgtgtgtgtgtgtgtgtgtgtgtgtgtgtgtgtgagagagagagagagagacggagtctcactctgttgccaggctggagtgcaatggcgtgatctccgctcactgcaacctccttctcccaggttcaagcaattctcctgcctcagccccttgagtagctgggattacccgcgcatgcaaccacgcctggctaagttttgtatttttagtggagacgggctttcaccatgttggtcaggctggtctcgaactcctgacctcatgatccaccctcctcaggctcccaaagtgctgggattacaggtgtgagccactgcgcccagcccccagggattctttttaacagaaatgtatgcaaaagggcactggaagcaagaaagaagggatctatggtacttggatgttccgtggaagaaaggacacaggactgttagaggatgcacctcagagaatgtgagtcctgaattatggtgcagtgggtaagagggtaaacgtggagcatcacatcccagattcaaactcagtttgtacatctcattgaggtcgatcttggacaatttacttatccactctgagtcttgatttttttttttatctgtaaaaacagtacactaataataatgaccttatagggttcagtgattaaattagaaaatacttgtcactcatttcacatgcgagaatttttagctataaatagtattattttggaaggataagaaggcattcattggccaggcatgctggctcacgcctgtaatcccagcgcttgggaggctgaggcgggctgatcacctgaggtcaggagtttgagaccagcctggccaacatggtgaaaccccatctctaccaaagaatacaaaaattagctaggcttggtggcacacacctgtagtcccagctactcgggcagctgaagcaggagaatcccttgaacctgggaggcagaggttgcagtgagtggagatcacagcactgcactccagcctgggtgacagagtgaaactctatctcaaaaaaaaaaaaaaggcattcattgggaaaatggacaatctatggagaaataaaacacatgcacaaagttacaggtgcatcccatttcaatggatgccagctaacctgaacattggtaatgctttggggcataaggcagagaacaataggtgctgagagaggagagatatgcaaaggccaggcatggagggctctgtatcatgtgcaaagaggagccagtcattgttttgagctggagcgtgctatcatctggtcagatttattttagaaagcacatcccagcacctgtggggatgatgttttgaagcagcattccagggaaaaagttagaaaagtattgcaatagtttaggcatgggatgataagagcagtggtaccatgaaaataaagaaagagactgaaaggagaaatcctcaagatatagaatcaataacacagtgttccatttgagagaagcagcttgggaagaagaaataataatgctcctaaggtttctggacaatgtcttgtgacaccactattcaaatagaaaattactaggagaggacagtgctttgcagaataaaataataaaaatgttgggttttgtctggagaatttgatgcctttaggatatccagctagtgatcagtaggtagtcagataagagagttagaagctcagtagaaacatcttggctggagttttgctcttttttattttgaagccatataatgtggcacatgtacatttataattattatatctttctagtggattgactgataccattatgtaacaacgtttttaaatgctttttgccttaatttctacttgttctgatttagtataacttccatagctttcttttgattcatatttgcgtgatatgtttttaaacccttttattttcaacttgtctctatcctgaagaatatatttggcttttgtttggctatgcctttctattgaagaatttaatgtgtttatatctgataaaattactaacaatattagttttagatagacctttgtactatttgtgttttgtttgtcccacttctttttgttttcctttaactatcttttctttttaaaattaatcacttttttattactccccttttaaaattattatttatacatcctgtgactcttgtttcagtagttaccttagagattacagtattcaaccttaatatgttagaatctaatttaaagttgatacttttatcatgttataatcaataatcaatccaaggaccttggaacattttaaacccacttacccacttcctgtcttttgtgctatctatgccaagtattttaattctacgtacataataggtacacaaaacatttttattgttttatacaattactaataatgtaaaattacccttgctgttatttttcttttcttcctgaaattctatgcttccatatgggattaatgtatttcttttggaagacctctcttttatgtttctttcattggagatcttctggtaaaaagtgttctttgtttttgtttttcgaaaatgacttgattttcttaaattctgtgggattcttgctctgagtatagagttctaatttggcatttattttcattcaggactttacgatgctattccatcatgctctggcttgtattattttgattaggaagccattgctttctataactggggacccccatccctcccctggtcatctcattgtagagtactgttattgttgctgttgttgttatttaattttattttagccattctggtaggtgtgtattaatatctcatgtgattttaatttaatggtgaacaattttcacgtgcttttcgtcatctatatatctattctctggtgaaatatctatttatatcttttacccattttctaattgaattgtttatttttctattgttgggttttgagagctttttatctattctcaatcaatgatcctttgtcagtatgtggtttgcaaatgttatttcccagtctatatcttgccttttaattttcttgccttatattggcctttcactgaacaaaagtttttaatgttgaagttcaatttatcgactttttcttttatagatcatgtttttgataccaagtctaagaattctttgcctaccccaaggtcccagagattattctggtgttttcttttaaaagttttatgattttacatttttcatttgtgtctatgatccattttgagctcattttggtttagatatgagatttaggtggaagtcagttttttgcctctggatgtccaattgctctagcaccattggttgaaaaggctgtccttccttcattgaattgcattggcacatttgaaaaaaatcagttggacatatttgtataggtctatttctgggttctgtattctattccattgattatgtgtctaactcctcaccaatatcacactgtcttgattactatagctacatggtaagccttaatatcaggtggagtgattcatcccacttcatttttctttgtgaagttgttttagctatttgaaggcctgtgcctttccatataaattttaaaataaaggctgggggcagtgtctcatgcctgtaatcccggagctttgggagaccaaggtgggaggatcccttgaggccaggagttcaagaccagcctggccaataatagcaagaccctgtcttcaccaaaaataacaaaattagccaggcatggtggcatttgcctgtggtcctagctaactgggaggctgaggtaggaggatcccttgagcccaggagttcaaagttgcagtgagctgtgatcacaccactgcactccagtctgggtgacagagcaagcctctatcctaaaaaaacgtaaataaataaaaataaaaataagttaagctttttgatgtttgcagaaaaaccttgctgagatttttataggaattgcattaaatctatccatcaatttggggaaaactgatgtctttactatgttgagttttccaatccatgaacatatatgtatctagacttatttaggccttcttttatttatttcattattttgtaattttcatcacataagcctgtatctgcttcattaagtatatacctaaatatttcatttttttgtaatgattataaatggtattgttttttaattttggtctccacatgttaatggttagtatattaaaatttgattgatttttgtgtattgttcctttatcctgagttcttgctgaactcatatgttagttctaagaatgtttttccatattacttgggattttctgcagctaatagttacttgcaaaagtggaaattttatttcttcctttccagtctctctatatattttttcttgctttattctggcaagaattctaatactacgctgagttagaggggtgtgaaatcaatatcgttgccttgttcctgatcttagggagaaagcgtttagtatttcaccattaattatgctgttagctgtaggtttttgcagatggtttttatcaagtcaagaaatttctcctctattcctagtttgccaagagtttttatcatgaatgtgtgttggattttgtcaaatcctttttcagcatcaactgacatgatcatgtcattttgcttagtaaattatttttttaatttccaagttggaaagaatgattctcataaaatgccctggggctaatgatgtatgcatagagcattttcagtgatatctaaataatgcaagataaattaaaagataacgataaaattttccttctcctaagttctttatacaagtattgctctttttctattaactacagctactgattagcttgctgaaattacctttcttttagtaaattaccattcttttagttttatgattcctaaatattaccagactaaatacacattttaatttagattaagctgggtttcaaattaggataactaaagtgagtcaaattaagtgaagcaactaaaaacaaacaaaacaataaaaaacctcattacaaaaactactaacttttttcttgtaaaacataaatattatacctgaagtattgtacacattggagattagggagtaaaataataaacactgtttacttttagagaaaaagacaaaacaggttcgtctgaaacctagtagaatgtttttacatgaatacactgctttggagcaattgtgtatctgcagctttataaattacagtaaggctgattccaaaaaaggataatgcatttctagccctgcatccctgggtggtagaaaggaagctgtctaggtgtgctcgaatttccctaaggcaccagctttaaatgtctttgtattctgcttcctgtagtttccagtaaagcttccttcagctgcagcctaaagccacagatggcttgctggaaacaggagagggcctgaagtcaagccagtctgtatctgctcgtacagcacactgtgcaccttctcagtagtggtcaaccagagacaggcagagatactatccagacaacctcaggaaaatgtcagccgtatagaatgtgagccacaaaaatgtcaattctccaaataatgatttaaaaatgtatctaactccactgaagccttcgagatgttttatccaagagaatgtaactattttttcccttatcagattgatcttggcttaagcttcactctgaggtttagtcattggaaggtaataattcaggattcggttaccgatttttaattaagtagatttagacctggatctcactccttattatggggttatatttccaatatttctttagccaaaacatgtattttctctgaagaaatggctcttttgtgtgagagagatatttccaattcagggaagaaagagtgacgtttgttcttggacgcagggtgtgtcatcagagagtgactaacacacctgattgatgaggcaggtgctgatggatgagagctgtctaggtggccccaaaatgtgtagtaatgaggaaatgatggattggtgatgctaaacatatcaaggttaagatggcttatacattaaaaaatgcaatttcaaaatatcagtatggtaaatatatatgactttctgatgcgtgggactctattgcatagtcacagaggtcgcccttgtttatattcccccaccattgaaacacagaaagagcaatgtggcaatagctccttttgggaaagaacccttcttttgttaatattgatcattacgttttctcaaagacatatacacttacatttcattttgcatggagcagttttgctatatttaagcactaaagagggggaattagagcaattgctattccctgcactacacaaataactgttcactcatgtaatatgatattcacttcaaatatttgattattttggccaggattatctcatgatatttttctccatgttctttattctgtgtgtatattttgtgaattgaacaatgagctctattatagtttgatagctcaaacaagctattaatattagttgtgtgtattagtctgctattaccatgacagtgctacttaacaaaccatccaaaattcagtgtcttataatgaaagcatttgtttttatcacttatgggtccacggactagcttgcctgcctccgttccaagctgcgggttggctgtagttggctgtaaagttgagtctgggttcaagtctgctccacatgaatccactttttctttgaaccagcagttactcagcacatgatatcttagtggatcacaggagcacaaagtcctagacaacaataaaaacaagaacaaaacgtaagcacgtttaaggcctctggctgcttcatgaccactaacactcattctaaagcaagtcgtagggctaagcctaacatcaagtgcacagaaaaatatactctccattttagtgcagtgcaaagagagatactgaagaattaaaaatcagccagttaagctgggcatggtggcatgcacctgtaatcccagctattcaagaggctgaggtggaaggatttgcttgaccccaagaatacgagaccagcctgggcatcatagcaagtcctcatctagaagaaaggaaggaaggaaggaaggaagggaaggagggagggaggggaggggaggggaggagagaggaggggaggggaggggaagagagatagagagaaagagagagagagaaagagagagagagaaaaaaggaaaggaaaggaagaaaaaagaaggagtgagggaggaagagaggaagggagggagggagggaggaaggaaggaaggaaggaaggaaaggagggaggatggatcagccaatttaccactcaatccatggcaaacacatcagtgatttaaggatgcttgttctggggttccctggaatgtgggtgtgctgctttatggcattagtcatagcagtagtactacataataagtgtgtgtaatggcattcactgggcccaagtacaattgccatcttgcccttatgaacttattagtaacagttaataaacaagtagtgataaatatagcttgaatgtttaaaaataacatttagtttttgaagctgatgattaatagaataatgcccagcaacagcattttcctgtctacctacctccaactcttcagtgctcctacctgcagccctcaccacagcaatgtcctttcacctggtctcatctccttcagtctcgttcccttgcatgtaaaatgctggttctggatcaatttttagatcagacttgattagcaagtgcatcctgattctaccacttatttgattaaaaatctttcaactgaatcccattagccaaagaacacagtctgacagccaaactctgtataatccagcattgaaggccctctgtagaagaccccatcctgttttcccaatcctaattctcattattctccttcatgtgccctattcttttctcagagttatgcttgcccatgcatataatgtaaattcttgcccatttagccttggatcaagagattctttcaggctggaattgccaatgccaattccatttctacatggttttattctatttatgcttcaagacccagatccaaatcacctcctccttggaacagttgagatcctcatagcccaaagtaatcttcatctttttgcaaaactgtaagacgtttctgcctcttttactgaacctatcattttctaaattgcgtcatcattatttatctatgtcttactactaatggactatcacttatctttttctacttaaatactaaatatactttcttgaatattgaaacaatatgtaataaataaatttatcaatccattcataccctcagtcatcgttcttctgtgctacgcatgccaataagcttaagtggtttccttaagtaacagtcagttcacactggaatcaaagctgctcaaactccacaaactccaaccctctcttgagtttgcaggcccatttcagattagcagaatcattagcaacatgtggtgaagcactgcgtattgcttacgtttcagaataattttgtcctatatgacctctgtgaatatatcagggactgggcctttggaagcatttcaactttgggaaatgtctgactatgcaaatactctatagtttcgcctgacttagaagctatggacaggccaagcctgacctactaagtaatgtgcctgtaacaaaaatcaccctgcacgtttgctatctatccattggatttacagacagggttcaggagagccaccattgttcatgtttactgccaaggtccaagtacaaaatcttagcaccccctaatgttgaaagcagtcttttcaccgtgagcagaaaatggaatgagaaaaatagactgaaggccaatcccagcgaagtttaactttggaactagccatgacctatatttgtgtagaatacaagctttatagacattaatttcagcaccagtttaatccctgttcctactagggctattttgagcttatttcaccatttctttcaaaattgtcaataaattgttcatccctttatgctcttcttaaatcatttctgagctgtctgcttaggccatggagtagacaaaactaaatcttatgttctgaggattgtttttttgtattcttttatggtagaccgtttaatcatcttgagattattctttatctctcctttgtatttttattctgaattataaaatttttatctgaaagaaggcctttttcttctataaagattttttcctttagcttctcatgttttggaaaagaaaaagttaaatatagagtgtggctgaatataaactggactgcagtgttaaatgcctctcagcctctttctatcacactgtgtaaataaaagatttgttggcagcaattttcttggtttgttgggtaaattcttcataaattcagttttcagtctgacagtgttcatgaaagcggaacataaaagtaaaacatatgcacattttccaccagctttattatgcaaagtacttgattttgtataaaactggatttttcaaggccaggaaaatcttcaataaatcacatcagcaatcccaaaaacgtctgtagaaccctatgtgttttcccacttctttcagcaactccgtgaataagaaggagacacctgaaggctctgctatggaagcaaagagcgagggaggcaaagatagagtgaggaagggaaagatagactgagggaggcaaagatagagtgagggagggaaagatagagggagggagggagggaaagatagagggagggatggaaagatagagtgagggagggaaagatggagggagggaaagatagagtgagggaggcaaagatagagggagggagggaaagatagagggagggagggaaagatggagggagggatggaaagatggagggagggaaagatagagtgaggaagggaaagatggagggagggagggaaagatagagggagggatggaaagatggagggagggaaagatagagtgaggaagggaaagatagagggagggagggagggaaagatagagggagggagggaaagatagagtgagggagggaaagatggagggagggaaagatggagggagggagggaaagatagagggagggagggaaagatgatggagggagggaaagatggagggagggaaagatagagggagggagggaaagatagagtgagggaggcaaagatagagggagggagggaaagatagagggagggagggaaagattgagggagggaaagatggagggagggaaagatagagggagggagggaaagatagagtcagggagggaaagatggagggagggaaagatagagggagagagggaaagagagtgagggagggaaagacagagtgagggagggaaatatagagggagggagggaaagatggagggagagagggaaagagagtgagggagggaaagacagagtgagggagggaaagatagagggagggagggaaagatggagggaaggaaagatagagggagggagggaaagatagagtgagggagggaaagatagagggagggaaggagggagagatggggcgggtggggggaaggaagaaagaaaagaaaagagggagggaggaaaggagggagcccaggagggaatgatctgatcatgttctcagagtgtgacagaaaatggaaactatgttctttttaaaaaccctccatgtacaatgtaaggtcggttctgtttggtctgcatagtgatgtctttgttttaatgcagggcctcagcaaggatgtggtggttatctgacaggctcgaataatacctttgcctctcctgattctgattcgaatggaatgtatgacaagaatttaaactgtgtatggatcataattgcacctgtaaacaaagtaattcacctcaccttcaatacatttgctctggaggcagcaagtactaggcaaagatgcctttatgattatgtaaaggtaaggctgttttatttttttaacagagtctattcatcccagactctaatatagtgtattccagtttatatcgttacaggaagtcctgctaattttgagtacaggtgctactgctttttaaaatgaccttttcttcagtgatgctacatttaatattatagatgctctatcttcatatcaaattaatctttaatatgggtgactcaaatattttgtgtgactggcttccaacattagcatttaaatctcctattcatcaatgtcttgcaaaagacgatctataggaaggtcggttttctggagagagatactcaaaggacctttggcaaatcctaaaataaacaatgtcagtgacacaaataatcacctcttaatttgtctatttcttaggcttatagatttgcttatcacattatgtttagatattaaaatggttctgaaatcccattaaaagtaaataaaggctgggcactgtggctcatgcctgtaattccagcaatttgggacaccgaggcaggaggatcacttgaggccaggagtttgagaccagcctggccaacatggtgaaaccctgtttctactaaagacacaaaaaattagccgggtgtggcggcgggcgcctgtagtcccagctgctccagaggctgaggcaggagaatcgcttgaacccgggaggtggaggttgcagtgagctgagatctcgccactgcactctagcctgggtagcagagcaagactccgtctcaaaaataaataaataaataaaataaaaaagtaaatcaagaaacttctgttcaatttttaatgactttaatattaaattattatacctatcaggttatataggttcagattacaagtgttaagtagcatcaatcagtatttactactgcactctcaggggaaaaataaaaagtatggcaagatttgtatttatgaggagcttaagtctgattagaaaattatgggatgacacatgcaaattaagaatgcatagttcaggatagtcagcatttaagcgctaatgaatgcattcgatgcaggcttgaagcaatgtgcaagcttagaaggaaagaaagttcatgaaactcgtgtgatcaagaatgacttgatagagcgagggaaaacttactcaggtcaggagagaattcaggcaaggtgaacattttcaaaaaggcataggaattgatacgtgcatgttctcgaaagcgtaaagaggctggctgtgttgaagcagaatagtgctaaagagtagcaagaaataagatggcctacatagagaaataccgagattacaaaggatcctgaaagtcaaactaatgactttagactctgtgcgggtgaaaataaggagtggttgaaggttttccaatgagtgaggtgacaacagcagtagctagggaagactaacctgaaatcagcagctgtgggaactggaaggagaggaggctgggagggctccagagagaggtccctcctaggtgagaaggtcagtcttagacctggatcaggggtgcagccatggcggtgatggcaagaggggtgcaagagaaacttaagttctaggattgcaataaactttagagaaaataattttaaaagaaaaggaaggaaaatttgtggagggaatacccatttgagcacttagttacatgcttttgtttttactatgaaaggggctaaggttgggaggccagaaaaataacagtgtggtttggtgagagcaagacagacaagtgagactgcagtgggcagagaatggaacggggctccggtgagaagacagctccacgaatagagaggacacagcaaagagccttccttccatcaggagaaaggatgctttcttagagggagtcagcatagattttcagagagtcaggctctcagctccaggaaaagtacccagggaggcaactggagaaggcaaaaggcacaggaaaagaacagacgcgtcatgaaaagataaatgtgaagaccaggaatagtgtagtatccctgaagtcaaggggcagggggattcttttacaaagcatgggtggtcaatactattgaattgtaaagtagaggccaagaaagggaaagatgaagaacagcctcattgcactggatgacaaccatttaaataaagtattggcacagaagctggatcagaggagttcatgaaagactaaagatagcaaggaatgtcaattccagtttaattctcctttcctaaaatgagacctggccggccgagtgcggtgactcacgtctgtaatcccagcacactgggaggcagaggtaggcagattgcttgagctcagaagtttgagacaagccctggcaacatagtgagaacccgtctctacaaaaaatacaaaacaattatctgggtgtggtgctgtgcacctacggtaccagcttctcgggagactgaggtggaaggatcccctgaacccagaaggtataagctgcagtcagtcgtgattgcatcactgcacaccagcctgggcaacagagtgagatactttcgccaaaaaaaaaaaaaaaaaaaaaaaaaaaaaaggctgggagagaccaaaatgactagagcagtcctaaagctgaattcaaaactgtttgagagctctcctggctttacagaaaggtaataaggtttagagacggacagtatggggactctaacccaattttgctgtcagacaaatttcctaatctccccgattcctcatcatttcgtcaatttttctttaaatcacataatagtacctactgtgaaaggcagttttgaggattgaaattatgtgtactagagcgtttagcactgtgcctgacataaattgtaaacaaatttacctccctttttttccccgttggagtaattccaaataggcatgggcactatggaatttctttttcttaaaaactaaaaataatggatttgcatataaaattacaattttaaattcttatagaatgatttgagtatggccctgctaggagagttgactggatttactctcaagatccatttttatggagtgtgatttgataatgtcatcaaaacagcctgtcattgtctgaatttccgcaattcattcaggccagaaactgcaatatcaaaaacaaggagttattttcttgcttcaaaataaaatatcgtttttttcaaataaattctgttcagaactattcttgttttcccccttggaaaagcaatttccttccattggcaacgtttccaactaccactaaactggcagatcaaagaatagcccttggaatgtggagcttggagctttctttattaaagagatttttctgtgataaatgggacggttgattccttttagatttttttttagagattataatcaaatcactttttagaaaagctaatttaactgaactctgtggtagatacacaagtaaaatcataccaattccattattcattcataattctatcatgatcgtttgtgaaagggttgacttggagagtaattacggtaactgaatcacgtagtgaattgtgcatgtcactgagcagtctcttttgaaatccacatcgcatccattgcaggagttagttggcaagggtatgtgccaggccctgtaccagcatcactggagatgtagagagttaaagacatctcttgaagagttcaagcttcttgaggagctgctagtaaagtgtaggagactgacatgtaaacaaaaaacatacatttaaataattacatttaaagtacaaataaaatacatttttttttttagttggagtcttgctgttttgcccaggctggactgcagtggtgctgtcttgcccaggctggactgcagtggtgctatctcggctcactgcaggctctgtctcccgggttcacgccattctcctgcctcagcctcctgagtagctgggactacaggcgcccgccaccacacccagctaattttttgtatttttagtagagatgaagtttcactgtgttagccaagatggtctcgatgtcctgaccttgggatccgcccgcctcggcctcccaaagtgctgggattacaggcatgagccaccacgcccggccaaacacatttaaataacggacatttttttcacattgtataacgtgttgcataacatgacaaaaatcataaatagaaacaacatagaagggcagagcagaagaggctctgattggctttgttttggctaggaaaggctttctagagggtgatggctgagctggaatttacaaaatgaacagaaactcactcccttttgttatcctttacgaaactgagaggagcatgaacctagctgactttttctgccaggaagtatggaaccagcagagagaggtcctcatcctaacattgcccagtttttcctcaaccccatccgtgccccttttctttttctttttctttttcttttcttttttttttttttgagacagagtttctatcttgtcacccaggctcgagtgcaatggtgtgatattggcttactgcaacctctgcctcccgaattcaagtgattctcctgcctcggcctcccaagttgctgggattacagacatgcaccaccatgcccagctaatttttgtatttttagtagagacggggtttcaccatgttggccaggcttgtctcgaactcctgaccttaggtgatccacctaccttggcctcccaaagtgctgggattacaggtgtcactgccccttttcatagccaatattttgtaatccttcctttcccacctgaagtgaatgtcatctatgctataacctacccataatgtaatttcagaaaatcactgtactatcccaaaggcaatgaaaaggagaaataaaaggaaagtatataaaatagtgtgtcttcgtatatgtaaatactctaacactgctacacaaagtcacataataaaatagattccttttatatgtagaatggtggtgaataaaaagtataaatgtaaacaaatacgggtgggttgtatttgcaacccgcatgccaatagcagcatcaccatctgcaagataagtttccagaatggtggaaaaactcaaaacaaacatttctaaaccaaacaaagtacagtcttccctcagcttacacaataattgcatttctggaaatttggtgcatatcaaaactgtgcaaaaatatttttgtgtttatatataaaatggacttaggttctgggatcaaataattataaacaagtttttttttacacaaatgtctgacaggacattcaaaagttatgtgggacaaaaatcttcactttgcaaaactgtcctgtgaattactaaatgccagttataggcccaaattatagtgatgacccaaaaaccaccacacttgtgcaaaacactccctatggggtggtattgacctcattgagaaggtctgacttaatgcaccgggcttaaccattcagtctgtgtcagacactggagctgaggaggggctgtccatctttggggagaggatcagcagtctatggaaggcatcacgttcctatccacatgaggtcgtacctactattcattcattctttcattcagttcagtgttaattagcatacctactatattctagacattgctgcaagaactagagaagaacattgagattttagaaaacaatactaggaaaactcctgctcttgtagagctgattctaatcattgcttctttgtggctttttcccagacatctgggactagtataacttttttctccagaagattctgaaatgggtcagagtttagccccaaactggaaaagtcactctctattcttcttcccatactaaattatgccctggcatgttgcccagcagacctcatcagaggttctgcaataagatcaaagaattcatgaagatactctaagattctgctcccagtaagaatatcaaaatcctcttgtgatcaaattcccaggaaaatattaaaagataaagtcctaaggatattaatgtatgaaattattacctttgaaaagaattgtagtccaatatcaaagtctattgcccttgtgcattaaaagttcatagaaattaaaatccaaaaattttctttcccagtttttctaactgctcaagtcaatagctgggtgaaatgtgggattttgccgtggttgtagcagagcctgcctgccactaagttatttgtacaatgccttcaggatctttagcagattctaaaatgatcagatttctaaaagttgagaaaatataacattcttctcagcacttacccacatccacaagacttagaacgtaattcaagctccaggtccatcgcagttgtgccaggaaatgtttgctcccagaatgtggcccgtagctgcgtataatggtgtagatcctaaaggcaccatttatatcccagtttatatatgattccccctcctcatcattggatagggcgtcccctgcaacgcattgtagggcaacctggcaaaagtctgtagtgaaggtttagtgttatcagagaacaagagagcagatagagatcttgggtttgaggcagaggagtttagagcctcctatgtcagttatcccgaggccacaagctatttcaactcacttaggagaaatcttactgtggcaatgaatgaactaacacaagaccagcttggggccaggtatgtatgtcatttccttccatccagccctggcttctgcctcctaccttccttcacatttaccagttatccatttaaaacccaaatctgatcttacatcacgtaggatcagatccagactccttggatgaaatgtatggaacttcacagctttgtttgttggacttcgtcatttctcctgttctctcaccctggcctccagggccaatgaagggggtcagaagttgttgacacgtgccatgcatttcacacttccatggcctggcatttattactgtctggctgggatacccttcctgttttgtaggtctggaaggtctttttttttttttttttgggacagagtttcgctcttgtcgcccaggctggaatgcagtggtgcgatcttggctcactgcaacctctgcctcccgggttcaagcaattctcctgcctcagcctcccaagtagctgggattacaggcctgcgccaccacatctggctaatttcgtatttttaatagagatggggtttctccattttggtcaggctggtctcgaactcctgacctcaggcgatccgcctgcctcggcctcccaaagtgctgggattacaggaatgagccaccacgccccgcaggtctggaaggtctctacttacatttaagggccaacccaaatgtctgtctccatcacgtgggttctcatgatacactcccattattttattgtagcacttatttttctctattttgtatataatttatatacacatatatttatgtgtatgcatagtgtatgtgcatattacacaaatatatgtatttgtatatttaatttgtagacctttactctcctttgttcatgaaggggtcttatgtcttgaagatctggaaagggctttacatgtccttgtatgcctgggatctagcacagaggcctggcatacaggtcccagaataaaaatgcttgctaatataaatgtgatcataaagacagcaatgattatcatgaaattttaacttgtttaccagaaaaagtgcatgacctaaaacttggcaaatgtgctcttccatgaaacaaaggggtgaagattagaaaactcgactttcatctgattctgaattaactaaaatcatgtttaagttggaaagacagtgccatctagtggtgcatttctttttcttttacaatgactggttttagtcattcctgtcttacataatcctagcactttagaataatgtcagtggtcatggtcatggctgttctgaggccttgaacacatagctctgttatgaattgaatatttggagttagatacacacagacactcattttagaagtacaatggagattactcagaagaaaacattttctagttatgtgtttcagggaaatccaagcacccactatttcgatggatgtttctagaagggagccatggttgggaattgttctgggtgctggcgacaccacagtgaagaagtcagacagagtctctgtctccccacacgtgggacttacatccttgttgggaaagagaccggacaaagtaaataaacaataaataagatcagttttgattataataggaaaataaaacaggatgatgctatgggagggcaacattcaatagcattggcttctctgaggaggtgacatgtcaggtgagggcccatgacagggagtccttagctgtgtgggttcagcttcacctgaggaaggaagagcagcaggaacagggctgtggacaggagtcctcctgggatgaaggaagtgcagctagcagtgaggtgtgggcagcctgggaaggaggcacaggccagagcagctggggcttgcagactgtgggagggagctggaattttactttaggtgcaatggggatctgccgaagcattttagacagagcaggagcatcacctcattggagtttgcagacatgcaggcagttcagtggagaacactatggctgctccggaattaggcctattaagaagatgtttcagtgggaacaggtgaaggacgatggagatcacctggagatggagccctctgggatatattttgaaggtagattggagtagttgtggagtgaagagagagagagaggaatcagagatgactaaagttgtaggcttgaaacattgaggtaaagatggctctgggagaacagttttgggagggctagtgggacagaggaatcaaagcacttgtttatttatttattagatatttattgagagcctgtcacgtgcagacacttttctaaaaactgggaacatggcagtgagcagaaaagaaatctgtacattcatggaacttgtattgtcttcagagagaaagccaatgaaataagcaagtttagcctggacaacataggaagaccccatctctaaaaattttttttaattagctaggcatggtggcatgcacctgtagtcccaggtacttgggaggctgaggtgggaggatcacttgagcccagaagttcaaggttgcagtgagctatgattgcagcactgcactccagcctgggcaacagcgtgagaccttatttcaaaaaaaaaaaaaagctaaatatgtagtatatagaagaaggtaacagttgctgtggagaaaaatcaagcaggaaaggagatgggaatgttgggagagtttacatctggaaggccttattgagttggggatatctttttttttttttttttttttttgagacagtcttgcactgtcacccaggctggagtgtagtggcaccatctcagctcactgtaacctccacctcctagattcaagttattctcctgcctcagcctcccaagtatatgggattacaggggtgtaccaccacgcccggccgagttggggatatgtgagtaaagacctgaagaaatgcacgaggacaaactatgtggatatacagggaagagcattccaggcaaagtgaacagcaaatgccatacccaagaagcagcaacacacctggtttggctcaagaagcggaatcgaacaaagtgaagacaataagaaattagattagaaaggtcaggggtgggagaggagagaaagccattgtgatgcctttggctgtttgattgagtggatgggaagcagttaggaggatttcagcagagcagtgacatggtgtgacttacattttaacagtatcctctcgatgacattttgaggatacactaaagaggaacacgagcagaatcaggggcttcatgggaggctgcagtgatcatctaggcaagagatcagagcagttggggccatagtgtgagtcggtgcagaggttaaagtagcagtgggtgagcggactctcataacaccttcttttaaaaatcatatatttcccaaagaggaaaaaaatgttaggcgtcataacaggtttttcctgaaagtcataatataatcaatccaattataattctgttcctaaattaagactacctctaagaaaatcaatgtaaaaatgtttaccgtgacctattgcaacttcgcgtccaatttagtgtgaaatatgcaattttttgtaagtaatggagaagtaatgaattgtttttcttctcagttatatgatggggatagtgaaaatgcgaacttggctggaacgttttgtggttccacagtacctgctccttttatctcttctggtaacttccttacggttcaattcatcagtgacttaacattagagagggaaggatttaatgctacatacaccatcatggacagtgagtaaatagaagcatttttatatgttatgaaatacacatgtatttatgcactgaaaagaatgccctgcttattatatcgaaatttcaatgttaattactaaactcaatgtcaattactatctaaactcaatgtcaattgctaaacaccatgttaattactgtatgtttaatctgtggtacaaatttgatacaatctttagtcaaggatataaaccctgaattcttaatagagtaatgaaaatatagctcctccggggtgggaggcagggaagacagaattgcaaagattgcctgagatgagacatgaataaaatgtctcctgtgttgctttttcctccctctccagtgccttgtggtggaacatacaatgcaacttggaccccacaaaatatttcatcacccaattcatcagacccagatgtcccattttccatctgtacttgggtcattgattcccctccgcatcagcaggtcaagataactgtgtgggcattacagctgacctcgcaagactgcacgcagaattacttacagcttcaggactcaccgcaggtaacaattataagatgaatggcagtcacatctagtgaccttttcaccagtatttgcaaaacacttgaagtaatgaagccatgatgaaataattttcttttttttaattatactttaagttttagggtacatgcgcacaatgtgcaagtttgttacatatgtatacatgtgccatgttggtgtgctgcacccattaactcgtcatttaacattaggtatatctcctaatgctatccctcccccctcccctcttcccccaccccacaacaggccccggtgtgtgatgttccccttcctgtgtccatgtgttccgattgttcaattcccacctatgagtgagaatatgcggtgtttggttttttgtccttgcgatagtttgctgagaatgatggtttctagcttcatccatgtccctacaaaggacatgacctcatcattttttatggctgcatagtattccatggtgtgtatgtgccacattttcttaatccggtctatcattgttggacatttgggatggttccaagtctttgctattgtgaatagtgccgcaataaacatacgtgtgcatgtgtctttatagcagcatgatttataatcctttgggtatatacccagtaatgggatggctggatcaaatggtatttctagttctagatccctaaggaatcaccacactgacttccacaatggttgaactagtttacagttccaccaacagtgtcaaagcgttcctatttctccacatcctctccagcacctgttgtttcctgactttttaacaatcaccattctaactggtgtgagatggtatctcattgtggttttgatttgcatttctctgatggctagtgatgatgagcattttttcatgtgtcttttggctgcataaatgtcttcttttgagaagtgtctgttcatatccttcgcccactttttgatggagtggtttgtttcatgatgaaataattttctaagttacttccagcttaatgtgtttttcatccatacacaaagccctccaatcaggtgtgtcgagaaacttgaacttggtcctgcaggtccagagctctcaaagcttcatgtgcctaagaatgcattaagatgcatcttaaaagtgcatcctccctggcccaccctcagagaccgaatcccccatataacacccatttatctgaatttttgacaaacacctctggtgttttggtgccagtaccagaactccatggaccatgcttggagaaatacctctagttagtgggatttatgtataggttgaattgaaagggtcagtacagaacacaagagaatcagtgaagaggctgtttggcactagtctgataggtttatattcatggtaatataagagagataaaaagaaaagggctgggtgtggtggctcatgcttataatcccagcactttgggaggccaaggctggtggattacctgaggtcaggagttcaagatcagcctggccagtgtggtgaaaccctgcctctactgaaaatacaaaaaattagctgggtgcagtggtgtgcgcttgtaatcccagctactcaggaggctgaggtaggagaatcgcttgaacctgggaagcagaggttgcagtgagccaagatcgcgccactgcactccagcctgggtgacagagtgagacttcgtctcaacaacaacaacaacaaaatccattttgagctttaaaaaaggctgagtctgaatttcctctggaataagatgttgaggagacagttggacacaaagtgggttgttgaccaaaggcccaaagatttttgtgcatcatcattatcatgataggtaattgaaaaatgagaagaatgagattatctggggaaaatatgcaaagggattggccacgaactgaggatggataccaggagaacatctgagaatacctggattgtctttctgcagtttggggagcaactaaccctccccagttcattccagtaaaatgtcatggtcaaagccccatatgctggactagtagagtatctgttgtcttctgagttttcagggtccccttcattataaatctggggtcccctgcttctcatgtggtcttgctggggaaagaaaagtccaggttgtgtgactccagagtggagaggcgtgagatgtgctggcagctgaatagaccctggacttgctgagtttggtgcaaagcatatatgctgagatgagctcccaaggtggacaagatgctagattatcgtcattccattggtaatggttttcaggacaaaatctctattacccattggtaccctagaggacttacagccaagtggaacaggccctttgggtgaaagctctctcaattttccctggcttcacgaagctaagacaatggggatcagggtggaccactcagcggggcacagaatggcactttcagggcacgagacaccgtctgaaacataacagcagctggagcagcctcgagtaagacccagtgtttgtcatgactgaataatgttttccactgaatgaatacaggaaacaatcaagggtttcggactgggtaggtagggaggaaagacaaacattgacggatgagctgggagaaactgggattctcggggtatccaagagtagacagagcagccctaattggcagatcatgaaggaatgatgtgtagggtggttacggaggatgttcagtggttagctggcactggagatgaacagagatgcagagatagaaggccctaaggttaagaaatatgaagttgagggtgtttaatggcttgtctataaaaacacagaaacctctaaagggttcagaaaggaaatcaggggcaggagatgactatgagctgagacacctcaagtctttcataaatgaagggaagtaactgggagaaaagtaaatgagagtgacgataatggtaagaatatctttggccagatgtagagaccgtcgaaggagaaccagctttgagacgaggatggaagctgcagtgaggaatgtggagcctccctcccttcccccgaggctggccccccacccttcccactcaatgaactgtggagcatgggtaaagaacagcctctaccaggaggctgctggagaaccaggttttgctaaggccacaaagtggaaaggtgggggatgtataccgagaatgactgacagtgcagttaaagttcacaggatacagcaaagttagacaaggaccaagagcaggagacagtggggaagaggggtggaagccccgagcagttacaggagttttgcaagcagagacgggtggggtgtttcagtaggttcctaagaactgcagatattagagacattcctgtgacagggaggctgcaaataccctgactttggtacaacttgtttttacccaagaactgatgggcattcgactgcatttactccaggcttttgagaggtgatgagggctgccctagtgttacaaaggggaaccggtacctcatgacaggccccggctggcttgggggatgtacagtggaaccaaaggctctgattagatttgctaaggggtagcaagggctggatcagggtgatggtggttgttagtcccatggagctcaggacaatggcaaaagccccaggaggagagatccagtgagctctcaaacagcctagatcctcagagcaatggcacaggcctcagctaggaagttgcataaaaggcgagggatcttattttcagcagggaaatgtctgtggtttcagcagaagctttgcctcccttcctcctgcccctctgggaaggtgcaacttgcatcaattccaaggccaacgtgagtcttcttgcagagcacttccaacagcagagctggtttccatggctaaatatttacaccatgcttttatatgcagtctaatttctgttatggcctgttctcttctaagactaaatctaacatgatttggctcccatttcatttcagggtcacggaaattcaagatttcagttctgtggcagaaatgcttcggctgtgccagtgttttattcttctatgagtactgcaatggtcattttcaaatctggagttgtaaacagaaactctagaatgagtttcacctatcagattgcaggtgaggccaggaacttcatcttttattcagaaaagctgccatcattaccattattcgtagaataattacaattatttctagaattgactcctgtgagtaaattaggatttgttaacaaaaaccacatccctctcttaactagaacccagcccaatttagcaaattactacagttggtttctaaagagataaagagaatataatactatccaggatggttagaatgctagcattttcttcaaagtatatgtagttgattttaaaaatatgccaattatcttattaattatacacttaaccacattgaatatacatttttatttacaagaaatatatatgtttatttacaaaagctttatcaaaatataattctcatatcatacaatttacccatttaaagtttatatttcagaggtttttagtattttcacaaaattgaaaatcttagaaaattattttgtaaaaatcaaaaagccttgaaagagttacctgattattataagaagtttattttcacagaacactttatttagtacttattttgaattgactcaaatgaaagcttcctttggttaaaacaaacgaaagtacttttggtatttttttaccaaaaaaaaaaaaaaaggtaaataacgatttgccacaaataactcaacaatggatttaaaatccttgtgcaaaactctgtcttggaggtagcatccttgtcgaaaagagagtctgaatgctacttccacctcaacgtgatcagaaaagttcaaaggatgctcgagtattcgtctttaaaggagaagcctcctgtgtcatgcttcctgtaggcgtgtttgtgtgaacgagctgttgcgttgcacctgtgtgtgctgcttgagcaattcacttcactgctcagggtctcaattatctcaaaggtaaacgaagaagctggattacttttttctaaagtttatcaaatgcaatgatctttttgaatgattcctgtgaagttgaaagagcactaaatattggaatgcgtacattaattatgcctatttttcctctaagattgcaacagagactatcacaaggcatttggcaacctgagaagccctggatggccagataactacgacaatgacaaggattgcaccgttactctcacagccccccagaaccacaccatttccctcttttttcattcacttggcatcgagaactcagttgaatgcagaaacgatttcttggaggtgatatgcatttgaatatcgtttgaatgaattatttaaaagatggtggatcacttaagattttacaccttttatctagtgctgctaatactatatgattcttatttgtttcattaatttattcattaccctttcattccctaaacatctacagagcaccagtccaaacaccggaaattgggaaccttagggcccgcaggagactcctagtctggcaggaaggacagatggggtatagccaattacagcacaatgtggaaaggactaactgagtccagcatgggttggggttcctaactcagtctgggaactagaaggctcaagagggcaatatgtaagttgagacctaaaaggatcagagggaagtctaaggacaacatgctggttctgtaaaatgaagctcaatgatactaaatagctcacctaattttcctgacagctacagtaagtttggggcatcgtcaacatcctctaaagacaagtgtttccttgaataaatgctccctggtctcaggggggtgtggtctgtcctttcttcaccacaactccagagcttgaatttgggcacagaaatgacttcactgtttgcccatcgtccacacacccaccctccactcccaccccaggacacactgagagagaagcccccttgtgcctggagcaggcagaaccatgcgcctcgtgggcctgaaactttggggtcctccagtgcccccgatgagctccctctgtgctctttctgccccatcgctgcattgggcatatgagatggaacatgaacatcatcgctcataggcaggagatagtctgaataagcctcatgtgatgtggacccagtgtgtggaactcagcccctgtgttttgccagaaaaaccccagagctcacggggtttgagctttgcaagctctgtcgaaaatgcattcatccttaggaaatatacttaggtggaacctaaaaacaaagagcataaagatgctgagttcctctgtgagtggagtttaaatctaaacctcatcctgaccgtctctaaactggctttgtaccacacaagagtcttcagtaaagtttccaaaaagtgtgcttgttcctctacccctgatctggagttgtattttttattttattttttttctcactgcctctttaatcaggtcttcattcaaaataagctgcccaagaggatttgacctttgtagcataaagaaatgtaccggtgtaggcagcgggctcctttcattctgtgggacgattctttctagcgggcctctgctcagctgatagtttcttggtagcttcagcctttgttcccaacaaaacatcttctgcttcttagcaccaagggctttctttctttcttttctttcttcttctttcttttctgccctgcaacccccctcatccgatttggctcctagggctgctggcaccttctgcccagcctggccaggaagggtgttctggcatatggtctttgcatatgggtttagcttcaacatgattcctgatgcggagttttatcatcctggaaagctctcccctttggaattcatctaaatcctttattaatcaataaccttaacatatagtgccataaataacactcggaggaagctcatgccttttctaaaggaatactcgccacgacaggagaccgaaagatgtatatagcagggaggaaatgaagaggcaaatacagttattctttgtgccggtcaggttattcaacttggacctgtgtacctcccccaccatggagatccaaatatttatatgaagtgtaaagcagaaagaatgaggagagtgggatctggaggaaagatggaataatcccgttaggttggagtcacagtgcaactaactcttaactcactccagcttgaatggaccattattgatcagagtcaacgtttgccatttgcctgatagatgctgggaagcaaagccttgctttccagccgtggagagtgagaattcctcctcctagctgtccttcattactccacagaatggatctgaaacttcctgtcccataagcaaagaaaggaaaccaccgcttaggcctgtaaaatgtagctccatctggctctcagtgggaaggctgtgggcatagtttcttggcagctgtaccaggaagcctcagcattccgttcttgtgaactgcggtgggaacggaaatgtctgactgagaattctgactgtgttactaccaagcgagggccgagctctagaccatgcttggaatctgttttcatgccttcacctcccctttcaagatcctctgatgtcccagagatgcccactgctctaggtggccccattcttcctaggagaggaaagtgaataagacaagttgtcagcagtgtcagtggaaattagtatcctgctgctcctctcagagcaacggcattttgaaagaggaccctgagggaaaaacgcccaaactcaagagcgtggtgctggctatggcagccctcccatctactagtggatgactggctactctgtcatggcaaggttactttgtttaaacacttagcagaataatccccaaagcactagaaaggcattattctctcccatgggctactacatcgacctaaaaggaatctcacctgatcaacacagcccagcaagatgtcttaactttgtgacttaagataccagcaattaaccaaagtttaaaccatggaattatatagggaacagaggaacttccaatattttgaatacatagatcagtaaaatcagcatttccgcatgtcaggctggttccaacatacattgcccgcgtaacgtttccgtaagaagcgtcgagagccctcctggaagcagggctggttgtgaatgcagggtagcagccaggctgggggacagaaagtggttcagttcacagtgtagttctctctccccataaaacacaggctcatctcctgtttttatatgtgtctactcaaaaatgagttgaaacaaaaaagcaacaaggcctcggaatgtgtttgtaaaacacatttaacaacagacattgtatagatttataattctgtcctttgcccatacagaaattcctttcgttctgaactttattatactttgcattgtattttttcatagcctctttacagccaagtaattttcaatgggaaacacgtgcacacacacacatacacaaacacacacacaatgagaaaggtgtaatagttgactggaagcagagcaggcaacattgcccccgcccatctccaccttttaaaaattcactttacctacattctccagaatgtttccccaaaagcaaaggctgcaggatcacagcacaaactacggtataaaaaagctgcctggtgttttaattgctgtaggttaacaggtatttctgaatccaaatgcaaatgttttttgatctacacgtggaacatttttcccctttgcaagtgaaggtgacttctgcatgtattttcagaaaacgcttcattcttaactgtataaaaagacaaagcttttccgaccaatgtcatcattcaaattgtctccattttaatgtatataccttagagaagaaagtgtaagtttaataatgaatgactccttcctaaaggtgagaaatggaagtaacagcaattcaccattactgggcaagtactgtggaactctgctgccaaaccctgtcttctctcaaaataatgaactatacctacgatttaagagtgatagtgtaacttctgatcgtggatatgaaatcatctggacttcatcaccctctggtaagacatttgcactttgtacaggaaagcactgtgagaaaaacatgaggtgtctaatagtaaaaggcaaagtaactttatatttttagctacctgtgtacctgattagtttatgttaagaatagagattttaacattgaaagtacagattacttttttttttttgaaatggaatctcgctgtgtcatccagcctggagtgtagtggcgtgatcttagctcactgcaacctccacctcccaggttcaagtgattctcctacctcagcttcccaagtagctgagattacaggcatgcgccaccatgcccagccgatttttgtatttttagtagacagagcgtttccccatattggccaggctggtctcaaactcctgaactcaggtgatccaacctcccaaagtgctgggattacaggcatgagccaccgcgcccggccagattactttaaattctacatttattcattatttctgtttataaaagaatatatattcatatatgaaacatatataaggtaaggtaggaagattcaaaaattccttggtaaattaaattttgttagactttttgacttttggcttgaccatcaaggaagttctttgagaatttaaagaaaaatttttaccaaaaatccaacttatgaacacattctggcatatatatgagtagttgtgcttctcgcaggccctgacatttcttggcggttctggagagaaattgctttttttagggtagtaagtatcttctcacatttttggctggctgtttatcaaacaactaaagaaaatttaagtcatgtcaatacatttaattcaagagaggaggaatacctttataaaatatcccaaaataccaaaataccttcaaaataagaaagataaacagaactcactttaaatatcttaagaaaagcgttctataaagataatcgtgggtaatggaatcttggcacccaaaggaagcttaaaggtgacctccaatgctcaaattttatcaacgagcaaataaaacaccaagattaagctaggtgctgtggctcacacctataatccctgggagaccaaggtgggtggatcacctgaggtcaggagttccagaccagtgtggcccacagggtgaaaccccatctccactaaaaatacaaaaattaactgggtgtagtggcacatgcctgtaatcccagctactcgggaggctgagactggagaatcacttgaacttgggagatggaggctgtagtgagccgagatcacgccactgcactccagcctgggtgacggagcaagactccgtctcaaaaaaaaaaacaaaacaaaaaaaacccaccatgaacccgggaggtggagcttgcagtgagccaagatcgtgccactgcactccagcctgggcgacagagcaagactccatctcaaaaaaaaaaccaaccaaacaaaaaaacccaccaagattaatgagttgcccaaaatgctccactagactgaggtgaaggtgagattagacctcagtggtcagaggcccagccacgtgctctgtaactatgccagccagcttcttcctgtcccagagatgacctggatctccacagatatatagtctaaatcatgacagccttcatatacagattaacaaattgaacaaattaacaccaaaacttgaagtatttgaccttaagtatgtcagttattagcctggtaaagtcacttttataatgaagtcattcctgccgtcacctacaataacgcactccctcttggtttagtgctgaattttacttctaattttacttcactcacatcactggcgtcaactctgggcatgcaaagatctctacaccatcgaaagcacacagacaacaacttgattttctcccacagttactttatcaagtttgttttttttttttttttccattctgctctcaacccccaattttcaaagtacagtcctggaggaagttatccctgggttgtgatatgcaggcaaaggcacgtgtgtggaggatggaagaggtggaggtggcagtgggaagagaggggaagagaggagaaagggtgtagcccaaagaagaggaaaaggaaaagggatttctgcctccattattcttgcagagtctcagcaccttaagaaaataaagtcttattgcctaacaagccagactggacggcttatatgctgttgaatcaaacttcctgtcctgttttccttgcaggatgtggtggaactctttatggagacagaggctcattcaccagccccggctatccaggcacatacccaaacaacacgtactgcgagtgggtccttgttgctcctgctggaaggcttgtcaccatcaacttctacttcatcagcattgacgatccaggagactgtgtccagaactatctcacactctatgatgggcccaacgccagctctccatcctctggaccatactgcggaggcgtgagtaaaacaaacattttatattcccatttgttatttttagacaataatgagtcacttagtgtagactttttttttttttaagatggaatctcgctcttgtcacccaggctggagtgcagtggtgcgcgcaatctcaactcactgcaacctccgcctcctgggttcaagcaattctcctgcctcagcctcctgagtagctgggattacaggtgcctgccaccacactcagctaatttttgtacttttagtagaaacagggttttgccatgttgaccaggctggtctcgaactcctgacctcaggtgatccacccgcttgggcctccgaaagtgttgggattacacgcgtgagccactgggcccggcctagtgtagactttcaaaggcagacacactgcagaggaagaagcacagcctttaacaaattgagcagttttccaacttgcctttctattatgggagcatgagtgccatctggtgggcattgcattaaattactattaagagttacaaaaatcagccctgcgtcagaatcacctgtggagttacttacattagacttccagttcccaccgaaacccactgaatcgggatttcccagggaggagtcacagcacgctgtttttttaaaaaaaagctccctctgtgacgtcagtgcactgcctagggttgaatacccatgtttatttctgcataaatagaactgtagaaaatttggacacgtggctctattttatctacttcttgctgaaaattgcagaaattatttgaagaaatggtgaccgatagtttgtttttgtaaagctctgatatcttccctaaaaaaatcagaatctgacgttgattcaatattgcaggcatctgtgcttacgatcctctcatttgatgtgcaagtagatacttaaagagagtaagggctcacacctgcaatcccaacactttgggaggcccaggcaggtggatcacttgagctcagaagtttgagactagactggccaacatggggaaaccccgtctctactaaaaatacaaaaattagctggtatagtggcacacgcctgtaatcccaagtactccggaggctgagggaaaataattgcttgagccagggaggcggaggttgcagtgagccgagatggcgccactccactccagcctgggcgacagagccagactccatctcaaaataacaagagagtaagtaagggaaaattggctgttggcaagcgggtatctgtttctgatttttctgccctttaatcacttagactttgtaatcaaactagacagagaactgtatcagctggaaatctagatggtttttaaaatataacttactatttataaaattgataaatgctgttttcagaagtatcagaaaataggctaatttttctaaaaccctgggcattctcatatattcttaacacctttctttgaatatatttgcatatattttacatgcatattttttactgtttgatggtgtgttttttctacttaccaatatatcattagtaacatatcaataaaaacactgttgcatcatatttaagttttggagagtattccgttgcacgagtgtggcctaatttatttaatgaagcccctctaagtggacatttaggtctcttgaactttttgcaactacagacaacacttaataaactttttggtagtgatatctttatacatatagttacattacttggtgagaaatggtaatcacaggaccagcagacactgtatcacggggatgcacagaaggcccacagagagagagaccccagtaaatgtgccacacatcagatttagaagctaatcagctcttagacattgaattgaaatttacaaacatttcaaaagggaggaaaagaggcaattttaacaataccatgactttatattggtaggggtttttttgtgggcatggttttcagtggcttgcaaacatacaaccccatttgatccccacagtgacactcccataaggtggaaagaacaagtatatcctggacttgtataaaccgagttcaggtttatactgaacaagtataaaccgagtcactgagagaagtgacggccatttaatccaatgccacgttaagttgaagtatatagcgagataacatcaatttttttaactgttggtgtttacggtattttcccagttttacatttttttataaatgtggatataatttcatgtgtaattgttttttttcttaaaggtaccactgatttctttaacactttatcaatgttaaacataaatgaaaaaatgtaaaacataagtataaaacatgaagtacagaggtagctcttgttttgctaatatttacatacaactttttgtaagttgtaatattttactaatatttacatacatactttcacatgttacatacatacatatttacatgcatatttacatacatatgaaagttgtatacttttgtatgtatactccttaagtatacaattcaactttttatgtatgtaaatatgcatgtaaatatgtttgttaaacttgtaatatttatatacatacagtatttaaatacatacagtgtacatacagaggtagctccttattttgctaatataaacacaaaccctgatttggagatattttatattacggtaaataccattgttcacagggaaatcctatatcccttgcagctgcagaaaatgaagatctagcaaatgagagaataacgggacaaacaaggagaatcaaaggagattctaaaacttctgttgaccgtctgttgacatactagtttgtcaaaataaaagaagttattgaaatttggaagcagattaaaatgggagtaaaaagtagatgtgtataggaataaaaatattgtatattccttgatgtatctcttacagaaaaaaaaatctacactcacttgagtaagtgagtatcttggaaataagcctgtgttttgatgacttggggtagggctgaggcaggagaagccagtcatgtaagcatcatgagagcagggctttttgcctgttttgctcattttttaatgtcttaatacctgcagcgtggcagtgccttgatcaatatttgccaaatgaatgaatagaaagtgagagacaacggggacccatgtatccccccaacacacacacacacacacacacacacacacacacacacacacactgttccacagaagtatatgaaaataaatctcaagaggaaaaactataaacactgaggatgaaaatactatattttacttaataggatcattttaattatatatgtttgtttcagaaaaattaaatttgcagtaagaacttgaataagaagttcaagttttttgataacagttttattgagatacaatttcaataccatccaattcatctccttaaagtatacaattcagtggtttttcgtaggttcacagagctgtgcggccattatcagcacagccaattttgggacactttcattaccccccaaagaaacccagtacccatttgcagtccttccccattttccctcaactccccacgcccagaaatattcctttgtaaagcatttgcattcattctttgcaaggttacttcaagaaatatatgcaggttcaccataaattctataaagtttctttatgtggtactttgttactaggctaacattcctagaaaaacgttcaaatatgtgaaatatataattggatactttttttttcaattttaggacaccagcatagctcccttcgtggcttcctcaaatcaggtcttcataaaatttcatgctgattatgcacggcgtccatccgcattccgattaacttgggacagctaagtgggtaacaactcgtgttcactcagcactttccctctgcagcacgctggacagcactctgccatcctgatacatgacccctgctgatgccacagagaataagctgaacttgtatggtttttcaccaaaccatggatagaatcaatatttgtaggccaggcgtggtggctcacccccctgtattctcagcactttgggaggccgaggcaggttgatcacctgaggtcaggagtttgagactagcctggccagcatggtgaaacctcatctctctaacaatataataattagccaggcgtggtggtgggtgcctgtaattccagccactcgagaggctgaggcaggagaattgcttgaacccaggaggcagaggttgcagtgagctaagatcacaccactacactccagcctgggcgagacggcaagactccatctcaaaaaaaaaagaaacaaaaaaaaccagaatcaatatttgtacattttctcgaacatagaatatagcttctttagtcttgagtgtgcatttcattctaatattttgagctgaaatttaaaaaaactttgaaagagttggaaatgattatggcatatgtgacatacgtttttaaaagttaataataatagccaggggcagtggctcatacccataatcccagcacgctgggaggccatgatgggaggattgcttgaacctaggagtttgagaccagcctgggcaacaaagtgagacctgatttttacaaaaaatcaaaaaattagccaggcatggtggcatgcacccgtggttccagctacacaggaggttgaagcaggaggatcacttgagcccagtaggttaaggctgcagtgaaaccctgtgaattaaccactgtactccagcctgggtgacagactgagaccctatctcaaaaatgacaacaagaacaacaaaagttaatgataatatagaagcataaatttcctgtgaatgttcaattacacataataaacattattgaattgtacacaattatgctgcattaattttttgacttattaaaactctgtctttcactatgggacatatataaattttcaagtttaatttttacattttggcaaagaattcaatatatatatgaatcttccagagcttcatttctggagccaagctgcctgagtttcaattttaactgtactagttaagtgcttacacaatctctctgtgctcagtttcttcatttgtataaggggattattttacctgtctcacagggttgcaataattaagtatatatgtgtaaagactcagaacaatacctggtgcatattaagtaattggtaaatgctagcttctatgtcaattagtagtagtatgactctcctccttaccatacagatgtacctgcttttcccatactcctccaaagccaggcccaagtctcacctgtgtttaccttttgccatgcccctaggtcaatctgagcttctccaaagaccttgccttaactacagagaagtttgccgtaacctctgaattctctatttccctcccatttgactcaaacttctgtttctcctggccacgccgaaccttttcttcatttatccccaggaccctgtactctcctggttatttaatttctctgagtattctccactctcctgtagaatggtggccctcttcacacagctccactaggcagtgccccagtaggaactcagtgtggggcctccgacccacatttccctgctacactgccctagtagaggtcctctgtgaggattctgcccctgcagaaggctgcttcctgaaaacccaggcttttccataccacctccaaaatctggggagaagctgccaagaatctaccactcttgtactctgtgtgcctgcaggtttaacaccccgtggaggctgccaaggcttatggctttcattctccaaagtggcagcccaagctgtacctgggcccctttgagccgtagctggagctggagtgaccagggcgtggggagccctgtcttgagcctatgcagggaagcagggccctgggcctggtccatgaaatcattctttcctcccaggcctctgggcctgtgatgggaggggtttcagcaaaggtttctgaaatgcctttggggacttttctccattatcttggatattagcagttggcttttggttatgcaaatatctctagcaagtggatgcctcacagcctgcttgaattcctctcctgaaaaagctttttctttctctgccatatggccaggctgtaaattttccaaatttttacactctgctttcctttttaatataagttccaattcgaagtcatttctttgctcccacatctgagcacatgctattagaagcagccagcccaaatcttgaacactttgctgcttagaaattttttccaccagataccccaggttgccactctttagttcaaacttccacagatccctagggcatggacagaatgcagccaagttctttgctaaggcataatatgtgtcacctttgctccagttcccactaagttcctcattaccatcgaagaccttggcagcctggacttcattatccatatcactatcagaattttagttgcaacttttaaacagtctctaagaagttccaaattttccctcatctttctgtcttctgagccttccaaactcttccaacctctacccattatcttgttccaaagtcagttccacattttcaggtatctttataacaaaaccccactcctggtaccaattttctgtaatagatcattcttgcattgctataaagaaatacccgagactgggtaacttataaagaaaagaggtttaatctgctcacagctctgcaggctttataggaaacatggtgctgacatctgcttggcttctggggcagcctcaggaagcttataatcatggaggaaggcgaaggggaaacaggcatgtcacacggtgaaagcaggagcaagacagcgagagtatgggacaggtgccacacacttttaagtggccagctctcatgtgaactcagagcaagagctcacttatcaccaagggtatggcccaagccattcatgagggatctacccccacgatctaaacacctcccaccaggccgatctccaacactggcttttataactcaacatgagatttgagcagggacaaatatccaaactctattatgtatttacgctcaggagtacaaagtttccataagcaccaccattgcctattccttaacacaatatgttaagttataaataaacaatatggtttgccacttaacaagaagtagaaagttcagtagcacatccttatctccaatgctgccagacatgtaactaagtgaggtagttattagcttccttttcataagaaaattcaatgcttttataaagtttttcagtgcctctagaaaagcggaagcctttacaaaggagatttgctttatgttaattatgcaaaatcaagggttattaacaaaagaccatgtgaatgagagaagctgaggaatgtaacttcatcttactctaatactcaaatggcagataattatttctggacagagtatggagccacagaaataaaatactctaaccttgaaaattcagctactcaggaggctgaggctggacaatcacttgaacctaggaggcggaggtttcagtgagccaacatcgcgccacttcactccagtgtgggttacagaatgagactccatctcaaaaaaacaaacaacaacaacaacaattcctgctccctttttgtattatggatagacatatcaactttatgggtgacaattacattggaaaggacagtgaatgcgataagtaacaccatcaaatccaaaaggtcttgataagctacaacaatgggccaattgtaacagacgaaatgtgacagatataagatcttcctcttttatcaaaaaatgaattgcaaaagtacagaatacagggaaagtttaacaataacatgaaatgacatagtacttttctgaaagaaagattaacatgatgtcactgtcaaaaaaatgatgcttagagcatggactgcatcattagagtaacggtatcatttccactcagaagggcatgcttttctaggaggcatattggaatatctgggaagtgtgtacctgaaattgaggaaagcatagtcaatattattatgtaattttaaaattaaaaatacagaaaaaaagagacaaaatgaagctttacaaaatcttccaggctgggcatctaggaaataagcagtgattttttagtgggttagggatggtcaggcttgggagcatgacattttcgtgtatagccaagggaagtagttattgagtaattcagtttttgagtaattcagctggaagaaggagaaaagagtcaactgtactctcattcgtaagacccaccgtatatcctctggttctgctttacatttaattcacttgtttccaaatgtttattgagcatcagctatgtgatacgtactcagcgcactgaggataaagcagagaacaagacagccatacaagactatcagctgatgtctcccagcttcacaaagcacacttcccagctccatcttgcttgatttcctgagccagtcctgaggcaaaaaccttaatattcttatctggtgaaacatacattgagccaacttcccagatctagtggccaagggataagtttcctgattccaaattgtgtcaccatgaagtttcactgctagcaatcaggaccctggacaggctaaccatcatcctagcaaattaatcaaacctgagaagggggtgtgggaaccctgatttatagctggtcagtcagaagtgtaggtgacagtcaacctaaagtcttgtggaaatgaacccttaacttgtgggatttgactataagttgaggtagacagtgtcagaattaagttaaactgtaagacaccgagctggtgtctgctggagaactgtttcatgtgtgggggattctctggtgtcagaagtgttgagccagtggagagtagcaaaaacagtttggtttttcctatctcaaacaggagtgaaaacaaattcctatgaaacagaagtgaatggaggcatgcagctcaaaataacttcaagagagacatgcaggagggctgggactctctgttccaggtgtaacctggatgtggggctggctggtgcagtgtgaggggctaaaaccaaagtcagggagttgccctaactggcactcacaatccaccatttccctccacctgcaaaggtagccgggtgatgacctgcaggcataatactgggttcttgcctctgaagaaattcgactatcagtctagggatctaggaggaaaacaatacaaacaaacaagagaccactccagctatctagaaaaaccagttcagatcttcacacttgaactcaaaagaacaaccaagaatcaatcaccagagaggggaagaatctttcttttctagggaaaagactagataaatacacgtaagaatggacccttgaagaaacataattgagtgaacagaagagaggtttaaaaactattatcctcggtgatacctgagaagagagtacattcatgaaacaaatgcagggtgttattataggccggcagtccaataggactggtgtccttagaagaagagacaccaagggtgtgactgcatagagaaaatgccctggagggacaccaagagaagacagtcgtccacgaggcaggggagaggccacaggataaatcaaatctgctggcaccttgatctagaacttccaggattgtgagaaatttctgttgtttaagccatccaggctgtggtatattgttacgacagccctagccgactaacacaggtactgtatgtcttcagcctacctaggcaagattcactattagaaattgatagaataagaaaaattctgattgcttcaaaacaggacttttgctttaaaagagttaatgattcaagaaataaatgtattaggagattacctactaatacgtattgatgaaattatgaagttagaaaatcatcagtggatgctaaaacttgtgggtaaaaattagatgaggaatggggtgtaatcaagtagcacctccccccagcattatttttaatcataaagaaaaaaatagtaactttatggtgaagaaacctggcagacactaccttatttaagtgaacatcacctatactgggagaaaccgatgccatctgtaccttgatatcatgcactggaaaagacacatcgctttagtggtgtttctccaaaaattcataacctgaaagggaacatcaaacttactttgaaggatattccacacaatacctggtctgtattcttaaataatgtctagttcaataaacataaaagccaaggacggttccagatcaaagaagactaatggaggaataactctttcatctggaatgttttttaagcaagaaatacctgctttcgaatttaagagtgcagatcctttttttatccaattggttcggagatataattacattattttaccacatctccttaaggctttgatccctgctacaatctacaatatataaatgcatatgtgtggcatccgtcttatcatcaatttaggtgaccagtagaagaaaagtgcctggtgccaatttttattccatagtataaaatagtctctcaggacagggtttttggtgagagaagcacaggatgttgctgggtgactgagaccgggtcaggaaatagggaggcagagggcaacagtttctctagaatttaaaatttggttgcttttggaagagaaagcaagagattcctggaagccagaacgtcatgtttcacaaatgtaaaagtcctagttgggaaagacacatcgctttagtggtgttttcaaatgacttttaaaatagtagggttttacttgtaggttctagctacaagtaaaaaggctaaaagccagccttagaaacctgtcaaaaaagatttccagcagggcgctggggaaacgcagaccgcgccggaatccccgcctggagaagctcttaatagggcgggaaactgcgtgccccacaaggtccctcagaggcacattgtggagacgggctcagggtagcaacttctggcgagtggagcggctattacacaagcgaaacattcggaagcaatttacttccagctttcgcaacacccaccctgagccaccaccctcccttacacagtcacgccacaaacttccccacttccgcccacagccctctgggcttcgacccatcaactgagcttgcgccaagtctactgcgcacgcgccaacttcggcccaatcagcgtcccaaaccgtggggtggacgccaccgggataaactatcctcagcgtggggcggggtctcgaagccgaataacgaacgtgattagccagcctcttccacagacttttaagggcggagcctggccctggagacacgtctggagagctgttctcctaatatgggtagggtcgggcgtggagctggcagcggcgctgtgtgcgcctgcgcggggcgccgagacagggcgtgttcgctgttcagtgccggtgttgcagggagtgagggcagctggagtgcgttctgccgaagcttgtggttgcacgcccatcgtcttaggggctaccttccgtggtgagtgtgtgcggtgttgcacttggggttgcttctcgctgcgtggccgcagcggggctgaacccttcccactccatcccctccccgcacccggaccagcccctgggacgccctcggacgcccacccgctccaaccctggggaagcctcagagtggcagcgaaggcctcttgcctttccgcctctgcgcttgctgtcatcgcccacgtgctttgttgttgttcggtgcagaccatgtccaagtctctgaagaagttggtggaggagagccgggagaagaaccagcccgaggtggacatgagtgaccggggcatctccaacatgctggatgtcaacggcctctgtgagttctcgggcaggactctcccgtggatgagctggaaggctttctaagtttgccaattcactgctggtcctgctgtgagcgattgtactggtttagaccccagcccctgcttgtaaacctcacttgtcaggggcttcgcgcagagggtttgcagtaggatttgttctgttccacctggaaaacgatcctgagagtccacgatgagaatcacacagacagctgtgcctcatcggttgtctctgctgtatggcattgaggtggattttccacagtttgcttaatagtcactttaattataaattgaaaattaattttgagtccttcttcctgtctcctaatacagtctttgtccatgaacaaatgacacagaaaagttccatggttaataagcattcttgtgcctggagcgttttaagcatttcttgaatctttacattcttctgagtatttattctccgaacttggttcaggcttttgtcacctcctcatgctgtggtgaaatcctcctaacttgccctcttgccttcagtttcactgcccagtttaatcactgggtcactttcagtgtcattttcctgtaacccctgtctatggtgttaccctctcccttaaaaccagggattgcagattcacatgcctccaagtgagggcggtcaggggcggttatgaactaggtgataggtgtcccacttgaaggggccagctgctgcacctgctactcagacacatgtcaccataggaatgttggcccaatgtgccagattattttcttaaaggaaccaagattctatatttttatgtgaaatttgctaatttttagatgttggctactaattctaatatttgaaaaacctgtgataagtgagctaaagcagttcttcaggctgacgtggctttggtttaaaccctctccgcacttctccaggttgtccattatcgacggtaatgctccaggtttcttggcgtgatgtacaaggcctttctgaatctgaacacaaccttacccttccatgcagctggcattccagccattctgaacctgttgcccttcctggaccagagcctactcgttcagatcttggtgcctttacaaattctgttttccctctttctcagtcgtttgcacctgaaatccttttacttctaagagtcagcttagacatcaccacctgtgtaaaaccttatccgtctgcaccaggctaacatatcccttccctcctctgtgaaggtggtcgtgtgtattgctttgtgactcctctcacataggattgtactgatttttttcttttttaatctagaagtctctcttctctgctgggacattgggaagacaaaagctgtgcaatattcatgcttgcatttttttaataatagtgcctggagcacagtagatgctcaaaaatagttgaggaatgaagaaaatgaaagaatgatggattaggcctgtgagtttgggatatcaactccaggatgtgacaagagagaagaagggagatgttcaggagaccctgaaaggcgatggatagccatttaggcatggagagaactgcagagtcaggtttactgtgaattcacggttttcacggttcgaaaacctgcctgggacagaggttggagttgatgctattgatatgtcttggcagaaggaaaagggaggaaacgtagatttgcgtttcgtaggctttatgaaaatacgtgccattaaacttaggttgtgtactagttagcctctcaggcttggtgtgtgttggtctcttgcattccgtaagggtccttgctgtcagcaactgagcagatgcctctggaattggatatctgagtttgccccttgctgcgcctgcccggctctgccatgaccatggtcattattgggggcactgttgatacagaggagaaagagaaggggatagggaagatgatgcatagcgggaaccttggccccatggccttcctccctacagcactcattctcaccaggtagaagagaggctgctttcagcagaggagctttgtacccttcggcttttgaagaggagactttatgtaatatttataaatggggagaatggcttagctatttcggttcagctccgttatctctttgaagccttggcttttattaaggaagaaaagatagccacttgcttcctgaaatatatttccggtataacattgggtggtgaaaagcgagatcattcttaaattttcctaaagaagtagctaacaacggataatagtactttttgggaagttgggtggaagtgaatttggagatttgcagattccacctcctctggcttctgtagcattgagccaaggctgctctctgcaaactccctgacctcaggacttctcggagcctagggggttccaggatgctcttcgaagcctccaccagggctcacttctcagcagtgcacacacactgacacagtgcttaatatatacaagtattaaaatacttcacatggctacattaattataagtgtaagaatttttttttcttttttttttttttttttcctgaaaacagggtctcgctctgtcacccaggctggaatgcagtggtgcagtcacagctccctggggcctcaccctcccaggctcaagcaatcctcccacctcagcctcccgagtagctgggactataggtacacgccaccacgcctggctaatggttttattttttatttctttgtagagatggggtcttgctatgctgcccaggctggcctcaaactcctgggctcaaggagtgcccccatcttggcctcctaaagtgctggcattacacatgtgagctaccacacccaacctccatgtttctttactgataaacttttagctgtaaccaggaagttttatatactagtatccagcttaaacacagcttaaacttgtatgtacagagaatagctgtttcttgcatctcaagttttccctttattattcttactttgtttaatttctcaagaggttagaattaagctttgaaga

SEQ ID NO: 450 - DNA, 11920 bp, Homo sapiens
gttggttggagtggcctcactcttacctgccaacctgggaggttgatgatgaacatgtctttaccttttctttggagtttgcttaccttattaatatttgctgaagtaaatggcgaagctggagaacttgagctgcagagacaaaaaagaagcatcaatctccaacagcctcgaatggctacagagagaggaaatttggtgtttcttacggggtctgctcaaaacattgagtttagaaccggatccctgggaaaaattaaattaaatgatgaagatctcagtgagtgtttacatcagatccagaaaaacaaagaagatattatagagttaaaagggagtgcaattggtctgcctcaaaatatatctagtcaaatctatcagcttaattccaagctggtggatcttgagagaaaattccaaggcttgcagcagactgttgacaaaaaggtttgcagcagcaatccttgccagaatggtggaacctgcctcaatctgcatgattcctttttttgtatctgtcccccacagtggaagggtcctctctgctcagctgatgttaacgaatgtgagatttactcaggaacacccttgagctgccagaatggaggcacatgtgttaatacaatgggaagttacagttgtcactgcccacctgagacgtacggaccccagtgtgcatccaaatatgacgactgtgaagggggttctgtggcacgctgtgtccatggcatctgtgaggatttaatgcgagagcaagctggagagcccaagtacagctgcgtctgtgatgctgggtggatgtcttcacccaacagccctgcctgcacgctggacagagacgagtgcagcttccagcccgggccttgctccacacttgtgcagtgtttcaacactcaaggctctttctactgtggggcctgtccaacaggctggcaaggcaatggatatatttgcgaagatatcaatgaatgtgagataaataacggcggctgttctgtggctccacccgttgagtgtgtgaatacacctgggtcttcccactgccaggcctgtccaccagggtaccagggtgacggaagagtgtgcacactcacagacatctgctcagtcagtaatggaggctgccacccagatgcctcatgctcctcaactctaggttccttacctctctgcacgtgtctcccgggttatactggaaatggttatgggccaaatggatgtgtgcagctcagtaatatttgcctaagtcacccctgtctaaatggacaatgcatcgacactgtctctggttatttttgtaagtgtgactcaggttggacaggtgtcaactgtacagaaaacatcaatgagtgtttgagcaacccctgtttgaatggaggaacttgtgttgatggcgttgattctttcagttgtgaatgcacacgtctctggactggagctctctgtcaggttcctcagcaagtttgtggagagtccctctcaggaataaatggaagcttcagctacaggagcccggatgttggttatgttcatgatgttaactgcttctgggttatcaaaactgaaatgggaaaggtcctgcgtatcactttcacttttttccggttagaatccatggacaactgtccacacgagtttcttcaggtttatgatggagattcctcttctgcttttcaacttggaagattttgtggctccagcctccctcatgaactcctcagcagtgacaatgctctctattttcatctctattctgaacatttaagaaatgggagaggctttacagtaagatgggaaacacagcaaccagagtgtggaggtatcctgactggtccttacggttctattaagtctccggggtatcctggaaactatcccccaggaagagattgtgtctggattgttgtaactagtcctgacctcctggtaacatttacttttgggaccttgagcctcgagcaccatgatgactgcaacaaagattaccttgagattcgagatggtcctttgtatcaggacccccttcttgggaagttctgcaccactttctctgtcccaccgctccagactactggcccctttgccagaattcacttccattcagactcccagattagtgaccaaggcttccatatcacctacttaacatcaccttcggatctgcgttgtggtgggaactacacggacccagagggtgaactcttcttgcctgagttgtctgggcctttcactcacaccaggcaatgcgtctatatgatgaagcagccccagggagaacaaatacaaatcaacttcacccacgtggagctgcaatgccagagtgacagttctcagaattacattgaggttcgagatggtgaaaccttacttggaaaagtctgtggcaacggaaccatctctcacattaaatccattactaatagtgtctggatcaggtttaaaatagatgcttctgttgaaaaagctagtttcagagctgtttatcaagtcgcttgcggggatgaattaactggagaaggggtcattcgctcgcctttttttcctaacgtgtatcctggagaaagaacctgtaggtggaccatccaccagccccaaagccaagtcattctcctcaacttcactgtctttgaaattggaagttctgcccactgtgaaacagattatgttgagattggtagcagttccattttgggttctcctgaaaataaaaagtattgcggtacagacataccttcatttataacatctgtgtacaattttctttatgtcacattcgtgaaaagttcttctactgaaaaccatggtttcatggctaagttcagtgctgaggatttggcatgtggagaaattcttacagaatcaacagggaccattcaaagtcctggccatccaaatgtctacccccacggtatcaactgtacttggcatatattagtccaacctaatcacctgattcatttaatgttcgaaacatttcatctggagtttcattacaattgcacaaacgactacttggaagtttatgacaccgactctgagacatcccttggaagatactgtggaaagtcgatcccgccatctctcacaagcagtggtaactcattgatgctggtgtttgtgactgactccgacctcgcttatgaaggcttcttaataaactatgaagcaatcagtgcagcaacagcatgtttgcaagactacacagatgatttggggacattcacttctccaaacttccccaataattatcccaacaactgggaatgcatttatcggatcacagtgagaactggccaactgattgcagtgcacttcacaaacttctccttggaggaagccattggaaactattatacagattttctggaaatcagagatggaggctatgaaaaatcaccattgctgggaatattctatggctcaaatctacccccaacaatcatctctcatagtaacaaactatggttaaaatttaagagtgaccaaatagacacaaggtctggattctcagcttactgggatgggtcatcaacaggttgcgggggtaatctcaccacttcaagcggcacgttcatatctcccaactacccgatgccctattaccacagctctgaatgctactggtggttgaaatctagccacggcagcgcatttgaactggaattcaaagactttcacttggagcatcatccaaactgcactttagattacctggctgtatatgatggcccaagtagcaactctcatctgctaactcagctttgtggggatgagaaaccccctcttattcgttctagtggagacagcatgtttataaaactgaggacagatgaaggtcagcaaggacgtggcttcaaggctgaataccggcagacatgtgagaatgtggtaatagtcaatcaaacctatggcatcttagagagtatagggtatccgaatccttattctgaaaatcagcattgcaactggaccatccgggcaacaacaggcaacactgtgaactacacatttttagcatttgacttggaacatcacataaactgctccacagattatttagagctctatgatggaccacggcagatgggacgctactgtggagtagacctgccccctccagggagtactacaagctccaagcttcaagtgctgctccttacagatggggttggccgccgtgagaaaggatttcagatgcagtggtttgtttacggttgtggtggagagctgtctggggccacaggctccttcagcagccccgggttccccaacaggtatccaccaaacaaggagtgtatctggtacattaggacggaccccgggagtagcattcagctcaccatccatgacttcgatgtggagtatcattcaaggtgcaactttgatgtcttggagatctatggaggccccgatttccactctcccagaatagcccaactgtgtacccagagatcacctgagaaccccatgcaggtctccagcactggaaatgagctagcaattcgattcaagaccgacttgtccataaatgggagaggcttcaatgcgtcatggcaagcagtcactggaggttgtggtgggattttccaggctcccagtggagagatacattctccaaattaccccagtccttataggagcaacacagactgttcttgggtcattcgggttgacagaaatcatcgtgttctcttgaacttcactgactttgatcttgaatcacaagactcttgtattatggcatacgatggcttaagctccacaatgtcccgccttgccaggacgtgtggaagggagcagctggctaaccccatcgtctcctcaggaaacagcctcttcttgagatttcagtctggcccttccagacagaacagaggcttccgagctcaattcaggcaagcctgcggaggccacatcctcaccagctcatttgatactgtttcctctccacggttccctgccaattatccaaacaatcagaactgcagctggatcattcaagcgcaacctccattaaatcatatcaccctctcttttacccactttgaacttgaaagaagcacaacgtgtgcacgtgactttgtagaaattttggatggcggccacgaagacgcgcccctccgaggccgttactgtggcaccgacatgccccatcctatcacatccttcagcagcgccctgacgctgagattcgtctctgattctagcatcagtgctgggggtttccacaccacggtcaccgcatcagtgtcggcttgtggtggaacgttctacatggctgaaggcatcttcaacagccctggctacccagacatttatccccctaatgtggaatgtgtctggaacatcgtcagttcccctggcaaccggctccagctgtcttttatatctttccagttggaagactctcaggactgcagcagagattttgtggagatccgtgaaggaaatgccacgggtcacttggtgggacgatactgtggaaactccttccctctcaattattcttccatcgttggacataccctgtgggtcagatttatctcagatggttctggcagcggcacgggcttccaggccacatttatgaagatatttggcaatgataatattgtgggaactcatgggaaagtcgcctctcctttctggcctgaaaactacccacataactccaattaccaatggacagtaaatgtgaatgcatctcacgttgtccatggtagaatcttggagatggacatagaagaaatacaaaactgctattatgacaaattaaggatctatgatgggcctagcattcacgcccgcctaattggagcttactgtggtacccagactgaatctttcagctccactggaaattctttgacatttcatttttactccgactcttcaatctcagggaagggattccttctggagtggtttgcagtggatgcacctgatggtgttttacctaccattgctccaggtgcttgtggtggcttcctgaggacgggagatgcacccgtgtttctcttctccccgggctggcctgacagttacagtaatagagtggactgtacgtggctcatccaggctcccgactctaccgtggaactcaacattctttccctggacattgaatctcaccgaacgtgtgcctatgatagccttgtgatacgagatggagataataacttggcccagcagctagcagttctctgtggcagagagatccctgggcccatccggtctactggagagtacatgttcatccgcttcacctcggactccagtgtaaccagggcaggcttcaatgcatcctttcacaagagctgcggtggatatttgcatgcagacagagggatcatcacgtcccccaagtatccagagacttacccatccaacctcaactgttcttggcacgtcctggtccaaagtggcctgaccattgctgtccattttgaacagcctttccagattccaaatggagattcttcttgcaaccagggggattacttggtgctaagaaatggtcctgatatctattctccacccttgggaccccctggaggaaatggtcatttttgtggcagtcatgcttcatcaactctgttcacctcggataatcaaatgtttgttcagtttatttctgatcacagtaatgaagggcaaggatttaaaatcaaatatgaggcaaagagtttagcctgtgggggcaacgtctacatccatgatgctgattctgctgggtatgtgacctcccccaaccaccctcataattatcccccgcacgctgattgcatttggatcttagcggctccaccggaaacacgcatacagctgcaatttgaagatcgattcgatattgaagtaacacccaactgtacttccaactaccttgagttgcgggatggagtggattcggatgcaccaatactttccaaattttgtgggacatctttgcccagcagtcagtggtcctcaggagaggttatgtatttgagatttcgatctgacaacagccccacacatgtgggattcaaggccaagtattctatagctcagtgtgggggaagagtaccagggcaaagtggtgttgttgaaagcattggacatccaacacttccatacagagacaacttattctgtgagtggcatctccaggggctctctggacactatctcaccatctcttttgaagactttaaccttcagaattcttctggctgtgaaaaagacttcgtggagatctgggacaatcatacctctggaaacatcttgggcagatactgtggaaacaccattcctgacagcatagacacttctagcaatactgctgtggtcaggtttgtcacagacggctctgtgactgcctcaggattcagactgcgatttgaatccagtatggaagagtgtggtggggatcttcagggctctattggaacatttacttctcccaactacccgaacccaaatcctcatggccggatctgcgagtggagaatcactgccccggagggaaggcggatcaccctaatgtttaacaacctgaggctggccacgcatccgtcctgcaacaatgagcatgtgatagtattcaatggcattagaagtaactcaccccagctagagaaactgtgtagtagtgtgaatgtaagcaatgagattaaatcttcaggaaacacaatgaaagtcatttttttcacggatggatccaggccatatggcggcttcactgcttcctatacctccagtgaagatgcagtgtgtggtgggtctcttccaaatactcctgaaggaaactttacttctcctggctatgacggagtcaggaattactcaagaaacctgaactgcgaatggactctcagcaatccaaatcagggaaattcatccatttccattcactttgaagatttttacctagaaagtcaccaagactgtcaatttgatgtcctcgagtttcgagtgggtgatgctgatgggcccctgatgtggagactttgtggtccttcaaagcctacattgccattggttataccttattctcaggtatggattcactttgtcaccaacgaacgtgtagaacacattggattccatgcaaagtattcctttacagattgtggcggaatacagataggtgacagtggagtgatcacaagccccaactatccaaatgcttatgacagcctgacccactgctcttggctgttggaggccccacaagggcacaccatcactctcacatttagtgactttgatattgaaccccatacaacttgtgcttgggactctgtcactgtcaggaatggtgggtcccctgaatcacccatcataggacaatactgtggaaattcaaaccccaggacaatacagtcaggttccaatcagctggtcgtgacttttaactcagaccattcattgcaaggtggtggattttatgctacgtggaacacacaaactttaggttgtggtggaatatttcattctgataatggtacaatcagatcccctcactggcctcagaattttcccgaaaacagcagatgttcctggacggccattactcacaaaagtaaacacttggagatcagctttgacaacaacttcctaatccccagcggtgatggacaatgtcagaatagcttcgtgaaggtgtgggcaggaactgaggaggtggacaaagccctgctagccactggctgtgggaacgtggctccgggtcccgttatcacaccaagtaacacattcactgccgtcttccagtctcaggaggcaccagctcagggcttctccgcgtcctttgttagccgatgtggaagtaatttcactggcccttcaggttacatcatttctccaaattacccaaaacaatatgacaacaacatgaattgcacctatgtcatagaggctaatcctctgtcagtggtcctcttgacttttgtgtccttccacttagaagctcgttccgctgtgacgggaagctgtgtcaacgatggcgtgcacattatcagaggttacagcgtcatgtccaccccatttgctactgtgtgtggggatgagatgccagctcccctcaccatcgctgggccggttctgcttaacttctactccaacgagcaaatcacagacttcggattcaagttttcctataggataatctcctgtggtggtgtgttcaatttctcttctggaatcatcacaagtcctgcctattcatacgcagactacccaaatgatatgcactgtctgtataccatcaccgttagtgacgacaaggtgatcgagctcaagttcagtgattttgatgtggttccctccacctcctgctcccatgactacctggcaatttacgatggtgccaataccagcgatccccttcttggcaaattctgcggttccaagcgcccaccaaatgtgaagagcagcaataatagtatgctcctggtgttcaagacagattcatttcagacagcaaaaggctggaagatgtctttccggcagacattggggcctcagcaaggatgtggtggttatctgacaggctcgaataatacctttgcctctcctgattctgattcgaatggaatgtatgacaagaatttaaactgtgtatggatcataattgcacctgtaaacaaagtaattcacctcaccttcaatacatttgctctggaggcagcaagtactaggcaaagatgcctttatgattatgtaaagttatatgatggggatagtgaaaatgcgaacttggctggaacgttttgtggttccacagtacctgctccttttatctcttctggtaacttccttacggttcaattcatcagtgacttaacattagagagggaaggatttaatgctacatacaccatcatggacatgccttgtggtggaacatacaatgcaacttggaccccacaaaatatttcatcacccaattcatcagacccagatgtcccattttccatctgtacttgggtcattgattcccctccgcatcagcaggtcaagataactgtgtgggcattacagctgacctcgcaagactgcacgcagaattacttacagcttcaggactcaccgcagggtcacggaaattcaagatttcagttctgtggcagaaatgcttcggctgtgccagtgttttattcttctatgagtactgcaatggtcattttcaaatctggagttgtaaacagaaactctagaatgagtttcacctatcagattgcagattgcaacagagactatcacaaggcatttggcaacctgagaagccctggatggccagataactacgacaatgacaaggattgcaccgttactctcacagccccccagaaccacaccatttccctcttttttcattcacttggcatcgagaactcagttgaatgcagaaacgatttcttggaggtgagaaatggaagtaacagcaattcaccattactgggcaagtactgtggaactctgctgccaaaccctgtcttctctcaaaataatgaactatacctacgatttaagagtgatagtgtaacttctgatcgtggatatgaaatcatctggacttcatcaccctctggatgtggtggaactctttatggagacagaggctcattcaccagccccggctatccaggcacatacccaaacaacacgtactgcgagtgggtccttgttgctcctgctggaaggcttgtcaccatcaacttctacttcatcagcattgacgatccaggagactgtgtccagaactatctcacactctatgatgggcccaacgccagctctccatcctctggaccatactgcggaggcgacaccagcatagctcccttcgtggcttcctcaaatcaggtcttcataaaatttcatgctgattatgcacggcgtccatccgcattccgattaacttgggacagctaagtgggtaacaactcgtgttcactcagcactttccctctgcagcacgctggacagcactctgccatcctgatacatgacccctgctgatgccacagagaataagctgaacttgtatggtttttcaccaaaccatggatagaatcaatatttgtaggccaggcgtggtggctcacccccctgtattctcagcactttgggaggccgaggcaggttgatcacctgaggtcaggagtttgagactagcctggccagcatggtgaaacctcatctctctaacaatataataattagccaggcgtggtggtgggtgcctgtaattccagccactcgagaggctgaggcaggagaattgcttgaacccaggaggcagaggttgcagtgagctaagatcacaccactacactccagcctgggcgagacggcaagactccatctcaaaaaaaaaagaaacaaaaaaaaccagaatcaatatttgtacattttctcgaacatagaatatagcttctttagtcttgagtgtgcatttcattctaatattttgagctgaaatttaaaaaaactttgaaagagttggaaatgattatggcatatgtgacatacgtttttaaaagttaataataatagccaggggcagtggctcatacccataatcccagcacgctgggaggccatgatgggaggattgcttgaacctaggagtttgagaccagcctgggcaacaaagtgagacctgatttttacaaaaaatcaaaaaattagccaggcatggtggcatgcacccgtggttccagctacacaggaggttgaagcaggaggatcacttgagcccagtaggttaaggctgcagtgaaaccctgtgaattaaccactgtactccagcctgggtgacagactgagaccctatctcaaaaatgacaacaagaacaacaaaagttaatgataatatagaagcataaatttcctgtgaatgttcaattacacataataaacattattgaattgt

SEQ ID NO: 451 - protein, 3609 aa, Homo sapiens
MMNMSLPFLWSLLTLLIFAEVNGEAGELELQRQKRSINLQQPRMATERGNLVFLTGSAQNIEFRTGSLGKIKLNDEDLSECLHQIQKNKEDIIELKGSAIGLPQNISSQIYQLNSKLVDLERKFQGLQQTVDKKVCSSNPCQNGGTCLNLHDSFFCICPPQWKGPLCSADVNECEIYSGTPLSCQNGGTCVNTMGSYSCHCPPETYGPQCASKYDDCEGGSVARCVHGICEDLMREQAGEPKYSCVCDAGWMSSPNSPACTLDRDECSFQPGPCSTLVQCFNTQGSFYCGACPTGWQGNGYICEDINECEINNGGCSVAPPVECVNTPGSSHCQACPPGYQGDGRVCTLTDICSVSNGGCHPDASCSSTLGSLPLCTCLPGYTGNGYGPNGCVQLSNICLSHPCLNGQCIDTVSGYFCKCDSGWTGVNCTENINECLSNPCLNGGTCVDGVDSFSCECTRLWTGALCQVPQQVCGESLSGINGSFSYRSPDVGYVHDVNCFWVIKTEMGKVLRITFTFFRLESMDNCFFLQVYDGDSSSAFQLGRFCGSSLFLLSSDNALYFHKEHLRNGRGFTVRWETQQPECGGILTGPYGSIKSPGYPGNYPPGRDCVWIVVTSPDLLVTFTFGTLSLEHHDDCNKDYLEIRDGPLYQDPLLGKFCTTFSVPPLQTTGPFARIHFHSDSQISDQGFHITYLTSPSDLRCGGNYTDPEGELFLPELSGPFTHTRQCVYMMKQPQGEQIQINFTHVELQCQSDSSQNYIEVRDGETLLGKVCGNGTISHIKSITNSVWIRFKIDASVEKASFRAVYQVACGDELTGEGVIRSPFFPNVYPGERTCRWTIHQPQSQVILLNFTVFEIGSSAHCETDYVEIGSSSILGSPENKKYCGTDIPSFITSVYNFLYVTFVKSSSTENHGFMAKFSAEDLACGEILTESTGTIQSPGHPNVYPHGINCTWHILVQPNHLIHLMFETFHLEFHYNCTNDYLEVYDTDSETSLGRYCGKSIPPSLTSSGNSLMLVFVTDSDLAYEGFLINYEAISAATACLQDYTDDLGTFTSPNFPNNYPNNWECIYRITVRTGQLIAVHFTNFSLEEAIGNYYTDFLEIRDGGYEKSPLLGIFYGSNLPPTIISHSNKLWLKFKSDQIDTRSGFSAYWDGSSTGCGGNLTTSSGTFISPNYPMPYYHSSECYWWLKSSHGSAFELEFKDFHLEHHPNCTLDYLAVYDGPSSNSHLLTQLCGDEKPPLIRSSGDSMFIKLRTDEGQQGRGFKAEYRQTCENVVIVNQTYGISIGYPNPYSENQHCNWTIRATTGNTVNYTFLAFDLEHHINCSTDYLELYDGPRQMGRYCGVDLPPPGSTTSSKLQVLLLTDGVGRREKGFQMQWFVYGCGGELSGATGSFSSPGFPNRYPPNKECIWYIRTDPGSSIQLTIHDFDVEYHSRCNFDVLEIYGGPDFHSPRIAQLCTQRSPENPMQVSSTGNELAIRFKTDLSINGRGFNASWQAVTGGCGGIFQAPSGEIHSPNYPSPYRSNTDCSWVIRVDRNHRVLLNFTDFDLESQDSCIMAYDGLSSTMSRLARTCGREQLANPIVSSGNSLFLRFQSGPSRQNRGFRAQFRQACGGHILTSSFDTVSSPRFPANYPNNQNCSWIIQAQPPLNHITLSFTHFELERSTTCARDFVEILDGGHEDAPLRGRYCGTDMPHPITSFSSALTLRFVSDSSISAGGFHTTVTASVSACGGTFYMAEGIFNSPGYPDIYPPNVECVWNIVSSPGNRLQLSFISFQLEDSQDCSRDFVEIREGNATGHLVGRYCGNSFPLNYSSIVGHTLWVRFISDGSGSGTGFQATFMKIFGNDNIVGTHGKVDFWPENYPHNSNYQWTVNVNASHVVHGRIMDIEEIQNCYYDKLRIYDGPSIHARLIGAYCGTQTESFSSTGNSLTFHFYSDSSISGKGFLLEWFAVDAPDGVLPTIAPGACGGFLRTGDAPVFLFSPGWPDSYSNRVDCTWLIQAPDSTVELNILSLDIESHRTCAYDSLVIRDGDNNLAQQLAVLCGREIPGPIRSTGEYMFIRFTSDSSVTRAGFNASFHKSCGGYLHADRGIITSPKYPETYPSNLNCSWHVLVQSGLTIAVHFEQPFQIPNGDSSCNQGDYLVLRNGPDIYSPPLGPPGGNGHFCGSHASSTLFTSDNQMFVQFISDHSNEGQGFKIKYEAKSLACGGNVYIHDADSAGYVTSPNHPHNYPPHADCIWILAAPPETRIQLQFEDRFDIEVTPNCTSNYLELRDGVDSDAPILSKFCGTSLPSSQWSSGEVMYLRFRSDNSPTHVGFKAKYSIAQCGGRVPGQSGVVESIGHPTLPYRDNLFCEWHLQGLSGHYLTISFEDFNLQNSSGCEKDFVEIWDNHTSGNILGRYCGNTIPDSIDTSSNTAVVRFVTDGSVTASGFRLRFESSMEECGGDLQGSIGTFTSPNYPNPNPHGRICEWRITAPEGRRITLMFNNLRLATHPSCNNEHVIVFNGIRSNSPQLEKLCSSVNVSNEIKSSGNTMKVIFFTDGSRPYGGFTASYTSSEDAVCGGSLPNTPEGNFTSPGYDGVRNYSRNLNCEWTLSNPNQGNSSISIHFEDFYLESHQDCQFDVLEFRVGDADGPLMWRLCGPSKPTLPLVIPYSQVWIHFVTNERVEHIGFHAKYSFTDCGGIQIGDSGVITSPNYPNAYDSLTHCSWLLEAPQGHTITLTFSDFDIEPHTTCAWDSVTVRNGGSPESPIIGQYCGNSNPRTIQSGSNQLVVTFNSDHSLQGGGFYATWNTQTLGCGGIFHSDNGTIRSPHWPQNFPENSRCSWTAITHKSKHLEISFDNNFLIPSGDGQCQNSFVKVWAGTEEVDKALLATGCGNVAPGPVITPSNTFTAVFQSQEAPAQGFSASFVSRCGSNFTGPSGYIISPNYPKQYDNNMNCTYVIEANPLSVVLLTFVSFHLEARSAVTGSCVNDGVHIIRGYSVMSTPFATVCGDEMPAPLTIAGPVLLNFYSNEQITDFGFKFSYRIISCGGVFNFSSGIITSPAYSYADYPNDMHCLYTITVSDDKVIELKFSDFDVVPSTSCSHDYLAIYDGANTSDPLLGKFCGSKRPPNVKSSNNSMLLVFKTDSFQTAKGWKMSFRQTLGPQQGCGGYLTGSNNTFDDSDSNGMYDKNLNCVWIIIAPVNKVIHLTFNTFALEAASTRQRCLYDYVKLYDGDSENANLAGTFCGSTVPAPFISSGNFLTVQFISDLTLEREGFNATYTIMDMPCGGTYNATWTPQNISSPNSSDPDVPFSICTWVIDSPPHQQVKITVWALQLTSQDCTQNYLQLQDSPQGHGNSRFQFCGRNASAVPVFYSSMSTAMVIFKSGVVNRNSRMSFTYQIADCNRDYHKAFGNLRSPGWPDNYDNDKDCTVTLTAPQNHTISLFFHSLGIENSVECRNDFLEVRNGSNSNSPLLGKYCGTLLPNPVFSQNNELYLRFKSDSVTSDRGYEIIWTSSPSGCGGTLYGDRGSFTSPGYPGTYPNNTYCEWVLVAPAGRLVTINFYFISIDDPGDCVQNYLTLYDGPNASSPSSGPYCGGDTSIAPFVASSNQVFIKFHADYARRPSAFRLTWDS

SEQ ID NO: 452 - DNA, 25371 bp, Mus musculus
caacaacaatatcaaatgtcaatcctagaaattaaaacaaaataaataaaatatgaccttaaggagcaaaaagagatgcagtagagacgcagtataggagcggggaggaaactggacacagaacagtcctgagaactatagggctctccagctctgctctgttctgacttacttacatgtcatctctccagttctcctgaggccacgggggtgtggcgggggagtcaacttctcatctacatctgtgctttcccccttcattttaattaattagcttgatggtgaggggcgtgtgaatgtcatgatcagaagacacgggtcctaggggtcaattgaaggttgttaggattggaagcaagtgccgttacttgcctgcccaatggttataactgatcgatccctcaagcattttttttttctctcttttggtctgtctgtggaaaagtccatttagccatccacttggcacactcgtaaagtgatcactgggaatcttttaaagggcccaagttcaaaagtgctgaagcaatgaacttcctgatttttagaaaagtcgcctcagggtggcttggttggcactggggtgtccaacccttccctgattcatccgtacggaaagcgctgctcataggtctgctgggcagctctggccttcccccatttaagtggcctccaagccaaagggtgtggcttcagtggaagtagcactagatacaaactcccagaggtagggtggggtggacataccaatacaaataaagtaaaattccctagacatgcattggcatattaggaaaataccatttttccagggcttgtttggtcttgagaatcccccaataagcctactaaaacgaagatacataggtgtctatctaatgagttcgaattttcaaggttaaactgaaaatctatagtttttagactttcaagccaggttgttttcatgtacagacctgatgtgtgagcatagtattgaggggtattcattattttggttaccaggcacttatccaacaagcctttttttttttttttttaattttggcttgggaggaggggctaaaaagactatcatagcaattatcaagtcaggctttggggactagagctgtatactgctcagtggcacagctctcttgcctactgtaatcaagctcctgggctccttagcactgccaaaacaaagcaccaacaaactcccaggctttctggcaagaaacctgggtctgacctgcctggaaacgactgtaggattttgagcaagttattcagcctctcagaacctctttttctttaactgagaagtggagacgatactgtatcttcctcactgaggattgagtcatgcatatagaacttagtccagtgcctataaacaacaacaacagcaacaaaagtgctctgtaaataggggctgctgatatttccacacacacacacaagtccaaccgtgtgcatcctcagatgtaaacatggttaagaagacctcatgagagagggagattaggaaagatggttcagaaatctacacatgtatgaaagtacagccacaggatccagtgacctgtttctgcctagacccagaagacacatctgtggctgcttatattaaacaaaaggaagaacatgttcatcaaagcctgtctctactgaacagcaggaaccaaagcagacgggacgctgacatctgggactttcctgggtgccatcatgggtttgaagtaaaaattgcatggactgggcctgctgctgaacacctgtaatcctagcatctgtggaggtagatgcagaatcaggagttcaaaaccatcctcagctacataacaagttctgggtcacaactgggctacatgagccgaacaaaaccaaacaaccacaaaaagcaggatgttccccccatataaggacaaatacctgccctaacgagtcagacttactacagactgactaggacactgtcttagtgtttcccaagccctataattagccaagtctgaatgggggcaccggctctattgtttatctacagtgtggccttgggaacttgttcgaacttgtgtttctcagttttaactataagatgatcacattgatagttctttctttaaagaacactgttaaggattttgttgttttattgctgttgtttatctttttctcttttcaagataggattttctgtgtagttctggctgtcttggaacttactctgtacatcagactgacctcaaactcagagttctgcctgcctctgcctcctgagtgcttagattaaagatgtgagccgtcacagtccagttatactgttaaggctttaaaagcaaatatcatacaattaactttatttattagctatcttttacattttaatttttttgtaatgttatccaggctggtgttggatttttgggtcactgtacctggctttgttatccctttaaccgggacagattataaaatccccttgaaaaacacgggccttcgccttcttttttcttgtttctgccacactgccataatcactgcccccagagtaaggaaggaacagtctgcccatgcaattatccacatcctgttcctctcaactgtgcccctgtttccccgggtccctgctctgtgtgtgtgtgtgcgcgcgcgcgtgtgcacacatacacacactctttctgtttgcacaggtgtccatgcattctcccaaaccttcctcagaggtttgtctgattgatgtccataactgcatggggaaacggagcattttctgcaggtggacagggcagacaaaggcattgagggtggacagggagaaaggaaggaaggaaggaaggaggtgaggagccggaataggagagagggtggaaatgtgtcatgaggttcctcaaaatctgcaagttatgaatctcattgtcagtgaatgacctctggtgattcacttccttttattagctgctcctccatcggtgtcatgaagggggatgctttcattttccttaagtaaatgaccacatacagaatctagtttgagagagccatgaaaacatacatcatataggctacagatgttatcctgattttcttcagaacaagactgcctagcagttcagctcatagctgaacacatttccctaagtaagactgacttcttgacagttttcagccaacccagcagtttctcatttcctctttgagccttttctctagagtacgtccttagtttcctcttttttttttttaagttctattttttttaaagatttatttatttattatatgtaagtacactgtagctgtcttcagacacaccagaagagggagtcagatctcgttagggatggttgtgagccaccatgtggttgctgggatttgaactcaggaccttcggaagagcagttgggtgctcttacctgctgagccatctctccagcccccttagttcctcttaagcatccgttgccactaagttatgctgacctgagtagtgagtagttgtaggacaggagactggagagtcttttcctggagagagatgcagattccaggaggtttggaaagttataactagggcgctggagagatggctccgcagttatgagcattgggtgttcttccagagaagccaggttcaattcccagcacccacatggcagctcacaactgtctgtaactcctgttccagggaatctgacatccttacacagagatatatgcagtcaagatactaatgtacataaaataaaaataaaatttaaaaattttattagatttattcattttattttatgtgtgagaatttcattcaaatgtatgtatgtgcatatgtatgtatgtgcatatgtatgtatgtgcatatgtatgtatgtgcatatgcatgtatgtatgtgcatagtgttcctggtgttcctggaggtcagaagagggctttggatctcttggcagtggaactatggctagttgtgaactaccacacggatgctggaaaattgaagccaggttctcttcaagagcaacaagtgttcttaactactgaaccaccactctggccccccagtattcgtgtagggtaatacatttctgccttactgtgtttgaattagggacaaaagaaatttggccaaggctcaagaatttcatgcagaagtctgagataattggtttgagtataactacaaatcagatcagagtcatgaaataacaaggacgtttagggagtcatagaccgaacataaacgagccaagttgacctgtgcgtttctgtgttattgacgacatcatgtaacctcagggttcagcccttgagtgctttgctttccatgagtaagggcacaaatatgtggcttccctccaccccgtccacaggccattagggacccactagctccaccacctcccctatcatgttgcaggcccagacacagtcagcttcaccttgaccactaagcacacagtaggacaggggagggggccttagactcaaggatgtaagatgatcaattccatggtctgtttcccaaactgctggagtctgtttgccaatatgttaggaaggaggtttaaaaagagtttcatactgcaaagagtcacagataagggggggggggtgagtgggagtcaggagtgcgggggcgagcaacacatgcagctgtctttcccagctgcccagttggtaggaactgtgggccaaggacacagcatccccacttaactggaatcctgcagcatattccagcatgacctggttttttggaccaaaatggacaagcaaaggagggaagcactttagataggaattgcagtttacaaaatccatctttctgtttttagcacctggaactataccggcacatagtagtcctttcactacttaatgtatatagctaatgaatgaatgaatgaatgaatgaacacttttcccacataggcatgacttcatccaatctccaaaatgggaccagggctgtttcattttgcagatgggagaaccaaagtcaaaagagttaagtgccttgtttaaagtcattctactacaataccatactgaatgttcttagtatagcaacccaagaatatatcccatgactcaacacgaaattccttttggacccagctagtcagaaaatagcctttaaaggataggcatgatagcacaggcttgtaatcctagcacttaggaagtgcagactacagtgagtttaaggtcagcctgggctacataagaccctatcttaaaaactcaaagcaatggttagctgctttgggcatggtagcacatgcctttaactggatctctgaatccaaggccagcctggtctatgtaaagagttccaggacatcaagggctacataaagagacccccatttcaaacaaaacagccagccagacaaaaaactcagaacaaacaaacaagaaactaaaccaaaacaaaagctttcggggctcatttccctggataaagaagccaggctaggtttaggcactgctcagtgtgcatctgcactcctgtatcctctacccttttataaacagagccgacaaaagagcccctccactagtctatgtcagcacacctgactcaggaggtctgctctcctgagatacaaaagccacttggagtcaggaaaataatgaaatcatatgcatttgctttcttatttatcactctcaacagaaacttcagccagtttagaccacaagggaagttcctggaattcaggcaagccagtaacatgcacagcgtgggcatcctaagaaaaaagaagaagaaaaaaatgtgtttctggaaggaagtctccagaatagatagaaagacttgaggcaaacactgggctggaatattttataccacctgcctgagtatcttagttaacgggcctctctctttacagcattctgctgctttatggagactgtgggacccagagcccaggagagagtacctagatgcaagtgccgccatgggcacacatgaaccatgttttccttgcaggctgtggaatgagaatataattccagtctacatcatagggcagctctgaactggaagagaaattgaagatgtatctgaaaatgtctttaagacgtatctataagatagaaataacagacaaaaaggatataagcctatactagagagagagagagagagagagagagagagagaacaatcaaacttacctgccttggacttcccacataatcaccttttacaatctaagctaatgcagagcgtgaccttaagctatgtactcttctcatgcccaaactccgataacacatatcaatcatttgttgaaaacagcaaatagaagttaagtaacttcctaaaagctaccataaaggttgagcgaaactatttatggatattgattgataagcaataatatttgttatctggtatttggagtcagttggaagcagagacttaattccttgttgaactctgttaaagattttgccaagtatccattccttccccgtgtggtgctttctgtactgttaaatacgtacatagtaaagacatacaaacaccattcacacatagagacatatacaacacacatagacagaacagacagacaccactcatacacacagctcacacaacagacagacacacatagggatagacacagggacaaacaagttcacaagaccgccttcagacaggcacaaatgcagattcatgcaacaacagatggtcataagacatagtgatcatgaagtagagaattcaaatttagacttgctcgtggttagaagactgcaaagggaagaagtgcttttatatctttatgtcttttatatttatatatttccttaatgcaacacctattcattataggtaacttggagttagtcactaatgtgtataacacacacacacacacacacacacacacacaaagagagagagagcttcaaagctccctgttacttttctctgttctgcattcactgattcactcacaattaagcacctctgtggttaagacatgtagcaaatgatgagggaggggcagatatctaagacctgttctttgcctccaaagagttgaaagtctaacacagactgcaccaaaaatagagatttcagagagtctaaagactaaccaggagaaaggcagttctgtgatgagttggaggcacgaggattgttcatccaggtgaagaagtggcggtagaaggaggaagagggctatcacactgcatagcggtctctggccaggaggaaatgaggtcatcttgctctcaaagaatcagcatgacagcctccagccaagtaatccggagtcatgagagctgttgggggggccatgtgaatcacgacagcctgctgggaatttcctaataactaaactagagtttcggggtaaatcctcaggctgtaacacctctgtttacattttgatcacgtttgtttacaattagtggcttcttaaacataaacataactggccacagtcttctaaaggaagtagcaagttgcctctgagatctatggaatctctgattcagtggtcctgtgggttgctagcagctcagctgcgcaaggaaaacgtattctgaagaacgatggtcacctgcctacccaaagctgggtattcaatgtgtactttcctatccagaggttggcattctgggccactggctggggtaaagtcaagcagcctcctccttcctacctcctggcattcttttccaaggtccaggttgacagtaaaatgttgtaggctcaggcttatggaaataaagcaaagctggggcactaatgaatggtgcgggctcaggcacctcttctgtggaaggagcatcaaaatgaccactggtccttggctctgaggcacatgttgcagtgactgacccttggaatcttttctgagcactccctactttgcctgaggggtgtgtgcatgtgtgcatgtgtgcatgtgtgcaagtgtgtgcatgagggagggtgctttgtcttcaagatgttcagggctcatttatacatgacctgtctttatataagcctattttattagataaattattagataaataattgttttcgtcttaacgtgatgatgtaaaatgctgaacacaagtgcatttacagtgtggaattggcaacagaagagatggctaggctcacacccaaaaataaaatgtgtaattatttttttagaatggctgatacgaggacgtgtttaaagtttttaaaacagtgtgaaatagtattcagtgaaaaataaacattccttttatcttttccttcagacccacagcctctctactacaagggaagagcagacacccccactgttgttgcatgttgatagcccacactaacgaggtttgagtattccttgctttttttttctatcctgttacaatgtactgttcatgttactgttcacatcactgactgctcttccagaggtcctgagttcaattcccagcagccacatggtggctcatgaccatctacaatgggatctggtactcttttctggtgtgtctgaagagaggactgtgcactcgcatacataaaataaataaatctttaaaaaaaagacacccccccttgattgcttatttgtgtctgtgtgcaaccacaataccagtgaggtatgcactcagtcctgatctatgatcctctgtattggttgtattcttttccagacaaataaatggattgttcattataggcatttttcaaaagacccattgacacttccatagcagctgctgtgccaagactttgctcccacaatcctaacatagtaaccattactgcttttttaaaaatcataattatttttgaggatttcactatgtaaattagtctgggcttgaactcgcagagatccacctgcctcttcctccctagtgtttagataaaagacgtgcaccattaagtctggcccttgccataaattttaaaattgtctttcaaagattgaccttaaaccaaacagcaaatctgaataaaatctgaccttgcctttcaccttctgatgacagtattacactccctgacgacaaacttcactcttgtcttctgattcactgcttgcattagtggcatttggagaactcagcatttgacatgtgggagcctttgttagtaggtattttttgttgtaaaggaactgcgacttatacccctctatcagacatctgaatcagtgtcgtaggcaggtagggggacaggttggagaagaactgattaaaccactaaggaagaggcttgagatcagcgagccaatggctggagcgccctcaccacgctacactggggccgcactaggtgaatgaaagaaaggaagaatgttcaagccgccggatcatcgctcgatccagacagactgcgttaagtttgctcagctggaaattccgtgacttcgtcaaagttgggaagcaagcgcggtccagttgcggtgggatgcaggaaaaggaaaaggagagagagagagagagagagagagagagagagagagagagagagagagagagagagagagagagagccgccctccagcaaacctgggcggggccagggctctggcgggccctaataagggcgagcagcgccgagcagagcctgtagccccagagctctgtctgtcatccatccagtccttgcgtgtctgccagcgcccttccgctgcagtcaccggtgagtgctgttggtctgaagcaagcctagcgggatgaggcagccagggctcccgcatgcctcccttcccactaccttggctggcggaactgtgggcaaggtcaccactccagcccttcgcgcccctctacagagaggttccatggtgttgtgcggattcagagcccgcagaggggagagactgcccggcttggggaggttggtcactgatggcttgccccgcaggacacctggagtggcttcccttggtctgtagtaactctgccaccttcaagctgctccgcttcttgtcctgacttctccttcctttgcagaactgctgtctagagcccagcggcactaccatgaaagtctggctggcgagcctgttcctctgcgccttggtggtgaaaaactctgaagtgagtggtctcgctgctttagcaccatcaggaaggggcttgcaggatcccttaagcagcatcaggggaaaaatgggggctgcacggggaacttaggcatcaaaggcaggtccaggctttcccaggaaataggacaatgtatcagcggagggcttgtgcacccaaagaggtttgcactatctggcaagggaggaagaagccacggggagtgccttagcccaagggcacctggtttgtgtgaagtttgcttgagtcagtccatgtctgggtgctggctagtaataaacagaaaggggagagacagacaggggtggggtgggagaaagagagagagagagagagagagagagagagagagagagagagagagagaatattatgagtgaatgaatatcactggaagggattttgaggtggggacctgtttatcctgaacatgaattccctagagcatgtcaccttcatctcttgcagggtggcagtgtacttggagctcctgatgaatgtgagtatctgcttccttgcacaatagttggctgcacagagacccttgaaaaaccttaggagacataccctccctgtccctgctgaaaggctggctccccacttgatccttgcttacccctcctttgcatttgctagcaaactgtggctgtcagaacggaggtgtatgcgtgtcctacaagtacttctccagaattcgccgatgcagctgcccaaggaaattccagggggagcactgtgagataggtatggggatttggacttggaatgtgggagtgggggaggaccagagatcttagaacagggacagatgggtgggatgcagaagcaggcagaagctggccttggaggtgtgggtctgttaccccagcacttaggaggagactgaagcctggcctccatagtaagtccttgtctcaaaaggcgggcgaggcgcagctagagagacagcttagtgattaagaacactggctgctcttctagacatcctatagtttgagtttcagcacccatagaggtgggttacagccatctgtacccccagtcccagagaatctgatgccctcttctgacctcttccagcccaagtgacatacatggtgtacagatatacatggaggaaaaacactcatacacataaaataagcaaacaaacaaacaaaacaggcagcagaagttgggagtcacacacacacacacacacacacacacacacacacacacacactcatgaagtagtggctatacaagtgtgaaaaaaagggtgaatctccctcatatcacctgacaggtctgaaaccgtgtcacctctgaaatgcctgtccaaaccgcctcccttttctaatactctgcactcctcaaatcatttctagatgcatcaaaaacctgctatcatggaaatggtgactcttaccgaggaaaggccaacactgataccaaaggtcggccctgcctggcctggaatgcgcctgctgtccttcagaaaccctacaatgcccacagacctgatgctattagcctaggcctggggaaacacaattactgcaggtaggtggtgactgagtaccaagaatccttcccaagggggatagggaggtggctcagcagttaagagcacagactgcctttccagagcacctagtttgattcccagcatctacagggcagctcgtgacagtctttaacacctgttctagaggatccgataccctcttctggcctcactgggcaggcatgcactgtcatgaatataggaaaacacttatacacattaaaaacaacaacatcccttcccccatcgtggcctcttagaaacctttgttatcaccatggtatacctgggatgggaatcctggcacaagaatccaggtctctggctgagcctttgttggaagggagaatacagagaagacattcgggcttggcatgacattccctatctctttgtgttaccaggaaccctgacaaccagaagcgaccctggtgctatgtgcagattggcctaaggcagtttgtccaagaatgcatggtgcatgactgctctcttagtgagtgtcgctgactgcttatgacaacggggtgggaagagacaaactctattgtcactgcaggagggatgagaagtgaggtgtgcctcagagacttcttcatcattgctgtctcccccaaacatgtgtctctttcttttctaggcaaaaagccttcttcgtctgtagaccaacaaggcttccagtgtggccagaaggctctaaggccccgctttaagattgttgggggagaattcactgaggtggagaaccagccctggttcgcagccatctaccagaagaacaagggaggaagtcctccctcctttaaatgtggtgggagtctcatcagtccttgctgggtggccagtgccgcacactgcttcatgtacgtccatccctttgtcccttctctctgactcttccacccaaccccaagactgtccttcctccttccctatggacggttacaatgtcattctcctgctaaccctctaaccatgcagcttgtggtcttgggtacaagtaatactttgaggcctctggggtggagtggagagagtgaccggactttgtgagaccaggctgacatgtttcatttctcacagtcaactcccaaagaaggaaaactacgttgtctacctgggtcagtcgaaggagagctcctataatcctggagagatgaagtttgaggtggagcagctcatcttgcacgaatactacagggaagacagcctggcctaccataatgatattggtgagcagaaagcttagttaccagaaaggctaaagtagtggtgggaaatgtggggggacttgaagcccgggatttatataacgagatggatgaggaagagtgcagaatgagatacatgagaagctgaggggtgtagggatcctctgtggagaccttgaatttcccaaaaagatagattcttctaagtagaaacaatcttacaggcatacggcttaggctgagaatgccctgtttgtacaaagtaggatggatgcttcttctctgtataccagaatatagaatgtataaagcaaagccttggctggatttcagctcagctccctcagcaggaaacaacctgttcagctgtatatggtggattttgttgcctgaacatctgtcatctgatgaaataaagcatttggagaatgtggcaggggaggcttcagggtaacaagataccagcagaccttttggatctctgtgactcccatgccacgagtatagatcaatgctcagcattggtaggggagagatgatgaccatctgacacagtgataacctttcccctttgacctttcccttccccacccagccttgctgaagatacgtaccagcacgggccaatgtgcacagccatccaggtccatacagaccatctgcctgcccccaaggtttactgatgctccgtttggttcagactgtgagatcactggctttggaaaagagtctgaaagtaagtgacagatgaagctcactgagagagtctgggggagtgttacggtccagagtaaagagcagactatcaaaggaagactgtggaaacaggactggaaacattatggagggccagggatagagtagggggagatgggcaagcaagtcaaacagggtgtgaacaattgtgagtgaagtaaaagactcagattggagaaacaagaacaagagcttttcatagctgggatatgttttttatcttcacccctgcagagagtctcatttatagacacatcttaatgcaaacatctgtttcttccatctaggtgactatctctatccaaagaacctgaaaatgtccgtcgtaaagcttgtttctcatgaacagtgtatgcagccccactactatggctctgaaattaattataaaatgctgtgtgctgcggacccagagtggaaaacagattcctgcaaggtaagactctcaagcacccctctttatcacccccaactccccagagctcttggatttgatctaacaaccctggggagtctctttccagccaacaatctaagaatcaaggacttaggtctttgggagcttgtcccaatacttataggttcaaacgttgggcatgagtccctgtgctatatgcgttttagactaaaagggaccaagactgctaaaaaaaaataacccagacatggtagagcatacctataacctagcactcttagcattttgaaagctgagacaggaggatcatgagtttaaggccagcccaaactacagagtgagaattcaaggcctgtgccacatagcaagatcctttctcaaataaaacaaggaaagcacaaaccataaaaaccaagacaatagcaacaaagggatgggtgcctagctcagtggtttagtgcttgcttactatgctcaaagtcctgagttcaagtctcaactcagggactggagatcataagaaaaactaagagtctggggacgtggcttagttggtagagtacttacccagcatgaaagaagccctggatccagtcctcggcactgtatgtaatgacccaggcctgcagtatcagcccttgagggagtcagaatcagtttataagttcttcagttacagagtgagttcaaagccagcctgaaagacatgggcttatgagactctgtcccaatctgaaagaacacaaccaaccaaccaaccaccaccaccaacagcaaaatatagatactattcaaatcacttctgggcctttggctaagacaagtgaaatcaacataattctattgttcaggatcgcagtgaattaccaaagatcaggtaggaaaggaaggagaagtcttaaagagactatgaactggtaaataaagagacggaaggaaaaaggaagcatgtgtcagttggaaaaaacaaaactaagactgagcatgctgtgtgccaaggcgaggaatagcagggtctgggaaagcactggagagtgggagaggaaagctaagactttttactcttgattcggtagaaaatggggagttgcgaatgtctctgactctgggagcctctccccgttctctcccgtggctgggtagtggcccttccctcagttcttccagggcttcacctctttatctttggcttcccagggcgattctggaggaccgcttatctgtaacatcgaaggccgcccaactctgagtgggattgtgagctggggccgaggatgtgcagagaaaaacaagcccggtgtctacacgagggtctcacacttcctggactggattcaatcccacattggagaagagaaaggtctggccttctgatggccctcaggtagctgagggaagaaacagatgggtcacttgttcccatgctgaccgtcctctctgcaacagagtcgtcaaatggagggaagaagctgaaaagacaggttttgcattgatcctctgctgtgctgcccaccagggtgagcgccaatagcattaccctcagacacaggcctgggtgctggccatccagaccctcccgaccaggatggaaagttggtcctgactcaggatgctatagaccaggagttgcctttttatggactaaagccatctgcagtttagaaaacatctcctgggcaagtgtaggaggagagctgtttcccttaatgggtcattcatgagatctgctgttgggaaataaatgatttcccaattaggaagtgcaacagctgaggtattgtgagggtgcttgtccaatatgagaacggtagcttgaggagtagagacactaacggcttgagggaacagctctagcatcccatgaatggatcaggaaatgttatatttgtgtgtatgtttgttcactctgcacaggctgtgagtataagcctgagcaaaagctggtgtatttctgtatctaactgcaagtctaggtatttccctaactccagactgtgatgcggggccatttggtcttccatgtgatgctccacgtgaatgtatcattcccgggcgtgacccgtgactagcactaaatgtcggtttcactttttatatagatgtccacttcttggccagttatcttttttttttttttttttttttttttttttttttttttactaattagcctagttcatccaatcctcactgggtggggtaaggaccacttctacatacttaatatttaataattatgttctgctatttttatttatatctatttttataattctgagtaaaggtgatcaataaatgtgatttttctgaagattctggtttctccatgattcttgtgtgacagggaagagggggacattaaaaggaagaaaataatgagggctacgtgcatcttagtttcatttggggtttgcttggatttttttttggatgagaatgcatggatgaggctgctgatccaagccaggcacggtcctagtccacctgaaggctaaatgaagattggtgcaaattcaaggtcagcctggacgatgtggttatttcaaggccagctaggctacatagcaagacattgtcttaaaaaaaatacacaaagaaagaaaagaaaaaaatctgattcaaacaaagcagccgagtcggtgctgtcgacggggtcaggtaatgaagtacttgtgtttgcagctcttggtcccccgctgaaactacttgtaacgcttctggcctctgtaggcaccaacacccatgcacacacacagatgattacaaataagtcttacagaagaaaacatgaaaaaaatcagtgtctcacacctgtcatcccagcaagtgagaggctgaggcaagaagactcctgtgagtttgaagccaattttgctacaaagctttagtcttaaaacagacaaaataaaacaaaaagtggggtggtagtggtatgcctttaatctcagcagaggcagaggttcgaggcctgacttgtctacagagtgagttcaggacagccaggagctacacatagaaaccttgtctcaaaataacaataaaataataataacaacaaaaccaataaaactaaaccattgtgaatctgggattccagaaagcaaacatacttttccatcatctgtgtgtaggctgatgctaaatttccgctgtgctaatggagcttatctgcacttaatgtggccttgggaaggtacagaaggagagttccagggtcggccttcatagcacctaagttacaaaacaggccacagacctgcggcttggtaagcggtgttcgggttgagctgcagctcacaggtgcttcctcagcctggtgctattgggcagagtacctcgtttattattaattaattaattaattaattttctagagggggactcactatatagccccagatgtcttggaactcaatatgtagactaggctatccctgcctcctgagaccagaaattcaaggcagtgtgtttcttttatagctgtatacaactttttttttttgattaattttggtactgagaacagaatcctatattttaggctacattcacctttttcttttattttttaattttgagataaggtcttactaaattacaaggcagcccttcaactcactccgtagctcaggcagactttaaatttgtgattcttctgctccagtctcctgaatagtagcgctgagacccaggcctgttatactagaccccactcatagtgagtttcttgaggcttagctgtaccacattctctttgctcttctccccacaaatccttgggctgacctcagtcaagaacattgcagcagtgaaaaccgctgatccccaacaccaccctacatatgtgacatccaggggacacaaaatataatttctgcatgtctggcttgtactgcattctcttgggtattgatgtcactcattgctatctgtaagagcaaggaactcaaaattaaaggtggatgatatcctaatggggtaaccacataatttgaatcaaacatcaggttctaaagaactgaggcatacacagaaggcaggccggaagatataattagatgctaaaatattggaatttccaagtcacgtttatgagttttggcagtgtttcttaacagtcacctgagaaactttaaaaattatctacacacctacgccccacctgttagattatgattcaggtcagggctaaatgctaatgcttgtgactctagggaaaggctcactgggtgtttttgacatgcaccactgactgagaacctcaggcggcagcgcaatcagtcagaatccgtgaagggcccagaaaattcaagacctgatgatcatcatgagttctctgcatgaacagccagttttctgagtggagtttgagcatacggagtctcctggggtttctgtgaatccctgagcttctatcccatgacctagcactttttcccccacacagtgcagctgtgtttcagtatgggttttgcaatcaggtggcctgaactagatagaaccctggcttttaacattagctatgtggcttggaaaagagcattagcctcggtgcgtcctgcccatgtttcctccaccataaagagagagaggctgcgagaaagctctcagggtttaatagaatcccttcctgtctcccaccccagaattgtacgagtgtttgtgggagcagagatttcctgggaaagaaaggacatgattagaatttagggacccagccctggctgagctgctagtcagcttcatttcttccctaggggccaaggaagatcttgttcaaacttgagtagctccagcagcatcaggactcccagacactgcaaacaggaagtaagagccccactggccggttgagcaatgaggctgctaacagtctgcagattctttctcagagccacctctaccctcagctgtctcaccctgaagctctaactacctccccaacaactgttttagggctctcgatcctgatttaatcctttccctcattctgcgaagaacgtacggaactatttgtagccctattttacagtattaaaagcagaggcacagagaccctgccgatcctgcggggagcaaatataactgcaagtgcagagtcaggctcgaactcccggcaggcagctggctccagagtctgtgagccaaatgtaaggagagcacacccagtcaccggctaaaagaacaacttcaccctgataaagcaacctcagccatttttgccgaaatctagtttcaccgaggtggtttccgttttcaccagaatccttccttttgaaatcttccgtggccaattcaatgatcagaactcaacttgatttccatacagccgtgtctttcccaagccagcaccctacagcagccacacccctgcacactcattcccattgagtgcactttccttcctagcaggaaacatctgagctctcccttcaacagacatggcgtgaagctgctgaggagtgtttgagtgactagctctgctgagatgcagttcacaccctctacaattcatccatttaaagcacacaacttggtggttcttagcatatttacagagttgggcaacataacaaccaatttagtgcattttcatcacttcacagagaaaacccgaaccaatgagtcaactgctttcttttcccttcctaggtccacagccctaggtagcctcttacctactttctgtccctgtgggtttgccaatcccggccacttcacagaactatagaaaacacagccttgcctctttctgtgagcaccatgctatcaagtttcacccatcctgtagcatgtgtcagtgttgcttagttttaaacaacgaattggaagagaagatggtttagggtcctttgtgatcttgcagtcacactgagatccagcagatatctctttcctcccttcttccctccctccttccttcttttcttctcttctcctccttccttcttctccaccaggttccgttcctttttgagacatagtctggctatgtggttgaggctgactaggaactcacattgtagcttaggtcggctttcaattcgggatccttctgctcctgcctcccaagtactgggtctttcattcatatatatatatatacttttattgtacacatgtgaaatacatgtgtgaatcttttgcctacatgcatgtaagtgttcctaacatgtgcatgatgtatccatggagcctggaagagagtgtcagctctgaaacggaaacagatggctgtgagctgtttggaaaccaaacctgggtcccttgcaaaagtgtctcctaagtgggggctacctacctttccagtgtattctcttcctcctgcccctcctcctccttgcacatgcatgcttgtgcttgtcacagaattcatggggagtcataagacaactcatgacagtcagttctcttctctcccaatgtggataccagggactgaactcaagtcttggcaagaaggccctttacccactgagccattctgctggcttttaatttttattaactcagagttcctattcggttgtaaaaagaactatacaagtaaaataatctcatagtagtcagtcattgttagcatctctggcttgggaggggggttccttttcatttaaccatctctacttgattttgaatatttggctccccaaagccaggtattaaactatcctttcttgtttctaacctaaactttctctaaagacatcttactcatgctcaggctaaaatcaccaccaacagatgactcacagtccttgccagacttccaaaaggcagtccctcgttttctgttgtctacttggcaccctggttgatcggcatacagagccacctcaaatccagcttttgttgttttcagttccaatggagacttcttccattggtctctggcacaacagtccacataaagaagaaaataaagccacacaattatgcaagccagaaatcttgccgtcagctctcttctcctatctcctaatcttatctattacaaaatcctagggattggcccaatagctcttgaagtcttccattcctttgttttgaacagggtcttatgtagtctaggctagtcctgaattcactgtacagctgaacagtctcctgtttctgcctcccaagggctggaattacaggcatgtgccaccatgcctggcttctctccatctgcaccccaccattagctgaggccaagctgctctcagtcagctctagtctgctggatggcacagcctcccatgctcttccctccactgctcactaaaacagcagaagaacctgaatgtgaattctcctaatgactgcttttgctcttcccagctccctacttctgactcagtacctgcccttcttcctaaccccctctttcttcctccactgctgtcttagtatcaacccccagctaccatggttcttgcgttcgatgcttcctctttctgggacattcttcgtgatattccgaggtttctattcatacttccaagattattagttttcctctccccctttttgggggggggggcagagttcaagacagggtttctctgtgtagccctggctattctggaactaaatctgtagaccaggctagcctcaaactcacagagatccacctgcctctgtttcttgagtgctgggattaaaggtgtgcaccaccactatcctacatccaagattaatttttctaggctacttgtacctacacaaaaccctctttcattgtgtccatagttttactgagccatgtccccctctctaatgcactagtcactgttttaatgttttagttgctatatcatcagctgattaatgtgtgtgcttttctcccatcaaattatacttcatgaggtcaagtacactgaatatggcagacagctaatatctattgaataaatgcattctgatgtagatgatactttaaaaaataattgtatccattttctacacataattttctatcctttttcttagttattttatcactagctttttcctttagcataagaaatctctctatgccaggcttagtggcacacacttctagttccagtacttggaaggcagaagcaggcagtatatgtgagcttcagggcagcctggtctacatagtgagtctcaagacagccagggctatgtagagagaccttgtctcaaaacacaaaacaaaacgaacaaaaaagaaagatttgtccaagccgcgtacacacagcatagttgattataacactcattcaattccactgatttgtggagatatagcagcctttctgaggcatcctaggtaaagcacgtgacagttctttgtaaatatctatgtatgagacagtatcatttgcatttcaaaggaaatgggcttctttcctttctcaggccatcccctccccgcctttctccttgctttccccctcccccacctttctccttgctttcccccccaccccacctttctccttgctttccccccaccccacctttctcctgctttttttttgtgtgcccttactctgctactctgcttgatgacccggtaagtctaaaataactcagtaactttaatatcttactatccaaggatccatctctcttcttgtgtgtgtgttgctgaaaaaaagttccgacacgatggcacacacacctataacctcagcattcctgaggcaaagccaagaagaaaatcaagagttctaggccatcctggactccaccaagactctagctaaaaccaaaacaacctcttctcaaaactacataaaattctgctaaaaggcgggcatcctcagcccagtaatggtgtgggctgtgcttctttctggtgttaccccgcctctgcctttctacttgctttcctctctcttgtttttgtttgtgtttcttgtgcccttgttctgcttgatgatccgggaaggcttaaaaactcattaactttaaagtcttactaatgcaagtacctctctctctctctctctctctcttttcgtgtgtgtgtgtgtgtgtgtgtgtgtgtgtgtgttgctgaaaaaataaaaagccaggcatgatggtttgggatcttaaagggaactcaaaattttttgattcattgatttctcttttacctactcactcaacatttatggaattggtcaagggctgggcactgctgtatactgggtagagcaatgaacaaccttgctgagctaaaagtcaagcaagagaacagacaaaccaataaatggaagacgttgagcacctcagcatgaggaagacatgcaagatgggcacggagggctgagagaacagattggaggacgtcacctggaatggagcactgagggacaaacacagggaggagaaatggcattctgaactgatggagcattgtgtacaaaggtgaagaagggagcatagaagatccagggactgcagcccagggggctaggacatggtccagcactgcacaggaggtttggttgaagggatgagctattaggatcgtgagggcctagaggactctgctacatgaagggatttatggcagggagtccatctaagagcttgaagcagtctgattgttgggcctagatgagtctatgggcaggcaaaaccagtttggggactatttcaattagcctcaagggaactgctaaggaggtgaatcatccctgtggggtatgaggggaggctggtacagtacagataaaggagatttgtggagatatagcagacttgatactgactcagagtgggaggaggggctctagcttttcgtttagaatccttactttagacaaataaagacattatattattttacaggtgagatatttaggctccactgtaggtggactcctggaagtcatatctaagtaggtggttggtccaagaagagttatgactggtggagttgggaggaccagtctctcaggaaagctgacatggttaatgacctctacctgcccacctaattggagaacttctccaacaccatgatcacaaagccttgctgctacctaagcttgcatagcctatgcttgtctctaaaatatctggggtcatttcagccttgtgactatggctctgactctaggagttcttcaaagcctcctgtcatgagattcactgtcaggaaattagtggatgagattctggtatgtatactgagatcaacagatgttggctctagttgccttgtgatttcctaaaactgagacgttaagagtgtttcagcggatcacatgcacttattagataagcagattctagcaagcaggttgcagaaatgcagctttgaggagaactgtagctagtgtcttctcatcccatcctccaaatccttcctttctgtggtctcccagttgcccaaacttttcacatatcagcaggctcatctatctatctatctatctatctatctatctatctatctatctatctatctatctaccttcattcttctctcatatgttacattccaaccatgtttttccctcctccttttttcctcctagacccccaccctcatcctccaatccatttctcctctgttacccttcagaaaagggcagatctcccagggatatcaaccaaatatgacttatcaagttgcaataagactaggtgcctccctcatattaaggctggacaaggcagtccagtatgaggaaaagggtcccaaaagccagcaaaagagtcagagacagtactggttcccacttttaggagtctcaaaagatgaccaagctacaagaccataacatatatgcaaaggagctagcccagacccatacaggctccctgattgttggttcagtctctgtgggcccctgtgaaactaggttagttgattctgtggcttttcttctgtgtccttgacctctctggctcctgcaatctttccttccctcctctgcaggactccctgagctctgcctaatgcttggctgtggtactctacatatgatcccattagttgctggatgaagtctccctggtttctttgatgacaattctgctaggatctggtcccagcacattctgcaggtaggacaaaatgtaggttgcaggctttgtggctgggttgtgtcccagtctctctgcttgtggtcttgccaggttgcagaagatggctagtttagggtctgtatcccacgttactaggaacctttgctagggttactctcagagattccatggaatccatgtactaggttcccacctgcccccaaatccagtcatttctcccagttattttcttcctctctcccctccatcttgttcctcctgttcccaacttcacatgcccccagtccaccttcaaaatttattctgtttccccttccctgggagatctttgcatcccccctcaatccctccttgttacttagcctctctg

SEQ ID NO: 453 - DNA, 1302 bp, Mus musculus
atgaaagtctggctggcgagcctgttcctctgcgccttggtggtgaaaaactctgaaggtggcagtgtacttggagctcctgatgaatcaaactgtggctgtcagaacggaggtgtatgcgtgtcctacaagtacttctccagaattcgccgatgcagctgcccaaggaaattccagggggagcactgtgagatagatgcatcaaaaacctgctatcatggaaatggtgactcttaccgaggaaaggccaacactgataccaaaggtcggccctgcctggcctggaatgcgcctgctgtccttcagaaaccctacaatgcccacagacctgatgctattagcctaggcctggggaaacacaattactgcaggaaccctgacaaccagaagcgaccctggtgctatgtgcagattggcctaaggcagtttgtccaagaatgcatggtgcatgactgctctcttagcaaaaagccttcttcgtctgtagaccaacaaggcttccagtgtggccagaaggctctaaggccccgctttaagattgttgggggagaattcactgaggtggagaaccagccctggttcgcagccatctaccagaagaacaagggaggaagtcctccctcctttaaatgtggtgggagtctcatcagtccttgctgggtggccagtgccgcacactgcttcattcaactcccaaagaaggaaaactacgttgtctacctgggtcagtcgaaggagagctcctataatcctggagagatgaagtttgaggtggagcagctcatcttgcacgaatactacagggaagacagcctggcctaccataatgatattgccttgctgaagatacgtaccagcacgggccaatgtgcacagccatccaggtccatacagaccatctgcctgcccccaaggtttactgatgctccgtttggttcagactgtgagatcactggctttggaaaagagtctgaaagtgactatctctatccaaagaacctgaaaatgtccgtcgtaaagcttgtttctcatgaacagtgtatgcagccccactactatggctctgaaattaattataaaatgctgtgtgctgcggacccagagtggaaaacagattcctgcaagggcgattctggaggaccgcttatctgtaacatcgaaggccgcccaactctgagtgggattgtgagctggggccgaggatgtgcagagaaaaacaagcccggtgtctacacgagggtctcacacttcctggactggattcaatcccacattggagaagagaaaggtctggccttctga

SEQ ID NO: 454 - protein, 433 aa, Mus musculus
MKVWLASLFLCALVVKNSEGGSVLGAPDESNCGCQNGGVCVSYKYFSRIRRCSCPRKFQGEHCEIDASKTCYHGNGDSYRGKANTDTKGRPCLAWNAPAVLQKPYNAHRPDAISLGLGKHNYCRNPDNQKRPWCYVQIGLRQFVQECMVHDCSLSKKPSSSVDQQGFQCGQKALRPRFKIVGGEFTEVENQPWFAAIYQKNKGGSPPSFKCGGSLISPCWVASAAHCFIQLPKKENYVVYLGQSKESSYNPGEMKFEVEQLILHEYYREDSLAYHNDIALLKIRTSTGQCAQPSRSIQTICLPPRFTDAPFGSDCEITGFGKESESDYLYPKNLKMSVVKLVSHEQCMQPHYYGSEINYKMLCAADPEWKTDSCKGDSGGPLICNIEGRPTLSGIVSWGRGCAEKNKPGVYTRVSHFLDWIQSHIGEEKGLAF

SEQ ID NO: 455 - DNA, 28320 bp, Homo sapiens
tcctcatgactcctcaaggggaacttggagacctggaattttggtcaggagtccctgttcatattcccagaacccaggctctctggggtaacatttgtttatgttgtttaatagttacatcctctccatggccttctgatgtcaagagcaggccacgtcaaacctggcccccatgttcatgtcaaagctggcccctatgggctacagacgtcccaggctttgcttcagcccaggcctcaccccctttgcttacaagtacctgatgaaaatttctttttcttttagctgattctgtcttctgtgaaagcaggtggaaaagacgttctgctgcattccacagaagggaaaacaggcatatggagggaagtgactcagccaggttcatggatggagtcagccaccaagccaggaatggagctctatcctctgactctgaaaccacagccttcaccacggcagtcactcctttcctcaagaggaagcttcagctcatgctcgcagatatggcctttggactcaacaggtgctactggcattgggcagtggggctttctacccccggttcttcccactccaatccaggagactactggccttcaaatatggatttcatggtacagcactttaaaggaactttctaagacttccttttttttttttttttttttttttagacacagttttgctgtttcccaggctgaagtgcagtggcaccatctcagctcactgcaacctctgcctccccgtttcaagtgattctcatgtctcagcctcccaagtagctgggaatacagccacctgccaccacggccggctaattttttgtatttttagtagagatggggtttcaccatgttggtcaggctggtctcgagctcctgacctcaggtgatctgcctgccttggcctcccacagtgctgggattataggcgtgagccaccgtgcctggcctcgaagactttttctaaagcaaagcacatgactttccaagtttggaaaatcaaaagcccctaaagataggaaagatgacagctgtacaagtcctcatgccttccgttgcactctcacttcctctctcggagtcctctcatttcaattcccaattccattactgcaccaagattctggggttcatgctccccacagcccaagcacagacaaatttcaaatcactgtcttttgcttcctatatttcaactgagattgatggagattttcagttttactaaacttaagcacacccttgctcaagaacctgcagtacctttctggagtctatggaatcaagtgcacacttctagctgcagtaagatcttttataatctgacctcactctagttgaacgtagctctcatgcaatgtaaaccttccctaatcaagccagacttctcactgcttgtgcatacatctacacacacacacacacagagagagagagacttaaatacatacaggtttattctccacaacacgtaaaaatgtttattcctagctcctgtctctttccaggggtcttacctggaattcttgtttcctgccctctgccaatcccaacctcacccatcttttaagatttgttcatgggtgagcgcggtggctcacacctgtaatcccagcactttgggaggctgaggtgggtggattacttgaggtcaggagtttgagaccagcctggccaacatggtgaatcccgtctctactaaaaatacaaaaagtggctggatgtggtggtgtaagcctgtaattctagctactcaggaggctgaggcaggagaaatgcttgaacctggagatggaggctgaggcagtgttgaacctggagatggaggctgcagtgagctgagatcatgctactgcactccagcctgggtgacagagcaagactctgtctcaaaaaaaaaaaaaaaaaaagatttgttcaggaagccaggcatggtggttcatgcctgtaatcccagcactttgagaggccaaggtgggcagattgcttgagctcaggagttcaagaccagcttgggcaacatggtgaaaccccttgttctctaccaaaaatagaaaaactagccaggtgtggtggcgggtgcctgtagtcccagctactcaagaggctaagcaggagaattgcttgatcctgggaggcagaggttgcaatgagccaagacagcgccattgcacaccaacctgggtgacagtgtgagaccctgttcccctccccgcccaaaaaaaagattagtccgggaaatctctaactttagtgtctccagtctctgaacttctgctgcgtttgtggctgataggctgcttaatgattaacaacttttacaaaaatcttggtaaaaattacataatatttaccatctttataattttttatgtgtgcagttcagtagtgtttagtacatttcgcttgttgtgcaaccaatctccagaacctttttttttcaagacggggtctcactctgcctcccaaagtgctgggattacaggcatgagccaccgcgtctggtccagaacttttacattttgtaaaactgaagctgtatacccacccattgaacaataactcatcatttcccccttcctcagcctctggcaaccaccattctactttctgtttgtatgaatttgactattatataaaatataagtagatttaagtggaattatacagtatttgcctttttgtgaccagcttatttcacttactatgctgtcttcagggtttattgaagttttagcatgtgatgggatttcgttcctttttaagactaatattccatgtgtagatatgctgcattttgtttatccatttatctgcgtggacatttgggttgcttccccctcttggctattgtgaacagtgctgctatgaacaaaggtatgcaaatctctcatcaagaccctgcttttacttctatatctagaagtggagttgctggatcatctggtagttctgattttttgaggaactgccatatatcagctgcacaattttacaatcccaccaacagtgcacaaggattccactctctccacatgatcaccaacacttgttattttctgtttatttttttctttatagttgccatcctgtttaaagactttttcattgtttcatgtaaattcattttgtcttcctaacagatttcatgtgtcttcagggcaggaatcttgccctgttctcctgtgtaccctcagtgcctagcaccgcatgaggcatgtccttaggtgtctgaaggtcctttttggttgattggatgaaatgaacagtttgagttgagcttagtccttttgagaacttagggtagaattccctttacaaacagaacaagctgactgctatgatacagactgaatgaatcttcaggacactgctgcactgtggagcaaagtctgcatggggacagtgtcactgtcgcttcctctttgactgaagatgcaatattgtggtcatcacacaagctgctgggtctactctccctgcaaagcataatgctctggaaacccaattctatgcaggtagaatcagaagaccttagaaataaaaacaaaaccaaaaactgaccttgagaagctcagaggagggccagtacgggaactgagaggaaacatcacagatagacaggtactagtaggtacagctattctcaactctgctttgttctaaccgctacttaatttcccttcattttcctgaggtcttggggagccaattttttattcactgctatgactttgagggttcctctgggtctccaagctcttttttttttttttttttggagacagagtctcactatgtcacccaggctagagtgcagtggcatgctcttggctcactgcaacctctgcctcccgggttcaagcaattcttgtgcctcagcctcctgagtagctgggaccacagacgcatgctaccatgtccagctgattttttttttttttaaattttagtagagacagggtttcaccatgttgcccaggcggtcttgaactcctgagctcatgcaatccacctgccttggcctcccaaagtgctaggattacagttgagccactgcacctggcctccaagctcttttagtctatatggaaaagtccctccacttagccatttgtttggcatttaaaaaataaaactatcactaggaatctaaaaaaagaacaagtacaaaagtgctgaagcaattaactttctgagaacagattctctagaaaagtcgcctcgaggtggtttggttggcacaaggctctcaggtatacatccctttccttgattcatccctgtctggggaatgctgcccaaagacctgccttgtagtcccgggccatccccacctctgtgttctcctccggcccccatctcaaaggatggggttgaagtagaagccccagtagatagatagtttgtagtttagttgggtgaaaaaaataaaacaacactccctagatatatgatgcattggctgacattttccccacttgtttggtgatgagaatcctctgggtcacctattaaggttccttcagattccctcctatcagattccttcacttgaggccaggagttcaagaccagcctggacaacatagagagacctcatctctacaaaaattaaaaaaataacagggcataatggtgcatacctgtggtcccagctactagggaggctgaggtaggaggactgcttgagccaaggggtttaaggctgcagtaaggtatgattgcatcactgcactctagtctgggtaacagactgacacgctgtctctctttaaaaaaaatcagatttctaggccccgtctaaagaatcagaatttacaaatgggtaacctgaaaatctgtacttcttcaactttcaagccaagtgactcttatcatcagacaagtgtggcaaagataacattactgaatatttattatttcagatacctgggcatctactcaacagggctttttttcgtctttttttttttcccccttcagggaaggataaagagacaatgccatcttagtgatgattatcaacacaggcttgggagcaggaaacctgggtttgatttgccaggtattggctgtgtgatcttggacaagttatttaacctctcagtgcctcagtttctttatccataaagtggggatgatattgcatctccttcactgaggatcaaatgaaataatgcatacagaactgttagtccagtgcctgctaaataaaagccattgtcaataaatagatgctattgttatttccccatagaagaaccctagagtatccccatcatataaatatgggtgaatagttgtggaaaaggaagactggctatgggtggttccaggagtccacacagatatataagcacagccagaaggcccagtgatcacttctctgactagacccagcagacacaactgtggctggctacattagacaaatggaagaacactttaatcagtctggttcaaggtgggcaggcaggaatcaaggcagacatgacttggatggacagctggagctatcctgggatgtcaccatgggttagaagtaggaagattcccagttagaaggacaagcacctccactagcctgattgaatttgatactgcctcagagatagttctccaaacctggagtcaaccaggtctgcatgtgagtcttggtgcttccatttccctggagtttaaccttgtggaaattgcttaagcccagtgaaccttcattttctcatccataaaatggtgacattaatagtaccttccttaaaggtgttaagatgtaaaaagaaaatgaatgtaatgcaaataaaagttggttattattattattatctatctttaacaagggataaattgtaagattgtattgtccccttggagacaacagacttcttttttatttttattttttgagacagagtctcattgcccaggctggagtgcagtggtgtgatcaaggttcatcgccacctcaacctcccaagctcaagcaatcctcccacctcagcctcctgagtagttgggaccacaggtgtgtgccaccacttctggctaatttttaaaaaatatattatagagacgaggtctcactatgttgcccaaactggtctgatactcctgggctcaagccatcctcctgcctcggcctcccaaaatgttgggattacaggtgtgagccactgcatctggcactcttccttttctttagtccctgccacattccccaccatcactgtctccagagtaaacaaagaacgcccatgtagattacccacatactgttcctcccattcactctgcacacacacctgcctccagggatccctgctccctcttcccacagatattcatacatttagtcctctagcagccttctcaaaggagactgtcccctctgcaggacgtggctgcctccaaaccctcctcagaggctcagcaaaccagagaaaagaagcaccttctgcaggagggtgggcaagatagattgaggatggggatggatggtgatcgggaaaagggaggagctgaggattcagaataagaaaggagagggtggaaatgtgtcatgaagttcctcaaaatctgtgaatcctgaatctcatcatttttagtgaatgaactcagatgattcacttcccttcattagcctctattttcctctctgtgtaatggaaggggaagtgcttgctttgaagacagagatgcatatagaatccagcacatagaatccagcttgggagagccatgagcatgtggaattagacatcatatgggttatgaatattatgttagttttcttctgaataggattttttcagtatttcagcttctggctgaacatatatccctaaatattattgattttttggcagtcttcagcaagcccaccatttgctggttagtcatcccagtcctttgttcctgggcatgcccctttgcttctagttaagcatctattgccacccaacatggtaaccagaactctgagcagaagttttaggaccagggcctaactttggttcctggtgaggggctcagaatccagaaggtctggtaagccatgaccaacactactttttttttttttttaatggagtctcgctttgtcacccaggctggagtgcagtggcccgatctcggctcactgcaccctctgcctcccgggttcaagcgagtcttctgcctcagcctcctgaggagctgggattacaggcgtgtgacaccacactggctaatgtttgtatttttagtagagacggggtttcaccatgttggccaggccagtctcgaactcctgacctcaagtgatccagccgcctcagcatcccaaagtgctgggattacaggcgtgagccaccacacctggcaaactactttaaagcagtaagttcctgacttaggtaataagtgggtttgggtcagggagggacaaagaaaaatttggccaagactcatgacatacatgcagaagtctgagctgagtggcctgggtaggcctaggaagcaggccagagctggtaaggcagaaaaagagtgaggaaggttaggggggtcatagcctgatgctggagggaccagctttagttcccctttcatggtgctactgacgacagtgtaacctcagggttcagcccctgggctctttgctttccatgagtaaggaagcaagaatgctgcctccctccaccccttccacagcctgctgggggcctgcagctccagcaatccccctatcatgttacatgcccagaagcggctttcagtgcctgccgttgccagctggcttcacccttcacactagacactcaggaagaaggggtccttagactcaaggaagctatgtgaccagcattccgtacctccttcccagaactgttgaagagtccgtctgccccatgtgtaggagggaaagaggcgcttcaggccacacagggacacagacaagagggagagggagtaagcataggcaatgtgggagtgaacagcacatgcagctgtgggtccagctgcctgattgctgggaactgctggccaaggatacagcatccccattggcctggaatcctggaatggactccagcctgacttggtcttctgagtcaatccagccacagtcaaaaaggggaggcaggcactcgatgtaggaattacagtttacacagttcctcttcctatctctagcatccagaactgcgcccagcacacagtaggtccatgataaatatggaatgaatgaatacttttacatgcaagcatgatctcagccaatctgcagagtgaggcacaggctggacaggtggatcacctgaggtcaggggttcaagaccagcctggacaacatggtgaaaccccatctctactaaaaatataaaattagaccggcatggtggcagacacctgtaatcccagctacttgggaggctgaggcaggagaattgcttgaacccagaaggtggagggtgcagagagccaagattgtaccattgcactccagcctgggtgacaagagcgagactccacgtcaaaaaaaaaaaaaaaaaaaaaagagttaagcaacttgcctaagatcattcaactttgatgtagcagactgaaggctaggcactgtggtctttctatagtgccatgctgagcattcttcatatacaacacagaattgcatcctatgactccatgggaacttccttttgggtcagaaaatagtccttaggggctgagtttcctggacttagtctcagggccaggtttggataccctgcccctccctgcgcatctggcatctgccttcccttttatgagaatctcctggaaagggcttctccagcagtctgtgttgccacatctgactcaggagctctgtacccttgagacacagaggcaggggttggtggcttcaccctaggagtcaggaaaagaatgaaatcatacacattcagttccttattctcttaccctcaacagaaatttcagacagcctagaccacagagacagttcttggaattcaggcaaacaactaatttgtattacagcgggtgcaacttaagagctcagagtccatagtccgagcagtctttctggaaggaggtctccaaagtcaggaggagggctcccctgagctggatcatcttagctcactggcccctcccttcacagcgttctgtcttttatggagacagtgaggtatagcgcataggaacaaggatcagaagacgctgggttttagtgctggctttgctgctcatcaactgtgtatcttctctccacttcattttccatatctgcaaaatgggaacaacaataccagtctatatcataaggcagttatgagtttaaagagaaatggtttacattaatgtgccttgaagcacaagacagaaatacaatataaaaaatatggctggggccgggcacggtggctcacgcctgtaatcccagcactttgggaggccgaggtgggcggatcacaaggtcaggagatcgagaccatcctggctaacacggtgaaaccccatctctactaaaaatacaaaaaattagccgggtgtggtggcaggcgcctgtagtcccagctagtcggtaggctgaggcaggagaatggcgtgaacccgggaggcggagcttgcagtgagccgagattgtgccactgcactccagcctgggtgacagaccgagactccgtctcaaaaaaaaaaaaaaaaaatatggctgggcgtggtggctcatgcctgtaatcccagcactttggaaggatgaggtgggaggaccccttgaacccagaagcccagcaaaaccttgtctttaaaaaaaaaaaagaactgtgcacaaagatttcagagagtgctaaagattagcgcatggataaggaagttctgtgaagagttgaagtgctaggtgaagaggtggcacgggggaggagggggcggaaggggagaaagggtgtcacgcttcataacggtctccaaacctctttgtccaggaggaaatgaagtcatctgctctcagcaatcagcatgacagcctccagccaagtaatctggagtcatgagagctgctaggggagcaacatgaatcatgacggcccctgggaatttcctgataactaacctgggagtttcggggtaagtcctcaggctgcagcatctctgtttatgttctggtcacgtttatttacaattaatgggttctcaaatccaaacaaaactgaccacagtcttctagaggaagtagcaaggttggctctgaagcctatagcatctctgactcagtctgtcccctggaaggctggcagctcagcaagcacagaagtctctccagaagacagtgggtcacctgcctcccaaaagctgaaaggctaacttgtactttccccagcaggcagctggcatcctgagccctcggctggggcagagcaaaggagccttcctccttcctaccttcctggcactctccctgccttccttctgtcactctcaggtggacccagacccaaggtccagatttgcaaggcaggaaaatgctgcaggcctaggctgggaaagggcccaaagccgctagtggattgctgggactcagcctcctccttcccactaagagagcgagtcctactgggttcaaaatgaccccaagccctggttcctgacactaggggaaagagatgggggtgacagaatcacagaatccctgctatgttcctccaagtgtgcccagagatgcgtgtgtgtgtgtgtgtgtatacacaaatgtctgcttatcctcaggcaggaagggtggatgcagtcatttacacatggtctgtttttctggaggacaattttatttgataaacaattgtttctatctgaatagaataaacaaggctctatgatgaagtaaaacactaaatacacatgcattaaaaaatgcataattatctttttggaatgggctatacagagatgtgctttttaaaatgttaagagtgtaaaaggacaaacagtgaaaaataaatcttcctcttattttgtcctccagtctcccaattcctctactcagaggtgagaacagaacttccacaccctccagaacctccacagttagaactgtctacatgtttccattgtctttacttttattcttgcctgcacaaataaatgaattgctcattatggaaacttcccaaaagacccgttaacacttcaataggaagcaccaacagtttatgccctaggactttgttcccacaatcctgtaacatcatatcacgacacctaacccaatccttatcaagccctgtcaaaaacggactttaaaccaagctgcaaattttcagtaatctggccttgcctttccccctctgatagcaccatcaaacaaacccccttactgccgaaagcaataagcccggctttgttccatccactggttgtgttggtgatatctggggactgccactgaacagacgcacagagggagcccctacaggcaggggtttttctgtctgtgcttctgggagagtatgtctcgtacatttgtcgcgttgatgaagacttcacagctccatcagctgcgggcaagggggtctgaggcagtcttaggcaagttggggcccagcggggagaagttgcagaagaactgattagaggaccccaggaggcttcagagctgggcgaggtagagagtctcctgtgcgccttctctcctctctgcaattcggggactccttgcactggggcaggcccccggccaggtgcatgggaggaagcacggagaatttacaagcctctcgattcctcagtccagacgctgttgggtcccctccgctggagatcgcgcttcccccaaatctttgtgagcgttgcggaagcacgcggggtccgggtcgctgagcgctgcaagacaggggagggagccgggcgggagagggaggggcggcgccggggcgggccctgatatagagcaggcgccgcgggtcgcagcacagtgcggagaccgcagccccggagcccgggccagggtccacctgtccccgcagcgccggctcgcgccctcctgccgcagccaccggtgagtgccgcggtcctgagatccccgggccggatgcgcggcggccccagctcccgagcgtctgcctcccccgccctgggctgcccgggctccctgggctccccggcggctgcacggagtcaaggcgccccgtcccgggcgtcccccgcgggtgccgatccaggctgcccggagtccggagcccagagaggagagagacagctggggagcctggtcaccgcgggcatctcccctgcgctgcagtcgcccgcctggcctgccttcccgttcctccgcctcttgccctgacttctccttcctttgcagagccgccgtctagcgccccgacctcgccaccatgagagccctgctggcgcgcctgcttctctgcgtcctggtcgtgagcgactccaaagtgagtgcgctcttgctttgactgatgctgcccaaggacctctgatcagcaccaggggagaggaggggctgctcagggagctggggtcctccggattccatccacagcagggccagactctccccaggaaatgggacagggtggcagcggaggcttgagaaccacgggggttggcactggctggcaagggaggaagaggccgccgggactgccccagcctgcgggcatctggtagatgaagcttgcttgggtcaatccatttctcctggctggaaacccatggtcttccatttgagaactagatacgaacagggtgaggcgagagggagagggaagagtgggttttgggattggggccagtttaccctcaccctggagtccctggagcatgggacctttgatgaagcctcctcccgaatctcttccagggcagcaatgaacttcatcaagttccatgtgagtatccacccctacaacagttggctgcacagacaagttgggaaggcttcaggggacatcccctccctgccctctgctgcagggctgcgccaccccttaccacttccactccccctcgcttaccccacctttgttctctccagcgaactgtgactgtctaaatggaggaacatgtgtgtccaacaagtacttctccaacattcactggtgcaactgcccaaagaaattcggagggcagcactgtgaaataggtatggggatctccactgcaactgggagagaaatttggggacagggagggatgggtgggaggcaagagcaggcaggagttaggagctggaggtagggtgggtgacatcttcatccctatgtgacaagcataaacacacacacacgctcacgaaacagtggccacacaaatgtgaggtggggttggaaggagaccctgtccagtcttctggcaggtctgaaacgacatctttaaaatgtccgttggcagccgggcatggtggctcacgcttgtaatcccagcattttgagaggtcaagtttgagtggatcatttgaggtcaggagttcaagaccagcctggacaacatggtgtaaccctgcctctactaaaaatgcaaaaatcagcctggcatggtggtggatgcctgtagtcccagctacttgggaggctgaggcaggagaattgcttgaacctgggaggcagagatctcagtgagctgagatcacaccactgcactccaactgggcgacagagcaagactccatctcaaaaaaaaaaaataaaagttagttggaatgttcttctctttctcatattctctcatcctcctgtccccttgtagataagtcaaaaacctgctatgaggggaatggtcacttttaccgaggaaaggccagcactgacaccatgggccggccctgcctgccctggaactctgccactgtccttcagcaaacgtaccatgcccacagatctgatgctcttcagctgggcctggggaaacataattactgcaggtgaggtgggggcaacaaggaccaaaagccctccctacagcttcccagaaaccttgttaccatccccttctcccagagggctggccatagcacaagagaagtgcggcctctggttgagtcttccctgaggggaggaggcagggaaggccctctgggttggaatgacatcccctatctttctgtgttgccaggaacccagacaaccggaggcgaccctggtgctatgtgcaggtgggcctaaagccgcttgtccaagagtgcatggtgcatgactgcgcagatggtgagcatcactgacctgctgatgacagtggggtggaaggggacaaacttacatgtccccttattccatcacaggaggactgaggaggtggggggtgcccgagagggatgctttctcctacctgcctccctaagacatccctctgtttgtcctccaggaaaaaagccctcctctcctccagaagaattaaaatttcagtgtggccaaaagactctgaggccccgctttaagattattgggggagaattcaccaccatcgagaaccagccctggtttgcggccatctacaggaggcaccgggggggctctgtcacctacgtgtgtggaggcagcctcatcagcccttgctgggtgatcagcgccacacactgcttcatgtacggccctgggtttctcctcttcgactcttctgccccaccccaagcacatccctttctccttcccagcaaagtgttccgcctcatttctccctcatctgcccctgtccatgcagcccatggccttggggacaagtcgtgctttgaggcctctagggagggaaggaagaagtggcagatttcatgggactaagctgtttgatgggtatcttcttccacagtgattacccaaagaaggaggactacatcgtctacctgggtcgctcaaggcttaactccaacacgcaaggggagatgaagtttgaggtggaaaacctcatcctacacaaggactacagcgctgacacgcttgctcaccacaacgacattggtgagggggaaccccgcgactactgtggccataatggcttggggagagtgggacccagggagagactggagctgaggttgaagctgcccggtggggcaggggtggggcgagggaccttgaagcctcgatatacatgacaaagggagtggcagggaagagttccatgaagtctgaggggcctggtgctcctctggagagaccctgaatttccccaacaagtagcctcttgcgagtggaaacagccctgtgggtatatggcttgggctgggaaggccctgtttatatgaattagaaaaagacacaccttcctttgtgggatgcagcctctgtctgtgctaggatatagaacttggagaatggagccttgggatggattccagcctaactacctcagctgggagtttttgcagaaacgacctgtacagctgtatgcagtggctctggccatccaagcctttttcaacacctggaacaaagcccttggggcatggggcaggggaggtttccaggtgataagcgaccagcagacctccctggatgactgacctagggataggcatagctacttcctcggcacttggaggggacagatggggaccgcctaaccagtagtgatctttctcctctgaccctctgtcctcccccagccttgctgaagatccgttccaaggagggcaggtgtgcgcagccatcccggactatacagaccatctgcctgccctcgatgtataacgatccccagtttggcacaagctgtgagatcactggctttggaaaagagaattctagtaagtgacaattgcgactgacttagaaggtcctgaggagtgttttgacctgaaaatgagcccagtgtgatcaagggaagactgcagagttagaggtgggagcactgaggcggtggcagatgggtccagggatggatgaagagtgttgtttagggagcgatgggctgcaaaggtaaatagatggtaggggctataggtggagtaaaggctcagatttgcatggaagagaataagggccttccctggtagagatactttatggttcccctctctggcagactcccagtggacagataaatcttgatgcaaacgcctccctgttttctccacctagccgactatctctatccggagcagctgaaaatgactgttgtgaagctgatttcccaccgggagtgtcagcagccccactactacggctctgaagtcaccaccaaaatgctgtgtgctgctgacccacagtggaaaacagattcctgccaggtgagtgttccaagcatctctctccacctcttccatatctccccagagctcctgggcttgttccagccagcttaagggtgtctctctctagccaaagccctaagtagccagaatcaggagctcaggtctttgagggtttaaaccagtccttatgtgtttgccagacattaccaaaaaaatcccagctctgcgctagtcacttcagactgggggcacgagatcctagaaagaggaaacagtaaaagacaatgtaactcagtgcccagggtgtgttgtgaactataaatgatcaggtgttcaggagagggaggtgagtgccaacctgagggtcagggaggggaggctttaaaggaaatgtgacttgataggcatttgaagaggcagagggaagaaaggaaggtgtttcagttgaaagatacaaaactgagaaggaggctggcatattccgggtggggaggagaactagggtctgggagtgtggatggaatagtggcagatgacagggcttttaaagccaagcaggggattttaaacttgatgtggtagaaaatggggctgcgtcaggcacagtggctcatgcctgtaatcccagcactttgggaggccgaggtggatggatcacttgaggccaggagtttgagaccggcctggccaacatggtgaaaccctgtgtctactaaaaatgcaaaaaaaaattagccaggtgtggtggtgcctgcctgtaatcccagctaatcaggaggctgagacatgggaatcgcttgagcacaggaggcaagtttgcagtgagctgagatcacgtcattgcacgccagcctgggcgacagagcgagattctgtcctccccccgaaaaaaagaaagaaaatgggaagtcgctaaggactttgactgggaaactcttccctctctctggtatggttgggtgatgggatcagaaatcccctcctcacttctctagggctcatcttttgtatctttggcgtcacagggagactcagggggacccctcgtctgttccctccaaggccgcatgactttgactggaattgtgagctggggccgtggatgtgccctgaaggacaagccaggcgtctacacgagagtctcacacttcttaccctggatccgcagtcacaccaaggaagagaatggcctggccctctgagggtccccagggaggaaacgggcaccacccgctttcttgctggttgtcatttttgcagtagagtcatctccatcagctgtaagaagagactgggaagataggctctgcacagatggatttgcctgtgccacccaccagggtgaacgacaatagctttaccctcaggcataggcctgggtgctggctgcccagacccctctggccaggatggaggggtggtcctgactcaacatgttactgaccagcaacttgtctttttctggactgaagcctgcaggagttaaaaagggcagggcatctcctgtgcatgggtgaagggagagccagctcccccgacggtgggcatttgtgaggcccatggttgagaaatgaataatttcccaattaggaagtgtaacagctgaggtctcttgagggagcttagccaatgtgggagcagcggtttggggagcagagacactaacgacttcagggcagggctctgatattccatgaatgtatcaggaaatatatatgtgtgtgtatgtttgcacacttgtgtgtgggctgtgagtgtaagtgtgagtaagagctggtgtctgattgttaagtctaaatatttccttaaactgtgtggactgtgatgccacacagagtggtctttctggagaggttataggtcactcctggggcctcttgggtcccccacgtgacagtgcctgggaatgtattattctgcagcatgacctgtgaccagcactgtctcagtttcactttcacatagatgtccctttcttggccagttatcccttccttttagcctagttcatccaatcctcactgggtggggtgaggaccactccttacactgaatatttatatttcactatttttatttatatttttgtaattttaaataaaagtgatcaataaaatgtgatttttctgatgacaaatctccctggtgcttgtatgggaaggagttggagtacataaaaaggagaaaataacaaaggtggactgcaccctagagtttcttatgggactgcatctctggacttaatggagctttgggaggtagaggttaggagagctgtagggcagggccaccacagcacttaatgtatacaaagtttccccaaaccacaatcccatggctgtgtaagtagtgtacaggcttagtgtcagctcccaattgcctccttaacctgatgcctttgtgcagtgcacatcttgtacagctgtacatggtggtcttctttagggttaactccacaacagtctcttcactctgcccccaacaatccttgagctgacctcaaccaagaagaacacctgtggccaggtgtagtggctcatgcctgtaatcctaacattttgagaggctgaggtgggagaatcgcttgagcccaggagtttgagaccagcctgggaaacttagtgagaccctgtctctgcaaaaaataaaaaaattagccaggtgtggtagcacatgtctgtagtcctagctacttgggaggctgaggcaggaggatcataagccaaggagttcaagtttacagtcagctgattgtgccactgcactccagcctaggtgacagagcaagaccctgtctcaaaaaaaaaaaaaaaagaagaagaagaagaagaagacctgtaagtgaaaattgctggccaggctcagtggctcacgcctgtaatccagcactttgggaagccgaggtgtgtggatcacctgaggtcaggagtttgagaccagcctgaccaacatagtgaaaccccatctctactaaaaatacaaaaaaattagccgggtgtgggggtgggtgcctgtaatcccagctactcgggaggctgaggcaggagaatcatttgaacccgggaggcagaggttgcagtgagccgagatcgcaccactgcactccagcctgggcgacagagggaagacttcgcctcaaataaataaaaaaataaagaaagaaagaaaattgcttatccagaatgccagcttgactctgtggcattcaggaaacaaaaaacataatttcccatcatctgtgtgtgggactgatgctggaattttctcagtgtgttaacagagcttgtgaccagccattgctatgcctatgattagggggcccagaatctcaaagctggatgatgtcctaatgggggtgactatatattttgaacaaaacatcaagttctgaaaagctggggtgtagaaggcaggttgggagataattgggtatcaaaaattagaattgccaagctgtgttaatgggttggggcagtgtttcttaatcgagtcatctgaggaccttttaaaatatgcacacctacactccacctgtagagattgtgattcaggtcagggctggctccaggtctcgtggttttagaaaagctccctcagtgttactaacatgcaccactgattgacagcctttggggacaattggtcagaatatatgaagtgcccagaaaaattcaagatatggtcagcatgagttctctgcatgaacagccagttttctgagtggggtttggtggcacaaggtctcctggatttcctggttaaaggctttctggaccgtgcttccctagagggcaagaactccaagtatttggctttttcttttttttgaggcagggtctcactctgtcacccaggctggagtgcagtggcgcaatcttagctcactgcagcttctgcctcccaggttcaagcgattctcctgcctcagcctcccaagtagctgggattacaagcatgcactaccactacccggctcatttttgtgtttttggtagagatggggtttcaccctgttggccaggctggtctcgaactcccgacctcaggtgatctgcctcccttggtctcccaaagtactgggattagtattcggcttttgatccccatcatctagtgtgctgttttacacaggttgatgcagtggtttagagcatggattttcgagtccggtggcctgaactagaatctaacaccagctgtgtgacttgagaaaggttattagcctctctgcacctcagtttcctcatctgtacaaaagagatgatacaatctacctccctgggttgttataaggattcatgaaggccagacacagtggctcagcctgtaatcccagtgcttcgggaggccaaggtgggcggatcacctgaggccaggaattcgagaccagcctgaccaacaaggtgaaaccctgtctccactaaaaaaaaaaaaatacaaaaattagccaggcgtggtggcatatgcctgtaatcccagctactcgggagtctgaggcacgagaattgcttgaaactgggaggtggaatttgcagtgagccgagatcacaccactgcactctatcctgggcaacagagagcaagacttcgtctcaacaacaacaacaacaacagaaaggattcatgagttcataagtcctttagcataatactggcacctaataaaagcataaaaacggtggttattattacaaagctaagtaaattattgtagcatcagatcagatgggaaccctctgccctctcccacctcagaactgcactattttgcgggagtggaaacctgctaggaagctgcccaagccgagtggctgttcagtttctgccttcccctcaggggccaagaaagatcttgttcaaacttgagcagctccagcatcagggctcagagacactgaaaacaggaagtatgagccctactggcagggttaagccaggaggctgttaacaattttcaggccatttcccagccaacaccctgacccccagccagctgctgtctctttgcctaatattagatctcaccccaggctagcaggcatcagccgcttctccagcaaccagtttcacagttccagattctcactccagagactgcctcctattagtgcctccatgatcaagcactgtgctttttctgtttttgcttttgttttttttgttttttttttttttgagatggagtatcgctctgtcgcccaggctggagtgcagtggtgtgatctcggctcactgcaacctccgcctcccaggttcaagcgattctcctgcctcagcctcccgagtagctgggattacaggcgcccaccaccacgcccggctactttttgtattgtttttagtagagatggggtttcaccatgttggccaggatggtcttgatttcctgacttcgtgatccgcctgcctcggcctcccagaatgttgggattacaggcgtgagccaccgtgcccggcctttttttttttgtttgagatggagtcttgctctgtcccccagtttggagtgtagtggctcaatctcagctcactgtgcaacctttgcctcccgggttcaagcagttctcctgcctcagcctcccgagtagctgagattacaggcgcccgccactacgcctggctaattttttgtactttcaatagagatggggtttcaccatgttggccgggttggtctcaaactcctaacctcaagtgatcaacccgcctcagcctcccaaagtgctgggattacaagcatgagccaccatgccagaccaacactgtgctaaattattcatgtgttgtctgagttaatcctcccaagaatcctatgaggaaggtagtatcactagccccatttaacagtagagaaaatggaggcacagacagattgagtgacttgcacgaggcaatgcagctccaaatgcaaagagtcagggttcgaacccaggcagccatctccagagtcctcatgcgcggtactaggatttatcacctctcaggagagtccaactagggcaaaaggagagcagcccccctttcaagctttctactttatggttgctgggtttctaggcaacagctatcagaattttttttttttttttgagacggagtctcactctgttgccaggctggagtgcagtggcgtaatcctggctcactgcaacctccgcctcccgggttcaagtgatcctcctgcctcagcctcctgagtagctgagattacaggcacatgccaccacgcccggctaatttttgtatttttagtagagacggggtttcaccatgttggccaggatggtctcggtctcttgaccttgtgatccacccgctttgggctcccaaagtgctgggattacagttgtaagccacccgcccagcccagaatttttttttttttttccatacacagtcttgctctgtcgcccaggttggagtgcagtggcccatctcggctcactgcaacctctgcttcccaggttcaagctattatcctgcctcagcctcctgagtagctgggattacaggcgtgcaccaccacacccggctaatttttgtatttttagtagagacgggggtttcaccatgttggccaggctggtctcaaactcctgacctcgtggttcacccacctcggcctcccaaagtgctgggattacaggcgtgagccactgcgcccagcctcatctatcagaattttaatcctctcctagataacaattctttcctcctagaagattcccaggccagatgaggagaccacactcagccattggtttcaaagtaaaacttcactgttctcacagtaacctcagcctttctgctgcaatctggtttcattgaagtggtttccgttttcaccagaacccctctttctgaagtattctcagcccattatattaacagcactcagcctgctttccacgtatgccctatctttcccaagctgaccacagcagcacccctgcctatacccctccatactcactcccattgggtccaccttccttccaagaaggaaacatttaagccctccctttgaattagatgaagtaagaggagttgctgaggtgttttttgaaaatcaattctgggctaggtgcaatggctcacacctgtaatcctaatactgtgggaggcctagacgggaggattgcttgagcccaggagctcgaggctgcagtgagctatgattgcactactgcactccagcctgggtgacagagcaagaccctgtctctaaagaaaaaaaatcagttttattgagatataattcatatatcatacaacttacccatttattctttctcttttctagagacagggtcttgctctgtcacccaggctgatctcaaactcctaggccagagtgatcctcccacctcagcctcctgagtggctggaattacaggctcataccaccacgtctggcaccatttgaagtgtacaatgcaatggtttttagtagattcacagaattgtgagacatcacaatcaattttagaacacttcatcacctcacaaagaaatcctgtacccactcacaatcactccttttttctccccaaccccctcagccctaggcaatcactaatttactactttctgtcctctctgtgggtttgccaattctgggcatttcatatcaatagaatcctataatatgtggttctttgtgactggcctctttcactcttaacatgatgttttcaagttttatccatggcatagcatgtgtcagtgaggttgctgagttttaataacaaattgagggaaaagatggtctaggcgaggtgcagtggctcacatctgtaaattccagcactttgggataccaaagtgggaggatcccttgagttcaggagttccagaacagcctgggcaacataaagaggccccatctcaaaaaaaaaaaaaaaaaaaaaaaggatgttctaggtctctttttgaggtttcagtcacattgagattcattcaacaatctttgtcatttctttctttctttctttttttttttgagatggaatctcgctctgtcgcccaggctggagtgcagtggcgcaatctcggcttactgcaatctctgcctcccaggttcaagcaattctctgcctcagcctcccgagtagctgggattacaggtgcctgccaccatgccccactaatttttttctatttttagtagagacgaggtttcaccgtcttggccaggccgatcttaaattcctgacctcatgatccacctgcttcggcctcccaaagtgctgggattacaggcatgagccactgcgcccggccctttgtcatttttttaaagtacccatacacaggacattattttagatacaaatgaggcagtcctagtcctcaaggagctcaccactttgcaaagtgctatactaagtctgcataaaatgcatggaaaaataatgaagaagcaattgattctgcctggtgaagtcaatgacgactttacagaagaggtgatattttatctggacattcaaatacacacagaaatttgccaaactagaagaaaggcattgtaggcgtagggaagttcatggaggcatgaaaaggtgaggtgttctaaggaaatgaggaatagtccattgtggtggagaactctggggggcaatgagtaggtggagatggtggggaaggatctggtgggatccagctggtgatgaccctgctgcaggactgattctcagcagcaggcactggttctgctcaatgactaaacagatgctgtcctgagatcctctctgcgtggcccctgccatcagcctctctccacttcttcatgatccagcaaccacagggttaatgcctgtggcacagcaaaggcctctgagatcctccctcctccagctggctcaggcgaaagtgtcctactggggtatcttgatagttaaatattttgactatcacctcttgccctcaggcactatttttcaaaatccagaaagtgaattaagttctagaagccataaaaaaattggctttttaaactaaacatttttattcaattgtaaaagtagctacaaatgtaaaatactttcatagcattccacagccattgttaacatctctggcttcttgggttcctttgtaatctcaacctcttttactcggtcttaaatgttaggattcctaaagcctgatcttaaacttcctattcccaccctaagctttctcccttaggatcttgttagcacccaggcttaaatgaccaccaataaacagatggcttacaaagctgatctctagccagacctctcttctgcactccagactcttattttctgttgtctacttgacaccccttttggttgtcactcacaggggacctcaaagtcaacctgccccaaactggccgagtcttcatgccccagtgtggagacatctcccatcactttctgtctcagatgatggcaccacatccattcaattatgaaagccagaaacctggggccatcctgatgcttctctcctggtttccttcatcccctccatcaccaaatcctggggatttgactgatatctcttgaagtcgtccatttctctccctccccaccatcaccattagttgagcccagtctaccctacaatagcttcccagtttggtgccactgcactacagcctgggcgacaagagcaaaactcagtctcaggaaaaaaaaaaaaaaaggaccaaaggaccactaaaagaagagcactctttttttcttttttgaagcagggtcttgctctgttgcccaggctggagtgcagtggcacaatcctagttcactgcagccttgacctcctgggtttaaatgatcctcctgcctcagccttccaagtaactggaaccacaggtatgtgccaccacacctggctaatttttttttttaattcttttgtagagacagggtcttaccatgttgcccaggctggctggtctcaaactcctgggctcaagtgatcctcctgccttggccttccagtgtgctgagattataggcataagccaccatggctggcctaagaagggcattcttagcacaggttggtgaggattaggggctagaagagaacccaaaagtttcatttattcactgattcatccttcactcattaatatagcaaacacttattgggagtcggccatgggcctggcattgtgctgtgtattgggtataaagatgagagccccagtctcaaccccagtgagataagggtcaagttggggaagagacacattgcaaatgaatagagtacagggtgaggaagatttacaagatgggcagggatggctaagacagcaaggtggaggaggtgaccttggggagaatcttgaagggcaaatacaggaggaagaaatgcttctctgagcagaggaaacagcacatgcaaacgtgaagaggagggaggaagcccagggcaccggagggactgcaggtggttccagccgctggggtaggggctggcattgaagtgatttgactggagggattggcaagagctggaacctacgggcctagaggactctgcctgacacatgaaggactttgaactttcttgtgatgtggaattgttaaagattttggagcagtgtgaaaaattgatcaaaggaagattcttgggcctgggtgagactaccagcagggaaaaccagtttggagactattgcaatcagcgaggtaggagctgaaaagtgtctgagccagggctatggcaatgggatgtgagcagaggatacaaatatgggagattggtggggatagaatagacttggtgcctggctgggggcgggaagaaaaggagatatcacttggtttagtctcctgccttcgggtagataaggcaacagcataattttacaggtgagaaactgaggctgtaagtgatttatagtaggtagctgaccaagctagagttaccacttgtagaaccttggggatcaatacctcagggcagctagttctgctaattacctccttaactctgtccacccaactggagaacttccctatcaccataatcaccacgcagtgctgatatccaagcctgcatagggtgatgcttgtttctgaaataccccaggcctgttcagccctgtgactgtggttctaacacctggaatttctcctgaacctgctggtcatgtgatgcactggcaatgagttagtggataggtcggtggcatgtataaggaaatcagcagatgctggatctagccgtctgccttctgacttcctaaaaatgtgacttctggtgtttcaacagatcacatgcccttagcacatcaccaagttctggcacgaggttgtggagatggagcagattttgtaaggactccagctggtgggcttcctagcccagtctctccttccctctttttggtggttctccagttgcccttaatttctcattctcttttcatataaagggaagaaaatgactttctccctcacctggctcttcccatcctcaccctactgtctttttagctctctctccagagtattgtacaagctggggttaatgccattggagggaggactctctagctccagcttggtttttccatttaattgtcttggtgaagccagccatggtggtgcatgcctgtaatcccacctacttgggaggctcaggggtgaggattgctagaggccaggagttcaagaccagcctgggcaacatagtgagaccttatttctaaatgaatgaatgaatgaacgaatgtaacaagtgtcagccccttttccttttcttttcttttttgagatggagtcttgctgtgtcacccaggctagagtgcagtggcatgatctcggctcaccgcaacctccgcctcccgggttcaagcgattcttctgcctcagcctcccgagtagctgggactacaggcgcacgccaccacgcccagacaatttttgtatttttagtagagacggggtttcaccatattggccaggctggtctcaaactcctgatctcgtgttctgcccgcctcggcctcccaaagtgctgggattacaggcataagccaccgtgcccggccccccagcctcaaactttctctgatttctcactatacctacacactcctcaccaccacaggctgagagattctgccagggaagctctaagctc

SEQ ID NO: 456 - DNA, 2375 bp, Homo sapiens
agcaatcagcatgacagcctccagccaagtaatctggagtcatgagagctgctaggggagcaacatgaatcatgacggcccctgggaatttcctgataactaacctgggagtttcgggagccgccgtctagcgccccgacctcgccaccatgagagccctgctggcgcgcctgcttctctgcgtcctggtcgtgagcgactccaaaggcagcaatgaacttcatcaagttccatcgaactgtgactgtctaaatggaggaacatgtgtgtccaacaagtacttctccaacattcactggtgcaactgcccaaagaaattcggagggcagcactgtgaaatagataagtcaaaaacctgctatgaggggaatggtcacttttaccgaggaaaggccagcactgacaccatgggccggccctgcctgccctggaactctgccactgtccttcagcaaacgtaccatgcccacagatctgatgctcttcagctgggcctggggaaacataattactgcaggaacccagacaaccggaggcgaccctggtgctatgtgcaggtgggcctaaagccgcttgtccaagagtgcatggtgcatgactgcgcagatggaaaaaagccctcctctcctccagaagaattaaaatttcagtgtggccaaaagactctgaggccccgctttaagattattgggggagaattcaccaccatcgagaaccagccctggtttgcggccatctacaggaggcaccgggggggctctgtcacctacgtgtgtggaggcagcctcatcagcccttgctgggtgatcagcgccacacactgcttcattgattacccaaagaaggaggactacatcgtctacctgggtcgctcaaggcttaactccaacacgcaaggggagatgaagtttgaggtggaaaacctcatcctacacaaggactacagcgctgacacgcttgctcaccacaacgacattgccttgctgaagatccgttccaaggagggcaggtgtgcgcagccatcccggactatacagaccatctgcctgccctcgatgtataacgatccccagtttggcacaagctgtgagatcactggctttggaaaagagaattctaccgactatctctatccggagcagctgaaaatgactgttgtgaagctgatttcccaccgggagtgtcagcagccccactactacggctctgaagtcaccaccaaaatgctgtgtgctgctgacccacagtggaaaacagattcctgccagggagactcagggggacccctcgtctgttccctccaaggccgcatgactttgactggaattgtgagctggggccgtggatgtgccctgaaggacaagccaggcgtctacacgagagtctcacacttcttaccctggatccgcagtcacaccaaggaagagaatggcctggccctctgagggtccccagggaggaaacgggcaccacccgctttcttgctggttgtcatttttgcagtagagtcatctccatcagctgtaagaagagactgggaagataggctctgcacagatggatttgcctgtgccacccaccagggtgaacgacaatagctttaccctcaggcataggcctgggtgctggctgcccagacccctctggccaggatggaggggtggtcctgactcaacatgttactgaccagcaacttgtctttttctggactgaagcctgcaggagttaaaaagggcagggcatctcctgtgcatgggtgaagggagagccagctcccccgacggtgggcatttgtgaggcccatggttgagaaatgaataatttcccaattaggaagtgtaacagctgaggtctcttgagggagcttagccaatgtgggagcagcggtttggggagcagagacactaacgacttcagggcagggctctgatattccatgaatgtatcaggaaatatatatgtgtgtgtatgtttgcacacttgtgtgtgggctgtgagtgtaagtgtgagtaagagctggtgtctgattgttaagtctaaatatttccttaaactgtgtggactgtgatgccacacagagtggtctttctggagaggttataggtcactcctggggcctcttgggtcccccacgtgacagtgcctgggaatgtattattctgcagcatgacctgtgaccagcactgtctcagtttcactttcacatagatgtccctttcttggccagttatcccttccttttagcctagttcatccaatcctcactgggtggggtgaggaccactccttacactgaatatttatatttcactatttttatttatatttttgtaattttaaataaaagtgatcaataaaatgtgatttttctgatg

SEQ ID NO: 457 - protein, 431 aa, Homo sapiens
MRALLARLLLCVLVVSDSKGSNELHQVPSNCDCLNGGTCVSNKYFSNIHWCNCPKKFGGQHCEIDKSKTCYEGNGHFYRGKASTDTMGRPCLPWNSATVLQQTYHAHRSDALQLGLGKHNYCRNPDNRRRPWCYVQVGLKPLVQECMVHDCADGKKPSSPPEELKFQCGQKTLRPRFKIIGGEFTTIENQPWFAAIYRRHRGGSVTYVCGGSLISPCWVISATHCFIDYPKKEDYIVYLGRSRLNSNTQGEMKFEVENLILHKDYSADTLAHHNDIALLKIRSKEGRCAQPSRTIQTICLPSMYNDPQFGTSCEITGFGKENSTDYLYPEQLKMTVVKLISHRECQQPHYYGSEVTTKMLCAADPQWKTDSCQGDSGGPLVCSLQGRMTLTGIVSWGRGCALKDKPGVYTRVSHFLPWIRSHTKEENGLAL

SEQ ID NO: 458 - DNA, 2359 bp, Homo sapiens
gccgcgggtcgcagcacagtgcggagaccgcagccccggagcccgggccagggtccacctgtccccgcagcgccggctcgcgccctcctgccgcagccaccgagccgccgtctagcgccccgacctcgccaccatgagagccctgctggcgcgcctgcttctctgcgtcctggtcgtgagcgactccaaaggcagcaatgaacttcatcaagttccatcgaactgtgactgtctaaatggaggaacatgtgtgtccaacaagtacttctccaacattcactggtgcaactgcccaaagaaattcggagggcagcactgtgaaatagataagtcaaaaacctgctatgaggggaatggtcacttttaccgaggaaaggccagcactgacaccatgggccggccctgcctgccctggaactctgccactgtccttcagcaaacgtaccatgcccacagatctgatgctcttcagctgggcctggggaaacataattactgcaggaacccagacaaccggaggcgaccctggtgctatgtgcaggtgggcctaaagccgcttgtccaagagtgcatggtgcatgactgcgcagatggaaaaaagccctcctctcctccagaagaattaaaatttcagtgtggccaaaagactctgaggccccgctttaagattattgggggagaattcaccaccatcgagaaccagccctggtttgcggccatctacaggaggcaccgggggggctctgtcacctacgtgtgtggaggcagcctcatcagcccttgctgggtgatcagcgccacacactgcttcattgattacccaaagaaggaggactacatcgtctacctgggtcgctcaaggcttaactccaacacgcaaggggagatgaagtttgaggtggaaaacctcatcctacacaaggactacagcgctgacacgcttgctcaccacaacgacattgccttgctgaagatccgttccaaggagggcaggtgtgcgcagccatcccggactatacagaccatctgcctgccctcgatgtataacgatccccagtttggcacaagctgtgagatcactggctttggaaaagagaattctaccgactatctctatccggagcagctgaaaatgactgttgtgaagctgatttcccaccgggagtgtcagcagccccactactacggctctgaagtcaccaccaaaatgctgtgtgctgctgacccacagtggaaaacagattcctgccagggagactcagggggacccctcgtctgttccctccaaggccgcatgactttgactggaattgtgagctggggccgtggatgtgccctgaaggacaagccaggcgtctacacgagagtctcacacttcttaccctggatccgcagtcacaccaaggaagagaatggcctggccctctgagggtccccagggaggaaacgggcaccacccgctttcttgctggttgtcatttttgcagtagagtcatctccatcagctgtaagaagagactgggaagataggctctgcacagatggatttgcctgtgccacccaccagggtgaacgacaatagctttaccctcaggcataggcctgggtgctggctgcccagacccctctggccaggatggaggggtggtcctgactcaacatgttactgaccagcaacttgtctttttctggactgaagcctgcaggagttaaaaagggcagggcatctcctgtgcatgggtgaagggagagccagctcccccgacggtgggcatttgtgaggcccatggttgagaaatgaataatttcccaattaggaagtgtaacagctgaggtctcttgagggagcttagccaatgtgggagcagcggtttggggagcagagacactaacgacttcagggcagggctctgatattccatgaatgtatcaggaaatatatatgtgtgtgtatgtttgcacacttgtgtgtgggctgtgagtgtaagtgtgagtaagagctggtgtctgattgttaagtctaaatatttccttaaactgtgtggactgtgatgccacacagagtggtctttctggagaggttataggtcactcctggggcctcttgggtcccccacgtgacagtgcctgggaatgtattattctgcagcatgacctgtgaccagcactgtctcagtttcactttcacatagatgtccctttcttggccagttatcccttccttttagcctagttcatccaatcctcactgggtggggtgaggaccactccttacactgaatatttatatttcactatttttatttatatttttgtaattttaaataaaagtgatcaataaaatgtgatttttctgatg

SEQ ID NO: 459 - protein, 431 aa, Homo sapiens; identical to SEQ ID NO: 457

SEQ ID NO: 460 - DNA, 75510 bp, Mus musculus
  misc_feature (1)...(75510): n = A,T,C or G
cttttattatttatttatttattttaaagatgtatttattttatgtatatgagtacactgtagctgtacagatgagtgtgagccatcatgtggttgctgggaattgaactcaggacctctgcttgctctggccccactcccttctgccccaaagatttatttattgttatatgtaagtacacagcagctgtcttcagacacaccagaagagggcgtcagatctcactcagatggttgtgagccaccatgtggttgctgaaaattgaatttaggaccttcggaagaacagtcactgctcttaaccactgagccatcgctccagccccctaagtaccttttgtttgtttgtttgtttggttggttttggttttttgagacagggtttctctgtatagccctggctgtcctggaactcactttgtagaccagtctggcctcgaactcagaaatccacctgcctctgcctcccaagtactgggattaaaggcgtgcgccaccaccgcccggtccctaagtaccttttaaaggaaggtggaaaccataaagcaatattgaggtgagttaatgatagggcagacgttcctgtgatggctaatgttatcaatttgatgggattaagcaacactatggatgtggaggcgcacgcctttaatcccagcactcaaggcagaggcaggtggatctctgagtttgagaccagtctgctctacatagtgagttccaggacagccatggctacacagagaaactctgtctcaaaaacaaataaaggagtcaccatggaaacctgtcagtgtgtctagaaaaatttaaatgatgagaaagacctactctgaaatgattttactgttatctcttaggcaggatcttactatgtagccctggctggcctggaactgactatgtagaggagactggcctctagcgtcctgagattaaaggctctggccaccacgcctttaagaatgagtggacactttctttggcacctcagagagatgatttggaatgagtggaagttttaataagtccacttggtcctgggaaggggctgctacctatggtcagtgtgattctgcaggatagctatcctgggatgtctccatggctcctttcatgggacattgtggaaagaaacagcattagagagaaaacagctttttgagacttttaagtctctctttcaactattctcagacgctaagggcaaggaattctaaagagccaaagggacacaccggttacaatgtaactgtaatggactcactctagccccctccacctcccctaacacagctcagggctttttgtttgttttaatagggcctcactatgtagcttagcatggcctgaagctctacatccgcctcagcctctcagtgtgggctttatgggcgtgaccctccacatctgactccagtgtatttgaagactagaggctccaatcccaactattgaacgtcaaactcatgccttggccacgttagcaagtgttctgctgccaagctacacccaacccctatgttggagtttttttcttttgcggtttctggtggacctggcaaatacttgctcctgttttctgttgagctgcaggagagatcagagaaatgtgtcttctataaaaggagtctggccttttgtgtttggcaaaaggtcatagatagaaaaagatgcacaagggaaatagagacgcatcctgtgtctggtcctcttttccacagcccagatgtctgaccgagtaagcctcgggggctgcagcagcggaagcttggcctggactggatttacgtctaagtcggacatggtgcttctagagcaagcagcagcgagttactttcagaacgttgggagaatttgttcagtaagcgtctgtgcctcgctgacagacttttcaaagtggtagttatggggctggtagaatagctcagtggtagaatgcttgcccagaaagtacaaggtcctgggtttggtcctcagcactgaaaaaggaaaatccacgaaaaagatacaacattctcatttgacatcggaagatgcatgcccaggcttttgctttatggtggggtaggggtgaagcactcaaagcaggcagcgaggttttcactgatccggccgattggagttggttatatttgtaagaaaccacacaatcaagtgaaaagcattggtaattattttatacataatatttagctatttgtgggatttttgagacagggtctttctatgaagctttggctgtcctggcgctctcaatgtagaccatactgacctcacatttacagagttctgcctacctctgcctcctgagagccaagcgttggggcaggagcctggaagcaggacctgaagcagactgagaccaaggaagaaagaaacttagccacagactggatcttcccttagtctgctcagcttgctttcttatgcaacccgggatcacctaccctgtgcgtggcaccgcccacagtgggctgagccttccaacatcaatcaatcagttctcaggctagcctacaggctgactgggatgatctggtcatctcagatgactcgagcttgtttcaagttgacaaaaatcacaacaatgatttgtcacagtgctcttaaccactgagatatcacgagatcctgaagcatctttagttccaaaacaaccagcttattaactggtcccttctacttccccacatttcagcccccaagtctataaaagtaagcatgtgcattgaagacaaatgaggaaaagggtggctttaaaaagtttaccaagctctgtctctgtgtctctgtctgattctgtctctccctgtctctctctctctctctctctctctctctctctctgtctttctctctgtgtctcttttttctgtctgcctctctgtttctgtctgtctctgtctttgtctctgtctctctgtctgtctgtctttctctctgtctgtctttttctctctgtctttgtctgtctctctctgtctctgtctgtctctccctcaccctctgtctgtctgtctctccctctctgtctctccctgtctctctccttgtctctctctccctctctctgtctgtctgtctctccctctcccccccatctgtctgtctgtctgtctgtgtctgtctctgtctccccgcctcccttcctcaatgctctacagaaggtgggatttgccgccaccttcaggctaggccaggcctgagggctagaagtgagtcaggcacttcctgtctgagtatattgttaaactcagattttatcccgggaagataagatattcagtgaactgactttaaacaaacctttctgagtagggttaggcttggttagaagcagataagacaagtgtgtttaacacaacacaaaagggctcagatttggtatcgagagctttggcaagtggtgctccgggaacacctgcttcttgcaaatttgagaagggcttcctgccaggtacaggagtcccacagccccctcacgcaagcgttcttgcttgcgtgtgacaattttctaagatttctctgttttgttctgggccccacccctcctttccggttctctgctctgcctaattgtcttaatcagagttgtaaagaaggcaggggaggtggggggcgggccctggcctctgcacttcatctcagagcttcaaggagtctggagcaaggtgtaaagtccgcacaagggagctctgggtgctgttgatggtgagggggagtgagagccatcggagcgctttctcctctccctctctctctactggcatttcagttttgtgtcgtccccccccccccccgtgatttgccatgttccaggctggcagcgggctatgaacaaagagaattgcattctctcatctctctgctagataggctgtgacttggcagaggctgaaatcaaaccatgcacctgctgaacctttctggcgacaagagtcaccgcctcctttccttccacaggaaacgctccatgactacacaggagaacaagccctaattaagtctttccttggatccatcttttctccaaccttttcttgggcttagacttgtagttaagagagatatcaagagacaaaatttttaaatttgaaaaggacaggaagggctagggatgtagctcagttggtagagtgttcccctagcatgtactgtgtacctgagttcattcctcactactggacaaaaaggaaacaaacaaacaaacaaacaaacaactcagacataaagtccaatatagggtcagctggagagcccaatgcgagtgaggaaggaacccctggctgggtgccaaggatggggacagacgaaaactgatggacaaaataagaagcttttgatgaaaaaaaaattgattgcaattacagaacattttctcagatgttttgtttcttgcattttgtcatttttttctcacattcacactcacacactcacacattcacactcacacatgcacacacattcacactcacatgcatgcacacacatgcactcattcactcacacacactcacatatactccctcccacacaatgcacatacattcacacacacatgcacacacactcacactcacacacatgtacagacatacacactcacacatccacattcacacacatgcacacacatgcacacattcacatatactccctctcacacagtgcacatacatacacatgcacacactttcatactcacactttacacacatgcacacacattcacactcatacactttacacacatgcacacacattcacacacattcacactcacatattcacattcatactttcacacacacatgcacatacatgcacacattcactcacacacatttatacaaatacactccctctcacacacacatgcacacattcacaaccacacactttacagacatgcacacactataacactcatacactttacacacatgcacaatccacacacacacattcacagacacatattcacactcacattcacactcacacacatgcacacacacattcactcacatttacacaaatacactccctctcacacacacatgcacacacattcccacacataaagactttggttgagggtgaaacatgaacaactgtcatactttaggattcgaacattgagtgactaggtggccatcttaatttgtgtgaagtgtactttacagtgtttacacaccgatggcctagccttctagagtctcttcagagccactctgtccctggccatgtctgtttacactatgcaaattcctgggctttgtatatttacctggaaagagacttaagagatttgttgtgtatccaggagtttagacctgcttcctcctcccggactgtaagactcaccaacactaaagagctgagaggaacagaggcgagctcgggaagaccaatgaggcggggccttaaaagccagggaagctcccaggcatcccgagggaaggatggacgcccacgcgtggcctccggggtcagatacggctgacctcagcccaagcgtctctgtctctgtgcacttgctgttttgggtgggtgacctgggtcaactgacaccgctaagtttaagcttctcatctgtgaaatgggatcagagtctatctcagtctgcctcacagagttgtggcttggatcaggtgaagttgtcccggtggttctgtgtgtgtctgtatggcttggaaagggaagaccaaatgagccctgggagaggagcctgcagtgtcagactctgctcctggcatacttttgtaattcacataactggcctgaagatggcgcacttgaccctcaagggccacaggtcctgcctctttgcagctaaagggaaaccagatctagggaggactcctggaaatccttgccctaccctgccctctccttccgtgggtggctgagatctgtcttgtggggacagttaggtatttgggcacatcctccctttggccaccacctttagccatctttaatgaacactctgctttgggtttgtgctgtaatccatcccaccttctggtagctgcacgttgcccaggaactcctgagccagacaggctctctttgacacgctggactcttgggctgtccttggctccacagagcgccctctctggtgtaaccgtgttcgttctgtcacagccttcacagtagctgccatagcttacagtggtctcttctacttgattcctgtctcctcactaagttccgagttccggggggttggggggtggggaagcttttctcattgctgtttgtccagcacccaagacacaggatacagagctctcagtaaagccattttaattaacaaataatgattgaatccctgcttagtgactgcctgacctagacgttgcttggtttctccgtgactcaattttctcattagtgagaccgagaaataacagagatgctatgactacttcgataaatggcacatttatttcactaggccctggtgcctggagggatggctccctaaaacctttaatggcatgatatatatatatatttgtgtgtgtgtgtgtgtgtgtgtgtgtgtgtattttttggttttttttgagacaggtttctctgtgtagccctggctgtcccagaactcactctgtagaccaggctggcctcgaactcagaaatctgcctccctctgcctcccaagtgctgggattaaaggcgtgtgccaccaccgcccggctaatattattatcattattattattattatcattattatacaaggaaagtaaagtttgaatctattatccagctgttgtggtttgtatatgctcagcccagggagtggcactattaggtgtggtcctgttggagtaggtgtgtcactgtgcgagtagactttaaggctagctgcctggaagccagtattctgctagcagcctttagatgaagatgtaggcctgcctggatgctgtcatgttcctgccttgatgataatggactgaaccacggaacctgtaagccagccccaattaaacgttgtccttataagagttgccttgggcctgatgtggtggcgcacgcctttaatcccagcacttgggaggcagagacaggcaggtttctgagttcgaggccagcctggtctacagagtgagttccaggacagccagggctacacagagaaaccctgcctccaaaaacaaacaaaaaaagagacagagtttagagcttacagggttctccctatattgacagattgatctcaaagcctccagcatcctgtccagcttcccaagtgtgcctcctgctccccttcagcatcaagtctgtgctgagtacctggctgacctagagttgtgcccttcactaggactggttgggatgactgtcaccgagttgcttccccaccccaccccactgttttttttttttttcctttagatttatattttgtatatgagaacagagtcactgtcttcagacacaccagaagagggcatcagatcccattacagatggctgtgagccactatgtggctgctgggaattgaactctggacctctggaagaggagtcagtgctcttaaccgccgagccatctctccagccttaccagaacatcttctaattataacatttctttctactgctcttttcactactgttttccgtgttggaccgactgtggctactctgcatgttaccactctcaaatcttggccccagactggagatgtttgctctcttcaccctggcaggtgtgtgtgcacatgcacaagccgtgctgtgcacatggaggtctgaggtcagcttgcaagagtgggttttctttttacatcgtgtaggtccaggggtatcagattcggataataaagcttggtgatgagtggtgtcacctgctgagccatttcgctgaacctcaatacatgtataaatagattgaaataaacatacatatatttgcaatcttctagatgcctagcaacctctgaagctatgtggagtgcaaaggcatagaaagaaaaaaacattgttgtgagatgataaccaggcaaggttccttttatagatgatcaaaaataatgatgtgagtgatggctggagagatggctctggggttatgagcactgactgctcttccagaggtcctgagttcaaatacaagcaaccacacggtggctcacaaccacctgtaatgggatctgatgccctcttctggtgtgtgtctgaagacagcgacagtgtaatcacatacttaaatcttatttaaaaaatgatgtgcatgcatgcacatgcgtgtgtgagtgtgtacatgtgcacatttatgtgtgtacttatgtataagtatgcatgtggaggccagagtttgatggcagacaccttcctcaatagctctccactattgttgttgttgttgttgtttcaagacagggtttctctgtgtagccctggctgtcctggaactcactttgagaccaggctggcctcaaactcagaaacccgcctgtctctgcctcccaagtgctgggattaaaggtgtgcgccaccactgcccagctatttttttttttctaatgtgcattggtgttctgcctgcatctatgtctgtgtgctacattcatttcttgcacctgaggagctcagaagagatggaaaaattccctgggactggcattctggatggttatgagcctccatggaggacccggaacccaacccaggtcctctagaacagcaacaatttcccttagctgctgagctgtctctccagcactctctgacagaatctcccaccaagtctgcagctcatcatggattggttgaaactgaggctggctggcaagctccggggactctgccgtctctaccttccccagcattgagatcacaagcttttgcctccagacccagttttcctaggtgctgcggattgaactctgctcctcacacttatatggtaagaactttttagaccgagccatttccccagctccagagacattaaggcccaatcttgtttcttattttgattacagtgtgtactgatgatatgtggagattgaaaaaaaatatttttgtgtgagataaggtctaaccaggaagtctaggcaggcttgaacttgctgctatcctgcctcagcctcccgagggctagatgagcctgcaccaccataagggttgaactttgacatgtactgggtcatgctcctttctgcaattttggcagaggctgagattgattgccacgatccctttcccctcaatggcttggactcacctccactctcaggagacagaagacaaaggcccctttctttctctcaagctacggatggttaacctactctgtttccttttaaactcagatcaagtcgaatgccttactcctcactttccaacctcgcctcagatcggttagttccgctgctgaacaataattcgtcttacagtatgtcttttggacacgttgaaatcaccctcagctcaacccccactgtctgctgtcagtcttagactcggggagacccgagtctcagcctctttgactgcttcctgtctgctgctctctaacgctcttcaatctggccactaactcaagggttaaaagtaattttagaaggctctctcttctcattacttcctcctgccatcttggtttcggagggaaattttctattaatttaaaacccatcttccgaggaataaaatcagaacaggtaaacctgacactttcccaagagtcaggtgcagctgcaaacagaggcagggattttcagttcctagcaagcagtaggaaggacctgggagcccggaggccccctaaggggggaggcggtttctaaggcaaccggcgcggggagggggttggctctctggcgccctcctcccttcttcctggtagcccagggtaccgccggacagcgtcctcccgtgctccgcgcgctgattggctgctcggggcgccctctgattggctgctgcgggcgcctcgcgggctgatggctatgaaggtggcgccggttgatggttgaccgatccttggatccagggtaggggtcgctgcgcgtgcgatcgtctcacactggactacagggcgcggactgctgcagctcaacctggaacctaccggcgagaccaggctccgcccggccatgcccgccgggagcaacgagccggacggcgtcctcagctatcaggtgggccccgcctcccgctcctccccggctcagcctcggtgttctgcccaccgccccgctcctgccccagccggggttccaggcgtgtccccgagggcaggggggaggcccgcacgggacgccagggggcgctccgggtggccggggagggtgaccttgggccgagcccggagccgccggcactgcagcatcccctgcgtcgccggctgcccggtgtcccggagcagtgacctctgtccgcgggtcccggttggcggcccacaccggcttctggccttgcctagttatgctgtaggtggacgagagggaatccagggaccttgcgcgggtctttgtgttttgactctgtttcctcagtgactcagaggaaaccttgcaaagaccgggaggctgggaacagccctgagaatgtagccggctttgtggatccctccgtgctgcccagacagctgacaagttctgggtatggatgcacatgaaccaggggagccgtgaggtgtcaacagcgccgacaccaccagccttacctagaacaacaggggcggctaatgttaggaagcattggactaggtgtgaagggtcagtgggtacaggttccaacctgcttctcataggcttcgcgatctgagtaagctacctgtctcttggaacctcggtttccccatctattaaaatggaaatatgtgtacggtttacttcacaaggctgttttaaggactccgtgaaacacagtttattgtgtgatatccagtgagtagtagctttttgaattctcacaccggctttcttgtgaaacccgatcaggtgtggttactgctgtgccaagagggtttgaaggagggaagggagctgagccggagactagtaccgaagcaggaagggtggcgggtcttggaagcaaatgccatgttgacatcaggagtgggttctgggaggaggcatggagaacttcctgcatgtggtgaatgaagtgggcatgacacaccctgcccctcttcccggcaagtagcctttgcttgccagtcacaaaaatagatctaagatcttggaaaacctttccccatctgatcttatgacatgctatgttatagtcaacctttgtttgggagacagtgagcaaaaataggccatgctcttgcctcttccagctggtagaaaaggagaattagcgtttttgtttgtttggttggttggtttttttgcctttggcggttctggggatggactgccttctacttgctatgcaaaggctctaccactgagccataccctggctagaagtaagaattgtgtgtggatgcctgtgtgtgtgtgtgtgtgtgtgcccgagcactcatgtggtggctggccagagtttgatatctggtattcaccttatttattcatacatgttcttacactgaacatcagctggccatgagcccttgggatcagcctatggtgaggtcctctcacccgccccgaatgctggtatgctttaacacgggtcctgggagtctggattcaggtcttcatgccagaacaaacactctaccttccctgcttcccaaagtcaaccaaacaaaacactgtagtcctagtcctcctgaggcaggaggattgtgtgtttgaggtcagcatagactacatcatgagaccctgttaaaaaaaaaaaaaaaaaaaaaaaaaaaaaaaaaaaaaaaaaaaaacccaccccaaaaccaaacaacaccaaaaactacttaagggaaatgtgtcatcataaactcaggtgcttcggcagtgtcccagacagccctgtgagagggtacgtgactcagaccatgggagaggtttctaatgaagaaaatttgggcaaaggtctgaagagtgaacatcagctgaaggaaaggggaggtcgaagaacttggaaacagaacaggaatttcagacgtcctgtggcagatgtggagcaggttctggaaggacagtgtggtgcagccacaggagccacgggggaatgaatgtaaggtgtgttctgggttagtaacatagggagacaccgtggcccctgctgaagaagctggtgtttacccgaggaccaagagttgtcactggtgagggggcttgagacagaagatggggtcccgatcaggctagggtgtgtgtgaggagatctgtctataacctgcagaatgtgtgctggctgtatcaagtaacacttgggttctgttagtggcctgtagaattgattcctttgtgtctgcacacattgtaagtgtgttctttacagtgggtgatggagtgggctggaaaagggctgtgaggtcaggtaagggaacttgagatttagggagggaggagaataagggctgagaaaggaatggcaagggtttgaagggatagttagccaatgggcggtcaccgtagtgaccacgccctctgtgaccacgcctcctgagcccgcccgagggagggactggaccttgcagagcaggtgagctgtttgagttgttgagagcagaggttcaagacaccacagttgcacatcctgactccatcccggaccttctgacgtaactgtccacagctgccctccatccggcatccagagggggcttagaaacacaatacaacacatcgtgtcttatctcaaaacctgccaatggcctcttgagcaatttagaataaaatccaaactcggccatacttaccaaggtttgacatggccaaggcttcggccagtctccctggagtcctccactctgaccatggcctccagctctgacttcctttgcctttctttggtatgacgtgttccttcacagctcgggatccgtcctctttctaggacactcttctgcctcatgactcacttgtgtctcctgacctccacccctgagtcagagatatccataggattctccttgtgttccttcccagcaaagagtgagtgtgagtgtacttgtcttcatatcctgttgtctccttagctggaagttccaaggggccccggaagagatggtcctttctaactctgcctggtgtccggtcagtgcttggctgctggaaatgaagggctcgtgggccagagacagaagtgcctctcctcatggtctactgagcaggatgttcacgagagaatttgcaggtggtcgctgacccacacgtcctgtaccttggctcaggttagccatgggatctttcctctcctctccactgaggaaattcctttttgaccttctaggctggcttcctgtagcttcaccagaattgaacattcaggctccctgtaggcaccacctgccacgggtccttaggccttcaccccttatggaccactcaggctcctgtctgcatttaccccacactcccctttatttgctggcactgcctgctttctgagctccaggcaccactaggttcacctttccgttcatctcatggtcaccttttcttcttcagttacaatgttgagggttgaacccggcctcactctgtgactgaactactcctagcctcatatcagctcactttttctgtagctccgagaattatacaccattacaattcctacctctcagatgaagaaactgaaatgtggtgagctgaagtgtaaacttctagaagggccgagccatctctctctgaaggctgcgccctcagaagccatgcagagcatccatcccatggctgtaacctcgtgttagagcacctggccctgagtaagccctggaggtgcttggaaaagcttacaaacggatgtatcacatcgagtgagtaaaaggaagaaggcaagaagaccgctttagggaaagccccagctctgggctggaaggtcttacagcctcacaggtctcctggtcagcacttgcagaactgtccaggaggaagtgctggaagagaagcccaggaggttggacaccttaggatctgagtaagggagagctggtgtggaggcagtaggagggagggacctcgctggaccgaccagggagcagggaagcaaaggagcctggcttttgtatgcaccagccttagcacgtgtagcagaaatattctgaaaaccaaaaccaatccctggagctgggcacaatagtagatgactgcaatcccacccctgggaagatagaagcccgaggatgaatagttcaaggtcaagagatgggccaacagggtgagcgcttctgtacaagcctgtccattcgagtttgaaccatgggacccacatgaagactggaaagaagggatagactccacagagttgtcctctgacctccacaggtgtaccacggcaagcacatgcccacatagcatcactccctccgatccctggcccccacagacacgaacccatgcaggcaggagcacatggtggtataatactaagaaaggtggaccagcagttaagaacactagttgctcttacagagcacccagttctcagcacccacatggtgactcataactctatctagggcttctgataccctcttctgaaaccagacacccatgtgtttctctctctctctctctctctctctctctctctctctcacacacacacacacacacacacacacacacacacacaaacacacacacgcatgcacgcaggcaaaacgctctctcacacatagataaatgtacaagataaatgtacaaacaagttcacagttaatcttggctacatagagttcctggccagcctgggctgcgggggtctactgcacaaaggagtgaaaggagaatgtcagaccctggtgtgtgggaggaactgaggagtccagcttgggaagagcctcacacctgtgtcttatggtggacctgaaacaaactcccgggacaagagttctggagttggtttctcgtgttcagtggctttggcacacggtgcgcgcagtacatctttgctgagcaaatgaatggttggctcccctgagagccgaccttgattcctgaaggtccgggccagttgatggtaagcaggtgataagtgtttgctcaactctactgagcaaagactccagttccagatggaagtttgccccctcaccccattgcagtacggtctgtaccccttcgccctccctgcacgtgcgggggcgggggacaagagcctgcgggagtcctccactgctggggagctctgtgggagggcagtgggctgacttgaagagcagagccttggccatagaacaggggcagcggaggctgctcatttactcccttctaagctgcaggtaatcaactcagagctgcttgccttggcagagcagccatagtgttgccaacacaaagagaaacagcctcctcgattcagctgctaggttacagtggccctgaggtaatggagcctttggccatttcccataaggtaggaaggagttcactgctgcgttggtaactgggagtcacagacgcctcctgtcttgttagactaagcactgcctgctcttcgctcttgggcttgtagtttcctccctctgttgttcctgcttcggagtcagaaatcacatctttcaggctctggttttcccctccgatcttcctctccaattttgtttctctgcctcatgcgtctgtggatattttctttttttgaaaaatatttctgtggatgagtgttttccttgcatgtatgtgggtgctccatgtatgtacagttaccacagaggccagaagaaggcattggattccctggaactggagatacaggtggctatgagccaccacatgggtgctgggaactgagcccaagtctttggcaagagcaacgagtgctcctacccaaggaaccgtctctccagcctttataaaaccaaccaccccctaaggaaaggatctttgtatgtaacccaggctggccttgaattggtaatcttgctgcttcaattctcaagtgctggattacaaacacaagctaccacgcctggctctataatgcttttaagtacatgtgattcctttgccgtttatataattttcaacagtcttacttagcggtactcttaacttgcttctgccgggtaaagtcaagaacactgatgtcactgcggcttcgatgtgcatctctccagggaccagtcttctccaagtctctactaaacgggagtgacttcaagtggggctcatgagaagaagcacggagtcactgtgcagtctcgtttcccagcagactggagagtgggagggagcccacggccggccagtgagtgactcctgccacagggcccatgggccacgttttcttgttgttgggcatttgtaggcattgaggaagtaattgaaggcacccaggcctgcccagccttccgaccctgtgacagcgctgtcagagaactgcacagctcttgagttaccaaagggatctcgtctttggcttcgtttattccaagccagagtgagagagaagtagagacctggcttccaagggggctccagggagcaggtgttgtgctgggtgaagaggcagatggagaacctgagggctgctgagcaacagggcgcttgggtgtgtgagagtctgagcacggactgcttgggaggacagtgtgagtctcaggccgttcccaccgcgggcgtgcacccaccatgctcaggtttctggagccccaccgcgggcgtgcacccaccatgctcaggtttctggagccccaccgcgggcgtgcacccaccatgctcaggtttctggagtcccaccgcgatcgtgcacccaccatgctcaggtttctggagtcccaccacgatcgtgcacccaccatgctcaggtttctggagtcccaccgcgggcgtgcacccaccatgctcaggtttctggagtcccaccgcgatcgtgcacccaccacgctcaggtttctggagtcccaccgcggtcgtgcacccaccacgctcaggtttctggagctctcagaaacggccaggttgtttgcattgagcagtgttaatacataattaacactaaagcttgagccttcctgcccctcacctacacagacacagatacatgcacatacagagatacacagcacacatgcatgcacacacactcctaaatatatacttacaacctgcttagtccacatgttacctgtatgtgtgtgctcccagggcgcttggtattggataacgattgggccgggtcttccctggggaagaccagtttttaaggcttataacagtgctttatctctcaacacttataacagtgctttatctctcaacacttataacagtgctttatctctcaacacttataacagtgctttatctctcaacacttataacagttctttatctctcaacacttataacagtgctttatctctcaacacttataacagtgctttatctctcaacacttataacagtgctttatctctcaacacttataacagtgctttatctctcaacacttataacagtgctttatctctcaacacgtgctgtgaagtgccaatgagttaatgaaaaaggctcaatttcatttttatttatgtgtatgtgtgtctttgtgtatgtgtgcacaaacaagtatctgtgtgcgtgtgtgtgtgtgtgtgtgtgtgtgttcgagtgcctgcctgtgaactccagaagagggcgtcaggtcccgtggagctggggtttattggtggtttattggagctgcctggtgtgagtgctgggaaccaagctttggtccttgacaagagcctcgcagccgagctgcctccagccatgcagtttcaatgctttaatgtgaattaacacctcagctctttttatggagtccctgggacctccagttcatgtttagcaggcagcagcattaatgagccactaggaggaagcatgggaaggaggctcactcgtaaggaagagttatctctaattccccactcttctcccttgttcccttcccctgagcttgcttaatgtgctcctcatgactaatctctcctgagccacgagctcctttgagaatctggtaaaagctatggcctgccccccccccacaccacccaatgcacagccatctccgtccatcggtctcctggaaggtcatggactcccaagttggagaatcttgcttcctgtaagtagtgatggctgtagaggcaaatagagccaacttttgtggcccctgctgcaagcatggaccaagagggctgagatttccttttcagcttgataatttcagacaatcttggcatatgcttgaaagttggggaacatttcaaatgtatatcaaaggagagatatttgcataatgaatcatcatgtatcaacgacagtgacacacacaccatcttgtctcttctgtttccctctactcgccatggagctcacaggcgtgcactgctcacaggggtgcactgctcacaggggcgtgcactgctcacaggggcgtgcactgctcacagagatgcacactgctcacaggggtgcatgctagtacagggatgcacgctgctcacagggatgcaccttgctcacagtggtgcacactactcacgctgcttacaggggtgcatgctatgtacaggggtgcacgctgtttgtaggggtgcatgctgtttgtaggggtgcatgctggtacagtttaggaactgtgctgggctttaggagatgctcatggcccatggcagctgtggtggcagctgtggtggcagctgtgatggcagctgtgatggcagctgtggtggcagacacctttaagcccagcagaggcaggcggtttctgaattccaggctggtcagggctacatactgagatcctgtcttaaacaaagcaaggagaaaggagctcatgggcagataggctagataagcaaaacaggtgtgtttggtttgtttttggttttgtttttacttaaaaatggttccttgtcaggtggagagatggcttgctggttaagagcactggctacacttttagaggaccctggctcgattcccagcacccaaaaggctgctcacaactgtctcgtctctggttccaggggatctaatgccctcttctggtctcccccaataccaggcacacgtgcacagacatgtaggcaaaacaccctccacacagttaaaagtacacgtaagaaaaagttcctcaactgtggtgtaactctgtcgcatgtgcaaggccctcggttcaacccccagtacagcacaagggaaaaggagcagagatgattctgtaggagtctccatacagcccagctgcaagcagggctggtgtgcgggtgggaacttcatcaaattgcaacgccgtggggccggccgagggagggctggaggttacctggaggactgcatagatcaaaccaggcgcttccctccctctccttgtcccttcccctccctagggtctttctgtgtagacttcttggccaggtacccactatgtagctcagactggccttgaactcacagctgtctgtctgtgattacagtatgagcttcatctgaaaacacttcagtgcgtctttaaagtgtgttgtagaggcctctgcagcaccaccgggtcacatcaagggcgacaggctctcccgctgcgtgtcctcctcggcagtcaaatttgttctgatttttagagactttgtaataaatagctttattttcacggtacaatgcagaagggacaggaaattcccctgcagtccctccccacccgacagaccagctttcatgccaggctatgtccaagcttctttagggcggggnnnnnnnnnnnnnnnnnnnnnnnnnnnnnnnnnnnnnnnnnnnnnnnnnnnnnnnnnnnnnnnnnnnnnnnnnnnnnnnnnnnnnnnnnnnnnnnnnnnnnnnnnnnnnnnnnnnnnnnnnnnnnnnnnnnnnnnnnnnnnnnntttcctcctcctcctcctcctcctccttctctctctctctctctctctctctctctctctgtctctttctccccccccaccccataacttccctagagctagtgatcctcctgcctcagcttcctgaattccgagatgacagtttgtgtgttcatttagagggacatcttggtggcttttaagtattcagcagtgatgaacctctctctgttcaggattttatgtggatttaggtttcggttttagtggcaaataccaaagagtatattacaaaataagaatctgctttgtgtgaagcgccccccactgtggctgtagatgcttcctttctccagctgcaccgagagatctgttcttttccattctccatccggctggagcacccagtgccctcagagacccacaccaggactaatccccatacactgagaggccagcctgggctacagagcaaattccagaccagcctgagctacagggtgagacttctggaaaaccataaaagaaagaagagttacggtgttcactgttgtggttcatctctgttgttctaactggggatgctgctgagggcggtcggacaatttgtcctgatttcccctctgtgtcacgcatcacctggagctgatccggagcccgtcctcagcctgttcccatgcactgcgttacttagaatagactcttctgaaatcggcacatcaccaatttcacatctgtctctgttttgttttgattttgagaatccttttttacaaaagatttaatttatgtgtatctgtgtgcttgtgtgtgtgcgagtggtggtggctcttgtggggccagtagagagtgctggccccctggagctgggcttaccatggttttaagcgctctaaggtgagtactgggacctgaacttgggtcctttggaagagcaatacactcttaaccactgagccatctcttcgtccctgatctgagagtttaaaaaacaagttcttgtaacttattctttcttttgaaaaattttatttatttttttaactaatattttgcctgcgtgtatgtctgtctgtgcatcatttgcatgcagtgcctgtggaggtcagtagagggcattatggtctctggacctggagttacagatggctgtgagccaccatgtggatgctgggaattgaacttggtgctgcttttaaccaccgagccatctctctacatactttattctaaaccataatcaagtgtttatgttccatctccttttctttgacaaagtatagcaaatcacagggtttgggtttttgttttgttttgtttgttttgttttttgtttttttctttgcccttcaaacttaatactctgtcttgaagatgcttctcattgtggtaataatatgtaattttaaatatttatgaaagtaaattatcaaattaattactctgacatttgacattctatttctctaaaaaaattatttaagttaacctcattaaaaatatcttttcattgtgagaatagattgtctgtcttcagcgttgtgtttgggggcatagcggagcagggtgaagtgagtgagttggaggtctgagccatacctggagggagggtggggggacctgatggcaagcacgggccactcggaggtaaggatgtgcccatatccctgggggactggagcctggccagagccgcacaccagggaaggagagctgtgccgggccattggtgaagcgtgttttgtcttggtgagtctgtgcccagtgaggtgggaaggtgtctgaagttacagtcattgctttaagaaagatgtactaagcacatgtgatacgaacatttctgtgctaggtatagggctgtaatcttttttaaaatatttgttttcttttaattctaaggcagggccttactatgcagaagtggatgacccggaacttgccctgttgaccaggttggcttctgcctcccgagtgctgggattacaaacatgcgataccacacctgggttgtttctttgtgtattgttttttggttttgttttgttttctttttggttttgttttttgtttttttgtttttgagacagggtttctctgtgtagccctggctgtcctggaactcactctgtagaccaggctggcctcaaactcagaaatccgcctgcctctgcctcccgagtgctgggattaaaggcgtgcaccaccacgcccggcttttttgtttgtttgttttttatatgtgtgtgggtatgcctgcatgagtgcagttgcccaaggaggccagaagagggcatcatatcttctggagctggagttataggctggaaactgaacttgagtcctttgtaagagtatacatactcttaatcactaagccatctacacgagtgcacacacacacacacacacacacacacacacacacacacacatatcattactactaactaggattggagtgtgccattaggacataaaaattgggggctaggttagtttggaagtgagggcagttaccactcacagcaagtgcctgctagtattcctcaagtttcagatggctctcaggtgtgtaattggggtccattgaaaggacaggactgggagtcttatttcctcccagtggtctgtgaccttgggtatatttatttaatgtgctttgggtcttgtctgctcacaacaatgggaaagagaatggctggctggcatatttgcatctcaaggttattatgtggttccagccgctgtgtttcccctctgggtatctcagagcatcttgatgtacactgtgattccaagtatttgaatgaatgaatatttgtatattttggtgactatttgcatatctgtttttaaacagaggccagatgaggaagctgtggtggatcagggtgggaccagcacaattctcaacattcactatgagaaagaagagttggaaggtgagtcccagggacatcaggggctgtctggcttggaaaaaaacagacctgggttcacgccccgactttctttctggctgtgaaactctgtgggggaaaacacttaatctccttagcctcgtcttccctggtcttgaaaaggaaaaaagccgaggtgatgaaccccacccgtccagtcagctcatcagagacctgagacagtgctcagagaactgggaagctcgacataaatactaacaataaccttttccttgaggacgtgaaatactcatttagctccctgaagtttttttgttttgtttttttataacctcatggagatgtaaagtatcaacacatattcaaaagcaaataaactatcagtcgtttaaaaggccagtttggctgtgatttactactcgctcttctgttctaactatgcccatttctacctgattaaaaaaaaaaaatctaagcaagcaaatggaacacagaaatagacaagaaaaggctctgtgagagttcacagtaaacgctatataaaaccctagtgagatggaagtgggaggggccacccttgttccctggctgaccccagcttttccttggactgttatatggtgtcctgtgttcctttatcctgggggcagggcgggaggggctggctggattcctaatcacggctcctcattagtggtggcattccttatcctggaggaaggtttgtgtccggagcagctttaataaggagccaggtccatctctgagtgtgagagaggccactgcgcttcccctgcgcgctccctgactgctatggttcagcttccgatgctcagacagcttgcgatggtgtgttctctctgagctgcctgttcccgctgtgggctttgcatcaaactggtccaggccccagagaaaactcagcctttggatggggaacagaggaaaactggggggactgactcggcctctgggtcgtttccctgagaatgtgtgtgggtggcgggtgcggtggggggtggcactacatggagtaaggcctctctgagtcaggcatttcataccaactctcctttttcctctgtagtctgttaatgtcacccggcaagaagatcactaccacaattttgaggcaaacttgaagcaagctttattaagtactggccagaacagtggtcaccgaccagtcccacacccagattctcagagtctggcatgggagtgcattagccagggctttaaaaaggcaaagcccacaaggctgcgtatctcccgcctgcatccaatcaggggcaggcatagtgcttcctgcctgagtacctcctgcctacatgcgatcaagcacatctggtgtagttgggacacccaagtttgtttacagaagcaagcaaatgcatgacttgttatcatacatgaacagcagtccccagcactcaaggaaattgtctgtttttgtgctatagcaggttagagggtttgttttatagctctcttaagcacagttatttaaacataagccctaactccagccctcacagtacctcaggcatgtgctgctgtgttatcctctgtgagctgtgggaactgactgggtggcaggggagactcatggaatcctctctcctcagtctgccatggagcaaagccggcagagctaacctcaccgccctgccgcatcatatagacatactctgtgacgcaccccagagtgtattgctagcagctccgccatcctctggctgtttccctgtagaccttagtcctccactgagaagggaacatgtgtgagtattttctgtgtccttgggaatagcataacaaactcccacaagctgtcttggattttgaaggccaggtctcacccatcaaggtcagctgcggagctgttgggagcagcatccccagatggcagcatccccagatgacatcacccctttctggttcatgctctcctctgctgagaagaaagctggaggatgacacactgtggagggcactgtgtgggaagtggccttttgggaccagatcctttcgaaaacttgaatctctcctgttagcgcttaaactgtagactacatgcaagtggggtcccagtcctgaaatgtcagagccagagaagaggagagggacaggaattttctgagggttgggtatgctatgggtcccacctagactcccatggaggtgagactgcatgcagggtggtggcatcacctaaaggcacacagagaaaaatgaaaaaaccagcctagctttagtagagggtgccataaactgctctggggcacatgccatctctggggattctggggctgccgagaaaccccacgtcttctttgccctttgttttgcatacctacccatgttcccgtataccattctcagagccattgtgacagtaaacacgggtccttttgagtgagctgattctgtcagtaagagttactgtcgagagcaaatgtgaacagagctttcccgagatgactcagaacagcagtgcgcggtgcgtctcggggtggggtctctcgccccctgtatgagaggaatggctcttgtgtgtgtgagaggaatggcttctcccatttttcctggcagaccattactcccgattaagtgctagatttatgattcttgacgtcagcttaatgcgttctaatacactcttaacaaaggcaagacccgcttggccgtatttaaaactttagaggcttgtgtgtgttccacgtgtaagacttcccctgtgccaactgacttggagtcaccctgtaagccctggggagcagagcatccgttagtgctcactcacgagctgcgagctgcgtgctgggtaaacagtgcacagggcggcgcgctccacaggcccctctctctgtggatgactcatgcctgagatttctcttctgctccaaagatccagtgtctcattcatggctgctcgtgtgtgtgtgtgtgtgtgtgtgtgtgtgtgtgtgtgtgtgtgtgtgtgtgtgtacattctacattcttaattttaaaaacatcaacatctttcttacaaatgtcactgaaccaggtgctttattagcgcgctgctggcctcagtagactgctctggctgactgaggaaaggaacgagaggctggataagaaggaggggtggtggctgagctgctgggctgggctgggcagtgggtgcctgcttggttggatgactagtgaggtgatcatagagttaggttggtggggtcaccagactgacagaaaccagctagcggcttgggttttatttcccagtgtctgtttgccgtctgttctgctaattttactcagaaaaatcggagtccttgtttcagaaaccctagctcaggaaactgacaggccatttttgtgatagccatttggtctctcccagctccgaccctgctgaactaggcttcatttttggcctgtctctctggtgtcttccaaaggcagggaaaggcgcctcctctcctctaagatggatgcttttccttcctacagaaccagcaagggcgtctaaaggacgtccttctctttatgcctgtcctgcctggtggggagttaacttttgagacacatcgtatggtatggtatgtgctcagtacatacagagcccctccctgtgcagtgccttcagcagcactgccgagattcacacaacttaagcattgtgttggtacctaagaatggccaagtctggacctcctctaggacctagaacattaattagaacctagatttacgacatcggacagtccgtggccctccttgctttaccgtgatagtctcagtgggtaaattagtcaaagagacgaggcctgataatgggttctagggtttttcttttgagaatgtacatacaattaaataatgctagcagttttccagagtgggtgccctgggggcggtcagaacatggtcaaagagaagcagtagtcacagcctaactgttgggacaagaggaagctcgtggtcgaggctgctctagcaaagcctgagtgaccttcaggcctttacttaagtccagctctacgcagatacatggaatttcccaagagtccctcacctttcgggaggttgattgacgtgattatctaggatatgactgaattcaccgcgagctgctccacgagctgctcctgcagccctgaagttattctgcctccgttctcctcttcccacctggctccagccccactcgctgtcccctcactgtggaagcagcgtgcacatccaccttagcacgtgcactgggcccttgactgaaggcacccccctctgaagccccctctaatgtcccttctttctcactcaggaggttccttctgatgttcccttattcttcctttcacatggtagtccccgaacacagtaggtcctcagtctaaggtaatcaattgtacttaaaagaatatcttttaagccgggcgtggtggcgcacgcctttaatcccagcactcgcgaggaagaggcaggcggatttctgagttcgaggccagcctggtctacaaagtgagctccaggacagtcagagctataaagagaaactctgtcttgaatcccccccccccccaaaaagaatatcttttagttttcattatggctgtcttccctgaagactttgtgcatattccagctgttgggacagaacctggcacaattaggtgacaccgttccgttgccagtgccaccatgggtgacttcagagatgagctgtggggatttcacggttgtgttagggtggaataccaccagtaacggatggcattcagtttgctcgcactttacagggtgccctgagaacgccagagacatgtgctgtctagctttatgccagctctgcacgatgcagggtcacctgggaagaaggactctcagctgaattgccaccataggactggcctgtaggacagtctatagatgtccatgggtgggaccagcccattgtgggcagtgccacccctgcgtaggttgtcctggatcttaagagaaagtaaactgagcaggtcatgaggaccaaaagggtgagcaccccccctccgtgacctccacaccagcgcgtcctgtccatctcccacccccacccccaggttcctgccctgcttgagcttctgcctctgttcctttgacgatggactgtgtgtggtgtggatgcccgagcagagagaacccttctcctccctgaactgcttcgggtcctggtattctatcacggcagtagtcaccctgacgaagacggtctggaatcctacatcttagcagatggccacttctgctgttccttcttctacacccagggatctgcccgtccaaagtgttctgatatgtacatgacagtcttgaggtgggggaggggaggagtgtacttccaccagagagcattctcccagcctccccacttgctcacaggtctccgctagtcttccaggcgttgctgttcctattttgttttacaaagaaaaggagaactagacaaatgttagcgtagccccgagcctccccccacccccactgtattggatgatggggtggaggctgtggaggctaagctgtcttagcaactcccggcttgtgagggaggatggcgacttggcagctctcctcagaaagtctgacttctggaaagtctacagcctgaggtgtctgccctcgtctgctttgtgtctcaggctactcagtgtgcctgtgagctcctctggcaacccttacagcttatttatgcttggagagggggtgatcctgtacaaggtcagtttttggggctcccatagttcacttcctggggacggaaggtctcacctctcttcaatatccgtgttgcttctcacctttctctcactctgtggcctactgggtgtccctccaagatggagggtttcaaatgcagaggaaggtgctccacgggtcagctaggacctccccctcctcccatgctctggcaagcacttcatgcttatcatcgagtccttttgttgcccctttcagatccgaggcacccttaggttgtcctgcaccctgagcaggtctccagggtctaacccggggaggcacttggagatactctgtctgctgaatgcagatactccgcgaggagtgctggctgcataagacagtgcggggtgtggagaggagttggggatttagcttcatggtggagtgcttgcttgtgctggagcaatctggagcaagtgcaaggccctggaatccggtgctcagctctgggcagggctgggtggggtggggtgggaggaagacactgtgcttggcaatgtgtgggtgccggaggaggatcaaagccaggaccttaaggagtgcacaggtgcacagtagggagtaaggcagttgctgggctgtaagcaaggcagagaaagtgtgggaaaagctttaactaagggctctgagtaactttgaggaaggtgacaacacatctcctaggggaaatcagaaaccctgctgaggaggcaggggaatttgccctgaattttgggtgaatgcttgtgtagaaagccccaacacatttgaggaagagcaagtggcctggcccaggttagagacagggtaaggtgctgggctccgtgggtgcagcagctgtgcaaggtggatggagctgaaagcagctactctggggctggtgaaggtgcagaggtatgcatacggatggttttccagatgttccgtgccagcatgtgggactaccctgctctccagatgttccgggccagcatgccgggctaccctttcagctcccttgagctgatcacctgggtctcacaggggtcatttattttcatgttgactatgtgaacttgtcgtaaaggaaggaacgtctggagaaggggctgagagctgagcattggagtcctaagttcacagtggtgagccatgatctgggctgtgacctgtaatattacttgaggtattaaatttgttaaaaaggacacctgcttcatcaaagtggggacagagaaaggtttgacatctgtgacctgtaggacccagaaggaaaggtacagaagggtagaggggagaatctgaggtaactctgagtccccacacctgaggtggttcttgtttgtttgctgggtttgtttttgttttattggtgatttcctgttttgtttttgagacagggtttctctgtgtagccctgactgtcctgaaactcactctgtagaccaggctggcctcctactcacagagatctgcctgtctctgcctcctaagtgctgagattaaaggcgtgcgccaccattacactatctttaatgtctctaaacccagcctcattccttctgacttaccgtgtctgtcagcagtagtctagatggtgtagtgtccagtgcagagctgggaccctgcatggtctgccagcaccgtgctgaacacgttttcctatttactgctcttgactgtcctgtgagtttaaaaaaacaagctttagtgttccttttagaagatgaatcaagtgctgggcagtggtggtgcacgcctttagtcccagcactcaggaaacagaaataagctgatctgagtttgaggccagcctggtctacagagtgggttccaggacagccagaactatgcagagaaagccaaaaaccaaaacaattaacaaagaagctagagagaatagatgacttgtttatgtcatacggctagtgatgaaatggagtttcgaacccaggacaagctgactggaaccttaactgcccttaaccacttttctaaattacctctctgccaagacctgccacaattaccatataggaattgcttcttcaagtatcactctcattacccttgtgatagcaataagtaacatatattcatagtttgtacgtcggcttccctctcacctttcttctccctccctctccccttccctccttccctctccctccttcacctcttccctctcccctttcccttgtgcatgctcatctgttctgctgccccacccccttcccaagccctgctcccttgacctccccacgagtcccagccatcatgcagtttctcataggtagcaggtatgcataatgaagcacacattcttcagtttgattgtcacaatatcttttgaggtttcagcctagtgcaggacaaaggaagacacagctcctgggtggagttgtctatgaagtttaaacattccagaagtgaccaataaaaaaacctgtgatctttttgctcttaattatgccacacccttttgtggaaggaattctctctgagtcttctgcttccatccaggtcatagaactctgtatgtgggggttcggatgccgctggggaggcagagccatcggcaccaccgcactcatggccagaagcaccggagacgaggagggcggggcaaaggagccagccagggcgaggagggcttggaagccttggcccacggtaacaccctggagggaggacagaggcccattgtggggagaggtggtgaggcgtgggaaatgcaggaggagcatagccacgtaaagtcattgtctggggtttccaataggaaggagtgcttctaaggattaaaaatgccttcctgaaaatttacatttcagcaccccaatcaacagtgtcagaattccttcgctagagaattagccatttctttttactgaaatttgtcagatctctagaaaactataaacacaacaccacctgtttatgtgctcaggtattttgcctacatgcatgtctgtgtgccacgtgcgtgcctagtgcccttggaggccagaagagggcgccagatcccctgggactggagttacaggtgtgagctgccatgtgggcgcttggaactgaacccaggtctctagaagaatggccagtgcttttagccaccgagccttctctccagccctggtttctaggttctcatgggacttctgcgagtggtctcagttgacagctctgctcccttgtggccatgcttccacaggagagcctttcctctaagaaaaaggaatgtttaaacctgtattcagggcatcttctatatacccccaagctgctaggcagaatgctatttttgttctgatttggaggctggtacacatgcagacgtttctctctccggttggtttcctagacaccccgtctcagcgtgttcagttcattcttggcactgaggaagatgaagaacatgtgcctcatgagctcttcacagagctggacgagatctgtatgaaagagggggaagatgctgagtggaaggagacggccaggtgagtgtggggcagacacctgcctgctgcagcaggcctctcagcaggccagacctgcttgcctcttgtctcttcttggtaacgtggttaccagtaagcctggctccagctctccgtggtgcagggtcaatgcatgcactgttgtggacattttccgtggcagagttaaacaggccagttggcagtgagtcttccctgtttgtctccgtgggtttctgaagtcacacaaagcactgataaaaatgttgttgttttttgaatgtggtatcactgtgtcctaatgatgtagaattttaagaattatccttattatagacagttttataactaaagatttttaaggggctagagaacttggctcagtggttgggagcactgactgtacttctagaagacccaggtttgattcccagagcccacatggcatctcactgcctgacaccgtcatacggatacatgcagacaaaacaccaatgcacatacaataaaaataaatattaaaaaattttaaaacaaattaagcaaaagaaagtggcagtgtccttcaatcctactgtcccaaggataaaactaggaatgtatttgggtcttagacatatatgtgtttgtaattttatgtttgtctcagaataaaaacgggtgagatttgcactgtaccacagcttgcttttcccacttactctgtgtctgagcattagattgggagttagtgttcagcgtgacagttcaggttttgccctcttgcagaccccaccctctgtctctgacatctcatgttggcaatatttgcaggtggctgaagtttgaagaggatgtggaggacgggggagagcgctggagcaagccttacgtggccacgctctctctgcacagcctgtttgagctgaggagctgcctcatcaacggctctgtgcttctggacatgcgtgcaagtagcatagaggagatctcaggtatggggcaaacgatgggcagaggagttgggcgtaaactcggaagtatgagagccagcattctggctcacacccgtaacctgtcattaggaggctggagagcagaatgccagctttgaggtctgaactctacagtgatactttatctcaagcaaaacaaaacagaacgttgaagccagaaaggaagaaagttaaagggtcattgaggcggtgtttgccgtgccagctgggcaggcggccttagtgccatcccaggaaacggtgatggaaggaccaacttccggaagccgtgctctgacctccacgagctcaccatggcacttcctttcatcacatacacgcgcacacacgcacacagtagtggtaatggtgatagtaataataccttttaaaaagtaaagatttaaaagcacacactcttcctctagaagagatagaggaggtgagccatggcatcccgcacttcagcgtggcgtgcggggtggcccgtctggtgtgagcagatgttaagttaccatgtttggggagcagcattggaaagcacaagtgtctgggtgattctgcctctctgaggagggggacctggggaccgaggccagtcctgatggaatcctgtgtcgactcctttgaaaggtggtgcctgggtgtgccacccactgtggggaaagtgggattaaaaaaaaagttctgtgtcagtgccctgttcacggctgccgaggcagcggaacccgggggattggaggccataaatgagcatcagagaggccatacagtttgtatgatgctgagggttaaagggcgtcacacgagtaaagtgtgtctcgccaagtctgagctgcacgtggcgccagctaagcctttgcaccgggcaggcaagccgcacgtagcaaaaatcgttttttgtttttttggggggttttttgtggaggcttataaacaaatagcaatagccaggtataatcgaagtgaactcagtgctgtccactacacctggcagggcgtggaagcacatccccacactgcgtttgaagaaactgaggtcacaggacatggttttttggagtttttttttttttttttttttttttttttccataagcactcagaagtctcctcacactgctccatccttgaactgtgttccaaaagggtcacagctgtctttcactgacttgtaactacatacgtgtctaagagcctgcgaagttcctaagaaagtgtgtgccgtgttttggatagaggaatccctgggaattagtgccctacagccctcaacaatgagacctcagccaagccttggcagggcagctgtaagaatgatggaggctgagttaatacgtcaggccatgggaagagaggaggcagagcgctgcctgcatggggcagtggcggaagggcactgtttccaatgcagctcgggaggtagaattgatggtaacaacctggtggcatccagatggcagtgtctgtgtgtaattggagctgccatgacacttgagagacagatctgaactgaaatgtgcccctaggtcttctaaaggtggttcaggttattgtggtcagcagtgggggtggggactccacctgtctgaagctggctcaggggtcataggttgggtgaaagaaaagtatcacccttggagactgagggccactcagcagtgtcacaaaaatcggacaacagccaccaaacctgtgttaccctcctaggactgctgggatacatctccatccgtgtggtggctcgtgcccgtgatcccagcatccagaggttaaggcaggtagatgaggttcaacactagcctgggcttgtagcaaagtcttgtctcaaaataaaaccagtgaaccaatcagtaagtttggaagtcagaaatctgaaatgagtttagtttgggctgcattcctcaaaggcccacaacaggaacgtttctccagcttccagcttccgggagctacaggtgcttttttgttttttgttttttgagacagcgtttctctgtgtagccctggctgtcctggaattcactctgtagaccaggctggcctcgaactcagaaatccgcctgcctctgcctcccaagtgctgggattaaaggcatgtgccaccacgcccggctacaggtcctttttgattgaggattttcttttcttttggggaattttaagagggaaaggaaaaataaaactagtagtagagggtggagcagcttgccgccacccgctgctccttccccgagcacctgatgcgggtcctctgttcctgagtgttggttggactctcgcttttagacctgatcctggaccagcaggagctgctccgagacctgagcgacagcgtgcgggttaaagtgcgggaagccctgctgaagaagcaccaccaccagaacgagaggaggaggaacaacctcatccccatcgtccgctccttcgctgaggttggcaagaagcagtctgacccgcactccatggacagagatggtgagggggcctttgggggcgcttgcggtttgttttgttggtgctgctgctccgcactacatctctttggtgggtggtaagcagggtggcccgggactggtaccgtctcccccttgtgctctcagaaagggagcagctgtgaggagagtgcccagtgcccacactgatgctcatctggggcagaagaagcagcctttttcaattagcaaacgtcttggctcagacacagaatgctgtagcatagacaggcttctgtgcttgtgctcttggctctgccgtctgcagagtctgtggccctggacatctattacaacccttcacatgtcaagttaataaagaccatagcaggactgtccttcctttgttatgggatttccaggcattcacttaagtctaaagtctgatcccaggtgcaggtgggttgcaaactcttcagctgctaatggctacctccccgtggcttggcagagccttgtctgtattatattctagtctctgtgtttactaagttagagagtacagacctctttgggaacctgtttcttctgtaagctttctgtagaggtccacatgcacttctggctaaaggtcaccgcagctatagagaaatgagagagaggccttgactgctaaagaagatggagggagtagctaggcctcttgcttaccattaagtgcgtggggacaggtgtgaagggaccctgctccctggtgcagggtccgctcggcctctgctgtgtgggctgggctgtgtcagaggggaaagggcaagctcctagcggattctgcttgactttctcccgccagggcaaacggtgtctcctcagtcagctacaaaccttgaagtgaagaatggtgtgaactgtgagcacagccctgtggatctaagcaaggtgaggagatgtggcaagttggcctctctgtgctattcacagacgggcgctgcttctgtggacagggtgcccatcaccctaatcttcccccttcatacacccagcctggggaggctggctcctcagggatggccctgcagttccttctcatcttcaagttgtcaggacggtattctgcggctgcctcctgtcactcctaaagtctcagacgactcttgggggctgtgactcgtgcatctgacgaagcagtcaggtattagaaaaagaaaaataccgtgacccagagcttccgaggagcacgatgggacggaattcaggccagagttcttgcactaactttgattcttgaggtggctcagtggataaaggtgtttgctgcccgaggatctgagttccaccctgaaaccctcaccaagcaaggagagtacggactctcacagggtgttctctggcctccacatgtgtgctgctgctgcatgtgtggacacgcacgtgcacacacgctgacctacatgtatacatttctagtcaatgttccctccctggtcttagttgctttgtttgttttgtttgtttgttttgtttttaaacagtgggactgatgggttctgtgctgcctccactcagggcttttgtggaggtgaactagaacagtgagagacggttttaaccttgaatgactcgtgaagtggagctgtgaagaaggtgattggtgctgaagaccatggcccccaaatcacctgaaggttcttgtgcgtttctaggtggatcttcacttcatgaaaaaaattcccacgggggcagaggcctccaatgtcctggtgggagaggtggatacgctggaccggcccatcgtggccttcgtgaggctctccccggctgtgctgctctctggcctgacggaagtgcccatcccaacgaggtaacgtggggataggctgagggcagcctactcaaagcagacttgtgtgagtgctggcgctggaaagtagttatccctaaagttannnnnnnnnnnnnnnnnnnnnnnnnnnnnnnnnnnnnnnnnnnnnnnnnnnnnnnnnnnnnnnnnnnnnnnnnnnnnnnnnnnnnnnnnnnnnnnnnnnnnnnnnnnnnnnnnnnnnnnnnnnnnnnnnnnnnnnnnnnnnnnnnnnnnnnnnnnnnnnnnnnnnnnnnnnnnnnnnnnnnnnnnnnnnnnnnnnnnnnnnnnnnnnnnnnnnnnnnnnnnnnnnnnnnnnnnnnnnnnnnnnnnnnnnnnnnnnnnnnnnnnnnnnnnnnnnnnnnnnnnnnnnnnnnnnnnntcagagagcagtctccagggaaccggctctgggcagaggtactggtgtctttcccatagcgctggtgggacttggccataggtggtggcgtggtaattcggagctcagtaactgtagcgttcagatgctccttccagggcgctcctcagcttcctcaccctgctcttccctattttcttattagaacaatgaatgggacctagatgtaaccctggatttacacaacgccgtgttttgaaaagacatccttccggtagctagaaatcgtgtctatggtaactctaagaaatgtagccagttattgaataatgtctcataaatagctccaaatggtgtttggccataacaaggtgacatctagctacagggtagttctttccttgaaggcacagggacagtgtgttagcagggaaagagctttgctgtttggagaaggtaaaacgccagcctctgtccttgcttacagagctccttctttgtgtgttctggcaggtttttgtttatcttactgggcccagtgggaaaagggcagcagtaccatgagattggcaggtccatggccaccatcatgacggacgaggtacatgccgccgctgccctcctcattctctcgtaaatgctgagtgctcactctctcccagaaactgaatgcgttgttgggataaaatgatggttgtcacagtgtctgctgggagcagttcaaggaccgtttctgagagccaatgaagagtgaggcaagcccccgggaggtctttcttgctgttctatctctttgctttccagcttcttactgtgtagcccaggctggcctcgaacacccagtgctgggattgtaagcatttagcactatggccacttaactctccccttttcaaggaattaaagatgcagaaaatcaaagtagaatgtgtagactttgtgtttaatgtcacttgtgaaacctgagttaaccttcctgagactatggctaattaaatacattgatgtcatttgcataaggaaatacttctattccatggaaacaagacgagtctgcgtagggtcaggacatgcccttacatgtcacgtgtaagctgtggcttgctgtcccacaccgttgctctgtgctgtagagtttccctggtgcacgtctcagtgggcacaggcaagcgtgggctgtttgatctttgattctttcacagaagtgttcactagggagcccttctagattcaaacacactcccagaatctctgtgaatcttgcctctccagtggagattgtctcactctctagcccaggttggccctcagcttggcagtccccctcccctagcctctggagcgggtggctttacaggtgtacacctgcacaccgagcttgggttcctctgaaaactccacgtacttcgataagcgccaagttttatctcttagatacccacggcagggataaaaactgagaggctgtgtccctgctcattggagtgtgtgtgtgtgtgtgtgtgtgtgtgcgcgcgcgcgcgcacgcgtgcccgttggaggtgaaggaattctgagacttcctaagttctttcctctctctagatttttcatgatgtggcatataaagcaaaggaacgcgatgacctcctggcagggattgacgagttcctggaccaggtgacggtgcttccgccaggggagtgggacccatctattagaattgagccacccaagaatgtcccttcccaggtaatgaatgcatgtaagatagtggtggctgctgtcgggggctcctgaaagtcagaataggagcaacaagctaagccacagtagcataggcccgctcaggtgtgcatggggaggacagagggggagggggagggtcagatggttccctgtcagactggactggaccagagctcctgtgtgtgctaggctgaggctgggcattttacccacaggaatttgctcttccgaggtgctcccctcccccgggcgctctgacctctagtttacaggagaattaactgaccttctagggcaagattttaaaggaggttacatcgaagcacactggaaactgcaatttaggtcagattctgttgggggagtcgtttggtttatataaatacatacatctctcccccccccccccgaagtcacctgtgtcaaatccacaaatctatttggaaatcacaaacattttaatgttgttctggcttttgtgttatcctgttgccaccaaggacaaagaggggctgactggactcattttatttccttttgtcaaaaggaaaaaaggaaaatgcccggtgttccaaacggaaacgtttgccacatagaaccagagccacatggggggcacagtgggccagaactggagcggactgggcggtaagttctgggacattgcgtcctgggtgccacgcaccggcagacacagctaaggaaagaggcgtcctctgtctctaacatcctgggtagaagtttattgaccatggttgacgttcacacgagaccatctactgtacattaacatgaatgtgtccaatatcatattcattctacttttttgaactatttgctaagttctgtctgttcccggtcctttctagatgttccctctgatgtaaactcagcacctctctccttccttgtctcctggcgttcttcttactctttgtctctgctttgatgctgtgtccttcggaaagccttctgatattctctgtggctgacgctgggcacttgtactgtagagatctttagcttcccatcacagtccacatcattcaacgttgttatcgtcgtctctcctgctggaccgttggctccaaagcctcaaagtccccactctgcctctaaaaaattatcctagcccacttaaaattatgtaaaagatgaatgtgagccttggacacagtgaaaatttctggagctctctggactgcacagtcccagaacacaccaccctgggtgtgtttttaattcttcacaccattagttgtgtagctttgaaggtagatgtgtctgtgtgtgtgtaccatgttgtggggacttgaggccaaacacacagcctttgggacagttatctatgctgggtgaggaagtatctggatatcccctggagtggaccctgaggaggagcaagaaggcagtgggaggcttttctgaccggctcagctggggcagagagagtgtggtgagcctttctgatgctgatacaggcagggtggactagcgggaaagcacctcagcagggccctctggaaaggggtttctgggatcccttatttgggatgcaaattcttgggaagagctatgaggaaagaatccagagctgctgtctcagtgacacccccctccacacacacacacacacacacacacacacacacatacgcacgcacgcacacacacacacgcacacacgcacacacacacacacacacacgcacgcacgcacgcacgcacgcacgcacacacacacacacacacacgcacgcacgcacgcacgcacgcacgcacgcacacacacacacacacacacacacacacacacatgctgtggtagttaaacggctttgtgctcctagcaggtcacgctccagtcaccctccagggccctctggattatcgaatgaaagacagacagacagacagactgacacacacacacctcagttaattttaatatgccttgactagctcaaaggctaggcagttcttatctttcccactgctagcaaacattcccctccggtccttcggagttaacattttttcaaatctctatttcatctctgctgccccaaacacaattggggaagtggcccgtgcggcccgtcctttagacctggtctttcttctcccccagcatggcaatctctccctcctctcttctcttccagttccaaggcccctgcctcagtctccctgcccagccattggccgtatgtcagttgtcaatcaaatatagctcagggctgagtccctcagcgtttgggaatgccagcctttgggaaccgaattgaattgagacagcattagaactaatcccttacactcctccacatctccccaaacacacaggcttcaaacaggtttctgtcagaacgcaccaggcaaatggatggatggcctgttccgaaatcacgccagggacaggttctctaagccagagatccagagtgcagtggccatctacacagctaagtctttcttgcatcaagctcaaattcttatctctttgtgcctttctgcctccaaacacttgatcatcaaggacgattcaaagggggaaggaagcatcttcatctaattgatgtctgcgttagagctgggcttcactcatgaatgagatatgggctaactccaaagaaacaatcatagcagggtggtggtggtgcctgcctttggacccagcactgaggacacagaggcaggtggatgtctgtgagttccaggacagccagggcgacattttacagagaccttgtcttaaaaacaaaacaatacaaaaagaagtaatcaaagtccttccatgaagagtgagccggtgccctcttgtcttaggcaattaggtggcatcgcctgtgtcacatagctcctgtctgacattcacagactcgcctccatgaagaggctgagcactgtggtagcatcacaggagcctcagtgaggcaggtgtcagagattctttttcccaggataatattcctcagatgagggttgttggtaaagggtgacaggccttgtacaagacactgttgtaggtaggacccagaaacccttgaatactccccagactaatcactgccaccgcagaggtccagagagagaaagacagaatggtgctgtgttttaagtcagacctctggtccctcccccaggctgcctgagttgctttgccacacaggccgaggctgaggcaggtcctgaggtggggcttcctctctcctcttaagagcacagccagcctgtgacgttactggtgtaagtgcagggacagcgtcacaccagaggaaaacagtgaaggggcagtgaccccctcccagcccacctcagcctggggcttgtcttctgggctcttggagaagcagagaggggcagccatactgcctccagagcagagttagaggggatcccacatagtgacccaggtaaacaccggctctaccaacagagggagttacatgtggacccctgcgcctgtccgcgacaccaacgttttgccagttttgtttcacttatttcctctcagctgtttttatgttttctggatgactttaaaccaaatcctcgatattattttcctgtaactccgaggacataacaaacagttatcccagtctgtaatctgtaaggttagccactgccctttcagctatggagggctcagctcacactgagtttttgaagattgttaacatctttttggagtttatttgttgatgtgggttccactcagagtttgtggttggttattagttcccgcccctgttcctttctttttcattccttttcttctatgccaagatctggagtcagagctgtcttatagcttccctgtggtgaggctccattcttaagaaagggctcagctggcggcagtgctcctcctgggtgtgcatcccgctcttcattggcctctgtggaagaccctgaagcgctgctgtccaggctcctgattctccctcctgagtagccctggagcctcccctcctctcagcccatgctctcttaacacagtgacctcaagggtggccattctagagtgtgtgttgcatgctgctgctccactgtctaaactttgtcagtaacttgacatgctgctaggattaagttccaattcctcaaagccacttattgcctctgtgactcagtttctccaaccgtgtctgcaggttttgcaccttgaatgcagcacacggcttcatgctggggtgtccctctgtcttgtctggctgtcgcccaggtcttcctttgagcccctgctgagatgcctgtccctggtctgtgtcaacatgcatcccctgccctcctgcacttgggtctctgagagcacgggctgtgtttgtcttgctcactgctacatctccagtggctggccaggcctggtggctggtcctaagtgtcttctactggtcaagtgcatgagtcaattgttatgcaaagactgaggcaggggggttgttcagagtgacagtttgcgcgtggagaggctttatgtctggagagccccaaaggacaggaacatctttagctgcttctcaggtcccacccaacagcttaatttgaagttgaagctaatacttgccttcttcttaatttttttgaatattgataagtgggtaatatgcaagcccaaattaactttttaaatgcttggtacatactcagttttgccatatgttatatccttgattataacaaaacctctctgtgccaattccaaagagatatgtgcttggggtgaagttgaagctaaagtattacggagcacatttgaagtactttcaaatgtgtgctgctctgtgccctcacggaagagggactgcgttagaggcctgtctgcactgtctctgcaggctgtttgggggcttggtgctggatgtcaagcggaaggctccctggtactggagtgactaccgggatgctctcagcttacagtgtctggcctccttcctgttcctgtactgtgcctgcatgtcgcccgttatcaccttcgggggactgctgggagaagccactgaaggacgcatagtaagacctttgcatcatttctaatggtccaaaacaagatttaaatatcacgtagcacccaagttctttgggggaacattaccttgtcaaggctgggaagactggatcttctcctgcgtggttggagttgtgagttatgggggagcacggttctgcctggtgtatgtatcccttgtgtttagatatcacttcggtgcctggttgcctagttgagttgctcaccaccccaggaatggaaaatggatccactgataagaagtgagaatcagattcggtgaccgtgacagctcgtgtagtggtgggaactacatcattgtgctttttatacatctttgaataccgaattgagctgaacgatataacttagttaaggaatcatggtagatggtttggtacctgagttattaaagtggtgtctgtttgctggagtaccaggcactgtgtacccatcactcttgcttagaggaaatatgagcagatgactgtcaaggcacgatgcggctaagtcagtgtgctaaacaactcttctctgcagggctgtggactcttgttttttctcctcctcagagtgcgattgagtcgttgtttggagcgtccatgacggggattgcctactctctgtttgctgggcagcctctcaccatcctgggaagcacggggcccgtgctggtgtttgaaaagattttgttcaaattctgcaagtaagacattggttttcctgacagtatctgggcgtggctgctatgcggttgagaggaggggtgggcacccccatagctcctgtagctgcagatggcctttctctccagagcctgcaaagtgtctcctcgacattgctgaaagtcttacattaacatcagttttttaacttagatgtttttattttatgactgtgggcattttgcctgcctgcatgcatgcctgagcaccgtgtgtgtgatgcaatggacaccagaaggtggtgttggattccctgggactggagttacagatggttgtgagcccctatgagggtgctgggaataaaacccatgtcctctggaagagcagccagtgctcttaaccattgagccacttctccaactctttttatgttcaactaaggtctctgtgtagtttaggctgtcctggaactaactgtagcacaggctagccttgcattcacagttttcttactttggtctcctgacgctgggtggttgcacccctagggccagaccgactgcttgattttcttctttttcttttcttttcttttttttttttttttggacaggagttttctctgtgtaccctgggctatcttggaactcactctgtaggtggcctcaaagtcacagagatcctcctgcctctgcctcctgaatgatggaattaaaagcatgtaccatcactgggctggctttttttaaaaaatattttttagatttatttattttatatatttgagtacactgtagctgtcttcagacacaccagaagggggcatcggatcccattgcagatggttgtgagccaccatgtgactgctgggaactgaactcaggacctctggaagagcagtcagtgctcttaaccactgagccatctctccagccctgactttttaattttgaagaaaaatatcttaactgatgcagattccctcctatttacattttaggacactccctcctcaatattcggtctgtgaatggtagtgaggcctagcgatgttgtaatttcaaagttttctttgaagatcctttcccactttgtattggaagcagaaacccacaggactggagtcgaccccatctccttgctgcgcgaccaggcgcgaccaccctgggcagtaatgttggaaatactgcacaggcgatgctttcctcctgttccattttctgtatctttaccctgtgaacgccctgtgaggctcttgcacacactgtccccgggctttactgaggagttcagtgtgtgccgtcttcagggacagcaggtctcaggctggagtggataagctgggagtgatgggccacactgccctgctgcttctgagccgtggtgtctttcagggactatgccctttcgtacctgtccctgcgggctctcatcgggctgtggactgccttcctgtgcatcgtcctggtggccacggatgccagctccctcgtctgctacattacccgcttcaccgaggaagcgtttgcctccctgatttgtatcatcttcatctatgaagccatagaaaagctgatccacctggcagagacctaccccatccacatgcacagccagctggaccacctgagcctctattagtaagcgcgctcgctctctgcctctccctgcctttcttttatttcatttacttagagaattaggagctttctccttcctcaggcgtgggaatcaagcaattcacaccgcagtgtgctacagggatttaaatatacaatgtatcttgatagtgttcaccccaattactttcccttgtatctccactgcgctggctgtccttctcttctggggtgtgtgtgtgtgtgtgtgtgtgtgtgtgtgtgtgtgtacatgtgcatgtacctatatacatacacgtgtgtgcatgtgtacagtggccactgtttggaggtcaaaggacaacttgagaggagttagttctcttctttcaccatgtgggccccagggattgcactcaggtcatctagcttggtggcaaatggctttatccagtgagccatctcactggccctcatcttagaagtccgtgcgttccacctacctgaccccaggaatcctgtcttaacctcatttctggcttgtctgtaggcctcacccacaagtggcatttttacgtggctctgaggcgagcctgaacacaggcattttaactgagtcatctcagcctttttacttgatgtttttgggacagggtatgtacgttgtttaagctgactttaaaatgacttcaaatggtgcttctaccttcatctcccaagtacctgggacttcaggggcatagcagcatgctaagcttatttttaaattagcatatagtagttgaagatatttacggagtacaaatgtgatatttcaacacgtgcatatgatatgtaatgatcagatcagaataattggcatattttatggaatggatttttcgagtgcatgtgtgcatgtgtgcatggcacagtttatctgtggaggtcaggggataacctcaggcactggtctttgcccaccatctttttcagcagaggctcacagttgtttgacactgtatgttcccagctagctgactctgtctccagctcgctcttcatcataggcgtgatgggtggcagatgtccacagcatccctaagcatctagagacttaaacttgggttctcatgcttgtatggccagcgctttgcacatggagccacccttcccagccctgggtggagtatttaaacactaagtatatttgatgcttctcgctctcaagagctgaaacttaattctgttatgaaaggcctggctgctaaatgtacaggtgaagctaaagtaggaatggctgtcagcctacggtgctgccggcgtgctgactgtacctcagcccttaggacccatctttgagaactgaagttatgagaacgaaagctcttaggctccagcctagtcgtggctgagaacacttggtagccagctggctgcttccctcagggccggcttcctctttccctagctgcaggtgtgtgctcccggagaatccaaacaaccacaccttacagtattggaaggaccacaacatcctggctgccgaagtgaactgggcaaacctgacagtcagcgtaagtctgggcgtggccggaggccctccgatgaccgatgaccgccccgtctaaggaggacttaggtagaggcggggcagcactctgccggaccctggcacttaagcttaagcggacgtagtggctcacctgtaatcctagcacttaggagaccaaggttagaaacctttaagtttgaggccatccagggctatacggtgaggcctgtctggggtctaaaatgggctactttgatcaaataaccagtaacaatgtgtgggcttgttactggttaactctgctaaatcatcttgatatacttatagatttccttgctgttttcacgctaaaattgctacattttatttattgatctctgtagcatccttggtgggagcagttagctgatgcacatttctgtcagatattcaaatattcaaagcatgaatatttaagttctaaggttctctctaataaaaatgacagcaacttctaagttctttccagagcctagggaggaatgtttgttccagagagttctaactttgtgtccaagtgtcttggttaggaccacacagtcttcttgacaaggacctgctagcgagggccgcagcctgtgtggtggtcaagtggataatgtgggcctgtgctccccagcaggggatggcagtgcggggtgaactcagaaggcagcagccggttgttatgtgtgcccgactcttgtcacccagagtgctttttgctccaggaatgccaggagatgcacggggagttcatgggatctgcctgcggtcaccacggaccctacacgcccgacgtgctcttttggtcctgcattctgttcttcgccaccttcatcgtctccagcaccttaaagacatttaagacaagccgctacttcccaaccagggtaggcagcatgcttatgctttgcctgtgtttggttcagctgtctgtcagaatcctttctctgccccacgctggggcaggcttctctagcactgggcagcttcttccacagctctgtcaggtgcaaggaggaggctttaaacctttgcggtttaaagggaccaggtaagttaaggcgctggaaagctctctagaggtaatgttggccttccagaatagtgctaagtttcatgtctcagatcctccagatccttgggaagtaaggccagagcaggcatgttgaaaacagtcagttggagagattatcttgcccagtctaaaggaccccagagcccctccccacccatggttgctaccgtagtttatgaacttcctggctgctgccccgcctgccgcctgccgcctgccgcgcctgccgcctgcctgcggctcggattctctccttgatgatctgaagcctcaagatgcatcgtgtgtgtcaagagcaaaggtctgttcaggcagagttagagcctgagtctgagcagctgtgtggccactgagtcattgcttctgtgcggtttctcacccagctacatgcgagtgagaaccagagtacatgagggtgcgggtgggggctctgtggattaaaacccaccttagacctccatgacctgcagagtcgttgagcctattagcgaagtttgcgacctgttttctgtcaggacaaatagctgtcaagtggctactagatgctctcactgttgctcaagcctgggcaagtgccacggggaacacaaagatctctgcagggccagcgagagggctcagtgggtgaagacgcttgctgccaagcctgatgacctgagttcagtccctgagacccacacggtagagagagaacaacttgctcaggttgtcctatgtgtgcacatgtacacagagtaagtaaatcaattctttaaaactaattcagaaatatcgtccagtggccatgaagggaaagtacagggacaggcagtcccaggtccatcagcccgggagtcagtgctgtagggattcagagcagagaaagagggaccatggcgttgtttcatggcacaggtatgaagcttcatggaatgcatggggcagtcagggatgatcagaactatggaggacacgctgcaaaccttaggcatcgaagcaaagtgatgttgcatgtgcgtgcacatgtgtgtgcgttgggacactgaggttacggcaggtgtcatttcctatcttttattaaagcaccctaagttctaacatggggcaggcctcttgggataggccttaaaatggataggaatacacacatgtacatgtacacttacacatatacacacatacatagtgcacacaccacattcatacacatgtaccatacacacacatgcacacacaccacatgtgcacacacactacacatgcaccacatatacaaaataaacactattgaaaaagtgaagcaggtactggggggcgaggggctgagtgtgaattttaagtaggtccataacagggtgtcagcagtgctggggagactctgtccaacgtagaggagtctcggctaaagattcttgaccacggcacagaaaaggatttccacaagccacagggaaacaaaatcggtgagtgtctttaaagtatgtgacagagtcgcacagggaaaggacacagaagactctgaaagtcttctccagggcagagtgagtctgtttttctgagtttccgtgctcatgaggcgtaacttacaacagggcttaaagttgaagcttaaaattaagcaaaacctgttagctctctgagagattgcttgtttcatcagtaaagtgcttgcacatggctgtgacagttaaaaaaaaaatgagcccaggtaaaaagtctgggtattatggcgcctacttgtgaatccgttctcaggaggtagagaccgatccaggtggttcctggcaggtgtggagactgtggtgggagtgagcagggcttgagtgacagcatcagggggagggagcagacaccagcaggacagcaatgcagggaggagcacagggaggagattgagtgaggagagctttggggtttgaacaaggagacctctgggggttagtagaggaagatgtgattcaactcgggcttgtttttaatttattcatgtatttatattccatatgccaccccctccctgtccttccatcacaggggtcctcccctctgcccctctccttcacctgtgacccttactcctgaagactgtttcaggagcactggagggcaaaggtgaagcgggtcacccagtgagagaaggcagtggcttgctgagtgtggggacatgctcaggttctggacacattcggaatatcagctgaggtccgtgtggatgctgggtgtgggaggacttgaacatgctgctgcagaggtttgggctagcacacagtaaaccttggctggtctcagaaatctgaacgtgggcctgggtaccccaaactgcactctttagagactggtctcggctacgttagactgtgtcagaggcttggttttccgtattgtagccttgtaatgtgggcattactttgagtatcctaaaataatcttgtttaaggattttcatgttagttcaggcgctaactttctgtgctgtgtttaactgctgcgattgtttgccatgccaggtccgctccatggtgagtgacttcgccgtgttcctcaccatcttcaccatggtggtccttgactttctgattggcgtcccgtcgccaaagcttcaggttcccaatgtgttcaaggtgagtggacctcggtgatcttcaagcctgagggtacactgatctcaagttgctctcggaggctcagaaggaaagggtaacatttgttgccatgaagagttttctgctaagctttaggagaacagaaagtgcctactgacttacagatgcggtggcgtggagaggcggtccgtggagggagtctggcagactggcaagccgtagagatgatctcagacctcggaaggtcgggtttggagtcgagggctctcctgaaccatcaggagatttcttcagcactattttgtgtttgcctgtcaaattcttgataatccatagtagttacaaatcttacatacaaactgacatactgtccaacccctgggatcccaaatgtaattcagggcaagagttacaagtggaggggaccgaccggaaagctgagctcagctccacagaccctcactgggtggagaggccggggagcccacacatgctcagccacctcagaggactctggaataggacagtgtactgacatttttgacagttttggaggttttggtttggtttagtttttttgtttttgttttgtttttgtttttgttttgttttgttttgtttgtttgtttttggttttcgagacagggtttctctgtgtagccctggctgtcctgaaactcactctgtagcctaggctggcctcgaactcgtgatcctcctgcctctgcctccttcagcaaatcctaccggcatggtttctttaaaaaacacagaaacaatgataagaatgtgctttggggggctgtggctgctgcagcagccgacatgatttacctcgtgctctggcagaagagcggttttgtcagctgcataacagtttgtgctgttatgtgatgttttaattctgggaacttctcaaatcgtacatagtttcgagggccccgagaggccagtgggtggttgttggtcgtttagggaggttggtgaggtttgttagtagctgtggtcaaacaagaaacaaaaggaaaggaatgaggcccagggcctcccccgctgccttgctcccctctgtccttgctcctcccctatctcgtgttagagggtgaaactgggggggcaaagggtgggaagaggaagaacccacaaagcaacaaggaccagctacaggaagggctcagggcggcaggaagacaaagtgcgagcctttagacccaacacacaggaggcagaggcaggcagatcttggtgaatctgatgccagcctggtctatgtggcaggttcctggccagccacggctactccatggtgaggtattttgctatctttttcactatcttcacagtgattacatggacagactactggtattattttttctattttgtctgtttaattctgttaaacttactaaaatgcaaaataggttaaacgcccttcatctatataacacagctcagagccccgggtcttagccccgtgtgaataaaaaacattcagctctctccctggtacctagctgactgcaggacaaaggggtttctgtataaaaataggagatttggagcatccagtccttgggaaagtcgtgtgatatgcgagcttaagatgtgagttgatttctggaacctctgggaggcagggagagacaggcctgagagacgggaccttagaaaaactgtggcttctgaagcagaggacgctgcctcctgtctttctcctgaagcagccagtttgccgttccctcggccggtctgaaagcaggagtgctcccctctccatagccacgggtgggcagctccatgacccttcaggccctccacagtaggaaggaaatgtatttgcgtgcaccccatctacaagctcctctgtgctttaaaccacgtctcgactgcctctaatcccgacagcagtgtaaacggtgtcagactctgtagtgtttggagaacagtgacaacatctgtatgtgcctaacagaggcgtctcccccggaacctttagtctgcagtttgtggacttggctatgactacttataatattgttaatactttagtacattttgtgttggtctgagaatgttaactactacctagaatgctcgtagttcagaaacataagttctaaagcttttaaaatgattttaacctgttcagaatccaggacttggcaggattgttgagtttttgaacccaagtattgtaacccatgtatcaacaagatagaacagtctctcccatatttgctgagttttgggtcgttctgggtggtagatgttcatccttcagcgccgggtgtttttcctagagtgcactagggcggggtcaggagttgaagcaaatggcctataaagtcactgaggaaagagggtcccagatcagacaggtccctaagctttgggcctcctaaagcctccagttcctgggcccctgtttcaccgctgatgagagtggctcatgggatagtctactctcagcccaagaaatctgagcctgtttgcctttcctctgtacatcagagacagactgcatggctttctgtgaggagtgtcgagggttatctgtgttatttagtctttggaaggcagtttttaaacaacagattagttgctaattacgttttacttgtcccaagactgagataaagttgctttctctgtactcagagaataaatggaagacagtgtcgaattaatgtgtattccacaagaagctcagagaggattcactgccaagggggatctggaaaaaaggtcggagatttccttaggggccattacagttcatgctttgttttgtgtttctaaagcctttccttcaaaggagaacaaaagggaaagtggaatagtgttaagtgtggtttggtttgtgctcgtcttcagagttaagatacagaaaccacgcttgttttctctcctagccaacaagggacgatcgaggatggtttattaatcccattggccccaatccctggtggactgtgatagccgcaattatcccagctctcctgtgcactatcctgatattcatggaccagcagatcaccgctgtcatcattaacaggaaggaacacaagctcaaggtgagcaggggctctgacctgggaggctgagatcgcagtcggttaattaatgttttatattaggataagcccatctgtaccaggagctatagagaagaataaagtctccgaagggcttttcattgcttgcccattaacagcaaaggttggttggaggtgagactggagtggagcatggcgctaagatgtgggaggagcttgcactcctgtcactctcctggcaagctgtaccgtggtggatgggcagcggccctgctgatccctaaatagctgcgattctgaatcaacagctatacagcttttcctcccaaggtctggcgtagggctgtgagcctgcttcccagaggcaggaattcttcctctaggtttatcctgacattcagaatggactctgagcttgcggctcactcagactgttagtgaggtgccgcgcgccttcatctccaaggcaaggacgagcggtggtgtccaggaacgcgacagaagcattcctctgtgctatctagaacggtcaggatgtggttcccttctgggttccttccagagaaggctggtttgggagattcacgcagagtaagctaagggcaaatggaaaaagactggatattggcatatataggacaagctaaagtttctgtttttcctctattccctccccctgggagggttgtaagaattctctggacaccctcctcctcatctccccactagctgtgagcctgaagcctttcgcttagtgttatatggcctactcccgccagctcactgagggtgactctctccccacagaaaggctgtggctaccacctggacctgctcatggtggccgtcatgctgggagtttgctccatcatgggcctgccttggtttgtggccgcgaccgtcctgtccattacccatgtgaacagcctcaagctggaatccgaatgctctgcccccggggagcagcccaagttcttgggcatccgggaacagagagtcacagggcttatgatcttcgtgctgatgggctgctcagtcttcatgacagctgtcttaaaggtattccttcactggtatgccaagcaaacatgggggggggtgttgtctctgccaggaatgcagtggctccaggatatatacacacacagatgcatgccctggaagaagttattcttgtagacagttaaatgtgcttaagaaaaggaacatggcagtgatagaatagaacacgtgatccaaaggaccacctggcctgcggccttgctgctttcctttctgtctctagctcctttatgctggggatccaccggggtcttctacttgtaaagcaggcagtgccaggctgagctctgccccagcccttctttcccaggggttttgtttttgagacgtcttactcggttctggctggctttgaacctttgccaaccatactgtctctacatcttgattgctaggatcataaatattgttctggtttgggtttggttttgtgataaagactatgaccaaaaggagcctggggaggaaagggttacttcaccatgtactttcagggaacaacaaacagtccatcctgaaggaaagtcagggcagggcctcagcagggcctggggcacctgctcagctaactttgttatccaaggcaggcccacctgcctgtggagggcgctgccctgggagctgggtgctcccacgttgatcaggacagtgctccacagacagttcttcactggagtgtcctctttccaggcgactcccaagttgggtcacattgataacgaagaatcagcagcacacttactgcccaacagtgctgcaaacccgtcaccaaacggaaatgtcactctagggtcagggcagcaaagtccagtgtggcctttcaaactctgagaggaagtgtgctgtccttagccacggatggaagcagactgaggggctaggcgcttgggacgcggtggggcagcaccaggctctgggttgggccctcagaattgtagcagcctggcagttggcgcatgtggatggaggtagggagatgagaagtttaaggacatcgctggaccttgtgtacacgacgagttcgaggacagcctggagaacaacagaaactgagctcagccttgagctgtgactctcgccccccacccccacccccctgctgtggaggcctgtttctccagctcacacttgcatgacgatttctctaagttgaacagatgtgacagaaaagccctgttcacatgccgtgtggacgctttaaaaagcgcagtgaacaacatgttctcaacccgtttcctctcctctgccctcaagtcttaggtcagaaggcatgaatttatttttagtctgtgtcaaaatacacaaagttcctggggatgtgatggctatagaaagatttaaattacatccgtgatgtctgtgtgcgtgtgtgtgtgtgcacgtgaccatgagcatgtgcacatgactaggaatgtgaccacaagtacatgcatgtgtatgcgtgtgcgtgtccccgatgtctactcataacctagggaggagacatgaggcctatgacttaccgtataggtaataacttcatttcagaacaaaatggttttaatgttaccagcgcatgctttctttccacaccagctgaaagagaggcagcagaaacaaagacaatgtttatgagactctccgtggctttgtttcatttttggaatctaacatttatatagatgggacatggtggtgttcacctttgtcccagcacttgggtggcagagacggacaggtgtccgtgagttcgagacaagcctggtctatatcgagttctaagcaagaccccgagtcgttattgctgcccttcagtgctgccgggatgccacagctcttgccttgtgcctttctccgcagtttatcccgatgccagtgctctacggagttttcctctacatgggagtctcttcgctacaaggaatccaggtatcgtgtggctcagcggcagccatgtctcttactcttgtgttcacttgtcctgaccagagaggcacagtgccccaagggaggcctagccagttcctgagaaattagttccccttcttgccttttggccaaggaatgtcttcagatatgaggtgcaaaatatggtcatgttgaaacaggagtattggctcccagaatggcttggcttgatgtcatagcgcaatcacttttaatcagtggttttttcggtattaaactagggatgctttgccagattcctgtagacctgaacctgaaacattagtcagtaaccaaagcagtaaactggggcatcgagatgcctctgcgggaaaggagcttactcccaagccggacgacctgagttccatccttggggacctgtggtggaagagaaccagctggaacaagtagtcctccgacctccacatgcatgccatggcgtggtggtgctggggtgtgcgcgcgcgagtgtgtgagatgggtgtggaaggcacgtacgcttcagcgtgcatgttgtggtcaaaggacaactttgtggagttgtttttctccttccacctttatgtggaccccaggatttgaactcggatcatcaggtttgtgcctcagcaagcttctattcctgagccatattgctggctccagcctgtcataagtcctctatctagaattttaagaggtctcatttgatcctgtcgacatacttatccatcacatacttcagagaacaagcaagagagttggggtttcaggacttgggggtttggggggaagggatttgttgaaacagtgtcttcttctgtagcttagtttgggttggaagtcactgtgtagcccaggctgtccttgccttagcctatctgtaactactgtatgtgtgaccactgctggatggaagcggttttgatagtaagcacaaagatgcagttggcttggggtcacttccctgggagcttgctctctgaagctgcagtgcaggagaggagaaagcagcctgtgcgtggagttatcaaaggtggtttcaccaagtcatgtgacttccactaactgccatgaccagactgcctgttgtttcgcaactctgttcccatttctctccagtagaacagtattggctgctgttgagcagtcggtaaactgctatgtctgggcttaaggaggcttccggcctgagaccacccagacaccaatgctagtccttccttccagttcttcgaccgtctgaagcttttcgggatgcctgcaaaacaccagccagacttcatctacctgcggcacgtgccgctgcgcaaggtgcacctgttcacgctagtgcagctcacctgcctcgtcctgctctgggtcatcaaggcatcgccggccgccattgttttcccaatgatggtaaggtcaggctcctggtccccgaccacgcctctgcctctcgagtgctgagattaaaggtgtgcagccaggctgctaagtgtggctcttattattaaagattattaatgcagttcttgaggatgtggtaactgtaacagcacaggttttcctgtgtccaccatttttaagggtgggtcactgggatcagcacacggctgtgggatccccagcagcatccatttctagacctttatcctgcagaacaaactccagaccctgtgaactgccccttctccttctccctccctgcaagcacgtaggcaaccacagtccggcgttgtctctgtggctcccgttatcctgggtgcatcacacggcaccgggttattcccgttgcccacgttgtctcatgtgtcagaatttccttaagtttgaaaaatggatattctgctcatttatgttattgattaaatgtcagttcctggggacctgaccccatctctgacctccataggccccaggcatacacatagtacatacacagacatacatatgaaataaaacatatttttaaaagtatatggaaacagaaaaatgaataaaataatgtaatgcatgaataacgtaaaaagcctcagtgctgggtgccgagtgctaatgacgtgcagtaagcggctaccgttgtgatcctcacgagcccggtgttgcttggatgtcccaggctgctcagagaatcattttgctttcgttctgtgggggaggctcactctccagcctgcttccttctcctcaggtgctggccttggtcttcgtcaggaaagtcatggatctctgcttctccaagcgtgagctaagctggctggacgacctcatgcctgagagcaaaaagaagaagctggacgatgcgaagaagaaggaggaggaggtagagtctggtctggctcccgccttgtagttcagggtctctttagagggagggcaggctgggtgggaagggggcaggcgtgtctgggatcccgagggtcgcactgagggcttctttccttcgggaggatccgacttgtcgagagtataaaatccatcatttctgagagggttggttgtgcacctgttgcggatggtgctgtggctggcttcgtgcaaacacagcttgcacaggactttctgtccttcaccgccctcggcagttggcctggagcctatggcctgagtgtgcacagaaaggccatgcagcaagatgaaaaccccaggccaagaagaaagggctgggagtgtcccgaggcagctgctgcctgaagagcggccttccagctctctcagtactggcggggtttatgtcagctcgataaaatctagagtcatcagagagaaataagcctcagttgaggaaatgcctctaagagatctagctatagggcagtttctcaattgtggaagagggcccagcccattgtgggcggtgccttccctgggctgctggtactgggttctatgagcaagccatggggagcaaggcagtaagcagcatccatccctccatggcctctgcatcagccgctgcctccaggttcctgcccagtttaagctccttccttgacttccttcagtgatgaacagcagtgtggaagtgtaagccaaataaaccctttcctccccaacttgctttttgttcatggtgttttatcgccatgatagtctctctctctctctctttctcatacacacacacacacacacacacacacacacacacacacacacacggcctccttgtcgtcaggtagtcctaacgttcttttttggcaacactggcatgctcttgtgccccgtgttcctgtacctggtcgttggctctaaggatgccctcacatttgggttcttaccgtttctcagtgctgttccattctgttatttgaggccttgagcccatggaagggacctaattatatgagtgggaatgaaaactgcctgacaccttggtggtaaaaactaggcgggaagactcttggtttacttggtagaagatatagttgtaagccagggtgcagtaaagaaaccaccaaaatggtcactctgaagaggccagagccgagagaaaagggaaaccttgctgtaactcagagcaggtgcctgtggggagggaagcctgggcgctagcatccacaggtgtaccccctggaaacggcctcctcagggctgaggtgttcctggaaacgctgtctgtgggcttttagcaatccttgtatagtccagcttgagcttgttctagacacatgctctgtcctttggaatttggggataggagtttcctttggacctgatgatgccccccccttcttccaggaggccgagaagatgttggacattgggggtgacaagtttcccctggaaagcaggaagctgctaagtagtcctggcaagagcagcagcttcaggtaaagcgccaggtaccagccagcttgcgccagggttcctgcgagacactgccctgcggagcggtgcagccggccccacctccatccatccattccactgtgtaggaacaaacgcctgtggcgtgccctgctctgagagcctggtcccatgtcagggtgtactggagggggtgcctttgtccccgtccacttcctcctgttgcagttagctgatacaccagggtcacagcactgctaacacacggccagactccaggtgggatctctccacttctccaccccaagttgttgttttccactttactgagtccaagagtgtgagaagtgcatttccagtagttttcagctggtgggtttgagatgcctggacccaggcctgactctgggaacaggcaggaggtctctcccgtgtgggttacagcattttaattcagggagccaaggagaggctgacctcgaagcccaggcagtcctcgttctttaccaaggctgttgctcaccacaaagcacagggtctgagagccctgtatgtggttcagccctgacctcgatgtctgctgggaggctgcacacccagtctgaagaagcccagaggtgaggagagctagagtggagcccagcgggtcatggggagttagctgatgagttatgggactcaatgtagtttataccatggataaatcaggcaatcttttctgtggtctctgaggaggtgtccgtgggctgtgaggaacctttgaagtctctggcagtgaagcaggatcggctccttttcctgtgggtgcaggagtctctctgcatttcaggagaccgtcgggcctataggtggctctcgtgttttctgggaccaaggatcctggttggagtcccgacactgccactgtttgagtcttgatgggcactcagccctgaagacttcgggcttagcaccttcaaaatgaggattatgagcgatctcttttgctatgagtgctaagctaatagaccatgaaattcttttgtaaactataaatgggagagattcagttatgtaaacgtggatgtaaaagagcgccctccacatagcagcactggtgccagcatccctgggaagctcgccatgacctggggcatcggccagcctacagccttagcgcggctcaaaggctgccttgcctcttcagagctggacccctccatcctctggcctctctcccttctggtggggtggtgtcagggctgtgcatgccctcccttctgtgtttgaagttcactgcctgagctttgatttcagatgtgacccttctgagattaatatatcagatgaaatgcctaaaaccacggtctggaaggctctcagcataaattctggaaatacaaaagaaaaaaggtaaggagagctcttgtttgtctttcattttcttctgtcttttggaaattggcgatactgttgaaggtaaaatgtatgttgcttgtagaactgaatttgtctagtaagtaacagaactgttgctaaccttacagtaaggcaaataaaaataaaaagtttccagatatttggagacaggctgttctgagccgtccctcactccggtcccaagggcaggctgtaattattttgggatatgaatttgctttaccgtttgactcctttaatccacttggaggatctttctcaattcagaatttttgtctcttgttactgcaacaacaaaaactggaaagctgctaaaaacctggatcaatactgttaacactaataaacaatatgatagtattggcccagactttaacctacttagcttagattctgaaaagagagttttgttaaacatgacagttttcttattctgcaaagaaatttctctgtataataacagcatagatcagttataatcagattattaaagaaaattggaggtggctttgcctacattaaaggaatgcagtgcataagttactgattttggcccaaacactacttacatttaaatcatcagagaaatgaaggcaaaactccaatgtcttgatactgataacagtttttgttaaaaaacaagcaagtcaggaaccaggaaagctggcccgccctgcttttatctccgcacataaccgggcaggctgctgctcctggtgttcagctcagctgcaggatgggggtactatcaaggttgttccaggagcagagagctcctcggagtcgtgcccaccagcacatggtgtggcagcttcttcactgaatgggttaaaatagatctgagctgaacatgagtgaacacagaatcttgcttccctcagaggaaaatccaggcagctgtggggatgtataacacatgtggttatttttagttgagaattagtctacttgtaaatgaacttaaaatacagccagatccaagtagcatcttcggagtgctgagagaaagagcgcgcactttgtctcactgtgacgttgtttctcagccccttcaactgagagtctctgctgagtggaagatttggaccatgaggtgcctcggagaagttctgggttttaacaaaatggcgagtctctccggaaagaagccgagctgagtctggccccgttcttggtcatctcaaagccatgccacatggaagcattcagtcactcccggtgtgcgtttggaggacatccagctacccacataccagcagccaggcgccagtcgggtcatggtggggccgcctcccgctgcctcctttcctcttccttctctctcttcagagctgccatcattaaagagccagcttccattttcagacattttctctgatactctgctggcctgtaagccacacgagtccattctgtcacagaggattccctcttccgaacgatagcctggggtagtggcagaggcaggacaagggcaggctctccagcagcctgtgccttggtttcctttctgcctgggaaggggatgttggacaggcagacacagtagcaggtctgctgcctgagctccaccatccaggcatcaacagcaaccaccacagtgagctgcctctggcctggggtcatctgcatcacctccagaagcagtgggcataacgttgtgagtccttggaagatgcggggacagcatgagagcaggagtttagctgatgtcaggaaaggcctaggggaagccagcagcgctcggagtgtgagcatctttccctggaacgagagaaagaggagcctaacttgctatggaagcacttaggtttccaggcctggagatctgttccaggtctgtttttttaagtctaggaaagtcttgctgacagctgtttgtaggaaggaaggtggatcggggctgctgcggctgctctgtgtgaactgtttgacttgatgctgctacctctcgtggtgacattgttataacaccctggagagacccgagtgctcatggatgtcccttagctgccttagtcgggagaaccatcatcatccactcggtggacccaaaccgccatcagccatgtgacttcctaatcatgggtttcttttggttgacaagttctggctcaggtgtaaaagccacacgaagaaatgagctgtaagcggtggcatcactttggatacttagtttaaaagtatatgtgtgattttctatgttccaaaactatcatgagttttttggcccgagcaagtgtagacctccccttcctttgtgcccagactgtgactagtgagctgggacagtctctgtccagagaccacacacacacagtgagctctcttcctctcctggctgaagaggctctacatcattcgatcacagtttgctccccctcagactcgctgaaacatctagtccttctctgaaggtcttaggtgtcgggggccaccccgtgttgcccgttcctccctacctgtcaggaccactgccatattgatgcaagatatttgacaattgatacaggacagacacgagccacacagagccggtgtcttctgtagaatagtggtgggcactgctgttcagggcctgtgggatgaacgtgaccctgcttccgatcccagaatggcctctggaatgtgggtttgtctggtctttactcatgggagatgtgcgttccatctgagcagccaccctggcttgctctcaggtagcacatactgcaacaggtgggtttcctagaaatcagtggacattcaagtctctgttagccaaacagcccaagcatgtcacttgaggacagatttaataagcatagccttgcccaccttggattaggagccggcctgtcagtgggaaaggtttttgatgccttcctggccctcctcacacttctggaactcgagtcttttctcactgcttgcattctctgggaacacccctctcttcccggactggtttctcctctgtttttcctgccaccttctgtgtagggaaactgatgactgcttcaccctgccctggcctcagtgcacttgagagacataatggtgaggaccctgacgtgtgagggagccagtgacttgtcactgaaacttactcttcccacacgatgacacttgtgcagcctcctgtgagctatgccctgggctggagggtggaggctgctctcgcccgccctgagcaatgcacttgtggagcctcatgcccatgtttgcactggtcatctcttctatgacaagggtcgctctcagacacgtcttgaatgtggccagctaatgtcatgacttgctggtaatgtcagctggtggtgtgagtggagttggggggctgggactcaagaacacgttaattgaagccttggctctgagggaaaagatggagggttcctaagtggccagttgcttcccgatgaccatcagggaagggttgctgtagagaaaggtgaagagctggagagacggaatgtgcaagtgccaagtgtgtttggttgcataacacatgcaacttgggaagctttgtcaggaggctccggactttcccactcccagccccatgttgggtctccttaaccatgaaaacctgtcttcccgatagagggaaagtgaaccatctctctccaaaagacagttgcggtttctcattgtcggtgatggagcagacttttaaattactcactaatgttggatgaaaatgtggtattcactaagttcccagcctgcccagactctgcagagtctgtggtttatgatcgtccagaaaaggacagttcctaactccacttttccttgacctgctcagctcagcagacctgctccttagtggggaggcaggggttctccttgtatcctgtgtagtaggtgcagtgtctgtcctgcctctccacttgtcctgggttgtagtgagtagcagacacactgtctcctgtgtgtctcccaccactgggccgctcgatgtccctgaagatcttttgatgtaatttaatcgtatgggtgttttaccttcacacaggcctttgcaccacatgtcccccatgcttcaggagatcagaaggaatccgatcctcctggagctggagttacaaatagctgtgtgcttccatgtggatgctggggatttaattgaacctgggtgtagctggtctttgctactttgtgggttattttctcaccctttgctccctctcccagtttcactccttgacactagataggacaaaaacggggggcgagagggagagggagagagagagagagatcgagatcaagagagacacccctgtatctaaattcctttcttctttgaacactacgaagaaaccacaaccaaccacacacaactcccaaacaaccaacaaccacccatcctgctttttgggagcctagcatttatagactttctgaaaagttcctagaattccaaaacttgacacaatgccagagactgtctgcagctggcaaaaccacacttctgctagagcactaggcaaatcatgtcagctgctgccgacactccaaagcagccccacatccccccacctggggactaaaatgataacatattcttatatttgttttttaaagaaaccagaattccagagttctcaccacgattccccacttctgttttaagtcattaattgtgctgtgtatatcaggaaattataaacagacattttcaaggaactgagtgttcaggttagtgccaaggtgttgaggagacctctcctgctcggtcctaatctttatcagttttgatggtatccacagcttttcgtttcctgtggaagtataaacaattccccatccccaatgcaaaacttttctgttctaatattaacacatctttattctatattgtaaaaaattcagtttttcctctcggcccctgctccaggaatgaccactccaagactccttattattaaatgccttggccagaagccttgcctcatccatgactggctcgtaacctattcaacccattcaaactcttctatgtcatcctcatggttacttctcctcagtcccggcttgcttcatccttctcactacctcctccttgtctcactatctcccagaatcctctcttcctgccattgtcccacctcctatttcttgcttcagctcattggccattggtggtttttattgacaagagatgctaataagagattctacagtacataggctgatgtaattccacagttttttttctaaaacccagagtatctcaactgctgctgttcctttctcattaatattcagaaaatttaaagttagcagagagtaattgtctctttttttctctttgctttataagcatttcctttaggtaaaatgagatctttctacaactgcctgtcctgtaggattgcatgaatattaatctgagcactgcacagttgtagaagagcccttccccatagactgatgggtcggtcagagtccttccccatagactgatgggtcggtcagagcccttccccatagactgatgggtagatcagccacatcaggtcttagctttcctgttagaccttctggtcccacacatttcacccattgcacactttgttttatctgagataaatttccgattcctagaaactgtataaaccttccaaagtggccattctgaattccaagatttttttgtgaactgatagttacatcagcgcctgtatccacaaatttgtctacttcagtaccttttatgtgaaattttaatatttgcctctgatcattaacaactgtttgccggaacacatgcttttcagtcctttcagaccctcctgttctctctactggagcagctttgtctctgggacagggaaacagtagcagccgaacaagcctctatcacctgcattaatttgcatctctctccctctccctcacacacacacatgccataactttaatttctcctttgaaatcttcatgtatgattcctgggtgcacagtgaatccttggggaatcaatccatctattctcaagatcatcccactgtctctgcaggcaaaggagcacgaactctctcgaagttttggatatagagtaatgcttttctgtggccgagtctagagcagcactgcctgcagaggtgttagatctccagtgctgagtgcaggttttagtctgcgtgttatggcttgactggaacagctcacagtctttgcttggtggggagctaagctaggcccccaaggctgtttccttgaatatctcttttggatctgcattccggaatccagtggctgcctttgccaaagtgcatacacattgcaggaagcctacgagtcctgtttcagattcaggaaaaccattgcctctagaaatgactgattcactcttctgctgcaaagtactgtctttctcccagttaacgcactgggtgggtattttgaggtcagagatttttagctctagcttggcctgttctattagcgtggtacacattagaaccaatatcgatcacatcccttatccattctgccatagacgcttgctcgagcctttaacgtttcgataacttttttgcatttggttattcgccttttcaacaactaaggcctctatcaacacctgccttcatcttgatctggtacggcttccttcacagctgagactaatctttgtaatcagtgaaggcttctcagaagccctgtataatctttataaatgaggtggtctttttcctgggcccctcaaatttgtcccaagttttaaagccaccaagcaacattgttcagtagtaatattatgtgattgaacctgttcttgtatatcagagccctgcccttcacccagcaatggtggagctgatgggattcggctcagagagctgccgctggagctgctgcttgtggtgctaaggactagagaatgatgggaaaatcctacactgagtggctgaagcaaggcaagctccaacaactttgttttctccttcagctcgtttgtacccaaaagtggtcaccacaaaacacttttgaaaaacatgttaaaatcactacacaaactgaaattacaacaggattactgcttgcatatccttcttttggaactttgacctaactctacattcctcatctgtctttctctccacaagttcactgccaccccaaagcaataattctcttgtcatagactaacaaagcttaagcagaccaagtagagagtagtatgtttctcccagtgcttagatggtgacaatcttgtttgctaaggaacaggtcatctgtcttgcatcttgtttttgaagtcttggtcagctagactggctagtcctctctctctgttcttacatacacagtgaagtcccctgctcttcgttcatgaccttccttctcatggtgcacacagaaaccagtgccacacctctggatcacaagatcaaggaacttagacccaacctggaatgaatgtcttgtttgataattaacttgtccccagcctgtttttcttgctcctacaatcgcgcgcttgcaacgctgagggctcactggcgccctcacctgtgccagtctatgagaaagggccacactctgttctcgattcgaactttgaactttctatcaaatactcttaacttccccaaaattttaaattaaactaacttccccaaactactttaaattgggaattccataaaatcattaattcatgtaagcagcattatctcaggaatgttcatcttcaggttgatcttcaggaaacttgccccacagagtgggctaccacccagaagtggtcactccaggctacggaggcagtgagtgtctcactatgtcaagtacatgagggatatagcagtgacaaacatgagaaggcacagcagtagcaagaagcatccctgggacgaagcccctagggctggacatctccagggcacacccacccatcacagccaagcagagctgcaggctccagggcacacccacccatcacagccaagcagagctgcaggctccagggcacacccacccatcactgccaagcagagctgcaggctccagggcacacccacccatcactgccaagcagagctgcaggctccagggcacacccacccatcacagccaagcagagctgcaggctggctccaggaagctcacttgcccactgcagctccccctgcatggcgttcaccgtcccttggaggaaagaatcccactcggagctcctcactgtgccacagctaaggcggccgctgatgctcccaggagagggactggatggctatgttctgacgtgacaagttgagggactgagaatccttaagctcccatgctcacctgtattgatctccattcaccgtaaacagaaaaacacgtccagaggccaaatagaggcaaactttctactgtagataaaaatgactcttggtatctgcctccaacagccttggtttttcaaggcagggtctcactgtgtagagcaagctagccttgaccttgctgtaactttcttgcctcccagccgctgggtcaagcatgcacaaccatacctggctttgcccttggtctctcttaggcggactcagttcttcttcagtacctttttctttgtggccagaaaggagaattcgtgaagtaatgcggtttggagtgcatgagaggaatgccgtcttctcattcacaggcataaattgtcttaggttctgtgctcagtgggaatggattggtttgcgcgcgggggagcgggggggggggcccgaagagaagaggaacagcgtcccccactccagagctaacccaccctgaggatcagaggatagagttttccactaagcggggtttcctgagcaacagggaggccctccatccctcacacccacaaaccttttctaagcccagaagcagtcttgacgtggacatcgctttcagggtttatgggtgacttcagcgtgcatggtttcacttgtgcaacagtgcgaggcaccagcctgagtgtgcaacctctccttttgtgaaagaaaccaaaattcttcctgtgtctcctcctctctggtctctgtgtgttgattggttagaagtggctgatggtgtcccttggagagcagagcaaccttcccatggaaggggacactttgaggtgctggtgtgtctccctcattttctatgttcttctctctagtaggtctcaagtagagacagatatttttgttttagagattccaaagtctatatttttagtgtaagaaatgtaccctctccacacttcatgtcgtaaatagaactgggaataagatgtgcaattgtgatcaccctgtaacaatgtatggtagacatgaggccccggggcaggtgacttggtgtgtctctgagccctcctctctgcctgcccacacacatgtgtgctcagctctttgagtgacaaataaagcccatgttataaactgattgcttctgtgctggttttcccatctgagttcagattgtgtggagaagaatcgtgaacatgggcaaaacagggtgggtgtctgctgaggaagtgcagaaaggctcttagctccttcgaacctggctggaacctggctggcgcagtcctgagcagagtccctgctgagtcgtggcacaggctcagcagaaaagtaaagtgaccatttcgaagatactcctggactgtggagaccatttgccaatatccaagcactacccattgcctcaaatcacagatgttagaatctggcccttggaagctgcttctggaagagtcggggtgtacttgattactttaactcttaaacttcaccgttcaagggtcagcaactgagtaagaacagagctactgaggggatgaaagaaaagggtacgcgcagagccaggcaggcctcctgaccagaagcatcctgagcccagtggcccagggcggacattgagagaagcaagagagcgagcgagcgtcaggtgaactgggcctgccttgggctggttttctaacccctcagcagtgtgcgcatgccctctgcctcacagggagacagactgcgtctggttttgagtacaggggacgctgcacttgcaggatgcagccagctctgaagagcgagccatgcaaggctccggacactggtgctcccgagggcagggcagcatccttgccacgcccagggttaggagtctcttgataaaatgtccttgggaagcacctggctcacagtgtagtagtagctcacacaagacaagcgttcctggggagatggtcagtttctgtgctgtctcccctttttagcctcaccattccaagatggctcccgaaactctagtgtaagttaaattagccaagataactttcacgtgcaggagtggtggcaatgtctccctcttgccctctcttaccaccccctccatctttcatctaaatagtggggagagtctcagaagcagcctccataccctgagtcagacctgggtcacacacccatctcctgagatggaaaagaaggacagatggtcacggcccattaggcttcgtcctctggaacaggaactcacttccctggtcacaccctaacacccgtgcagaatcagagttctgagtaaaggctaagtgagcccaggggatgctgacccgcggagcctcctgcagacctggaccccctgaagagaacggcaggagctccctgtgccaaggtcaggttgcccccccccccccccgagattcctcttctcccaagatccactcgatgctccccctcaaacaaacagaagctccagagggtgcacggagagggagtgcacgggtggagcgcgcgcgcgcgcacaggtaccgtgtgcacgcacaggtgcggctctcctcagacactgcagatgcaggcaggcttgcaggcaggcgggcggggctgagcatcagctgctggagcgcctcacttgccaggcctcccctccagctagcacgttcccacccggttctagaacgctcccctgcacgtgagctcttgcccaggctctctcagcttcgccacctccagattcatccagcttcagcccccacagctcccggctttgccttctctgcgcttccaaaccctgatcctcaagcctgcagtgagtcctgctcgtcttcgtaggccacagtacagggagggccctgacaactcaggggccagggaagaggggagtactggggccgggaggggggggggagaagaagagtgtggtgaggcagtaaagtctaaagtccatggctacggggctggaaacttgcttcaacagttaggagcagtggctgctctccctggaacccacatggcagctcacagcgatctgtaactgcagtctcaggacatccgaagcctacccctgtcccccacaggcacacaagaggtgcacagacatacacccaagcacaacacccatacacataaaataaaaaattaaactgaaaaagaaaacaaaagactgtgaaggactctggttgtcagtttctctcaggaaacaagagcccagagacaccgcactgctgtgttgggttgccttagtcaaaggctttctccagattccaactgggacataaacgtaacatttccatttgcttgggtatagctttaggggcacagatgcacctgcttgcagaatgccgcactgcacacaatcccactacacttacttcagaggttcagtccattatcatcatggaggaagcatggcaccacgcaggcagacatagcgctggagaaggagtgttggcagcacgtgcagtgggagctgcagatgaggagaatgttgctcctggagatgctcgtgtagctgagtagcagagccaagctgggttctgtccagatggatgcgatgctgccaggtctgtgttcccaacttcggttctcttcagactccacaagatccatgtcctgggttttgtggggtttttgtttgtttgcttgcttgcttcagtttgacacaagctagaattatctggaaagtgggatttaaattgagaaaaatgcctccatcagattgcctgcctgaaggacatttttctttttttctattttagatttgttttatttatttatatgagtacactgtagctgtttccagacacaccagaagagggcatcagatcttattacagatggttgtgaaccaccatgtggttgctgggaattgaactcaggacttttggaagagcagtgagtgctcttaaccactaagccatctctccaatgccccccttttcttttgtaatctattttttatttttaaaaaatcttttcataaaatattttgctcatgccgggcgtggtggtgcacacctcacacctttaatcccagcacttgggaggcagaggcaggcggatttctgagttcgaggccagcctggtctacag

SEQ ID NO: 461 - DNA, 4667 bp, Mus musculus
tgatggttgaccgatccttggatccagggtaggggtcgctgcgcgtgcgatcgtctcacactggactacagggcgcggactgctgcagctcaacctggaacctaccggcgagaccaggctccgcccggccatgcccgccgggagcaacgagccggacggcgtcctcagctatcagaggccagatgaggaagctgtggtggatcagggtgggaccagcacaattctcaacattcactatgagaaagaagagttggaaggtcatagaactctgtatgtgggggttcggatgccgctggggaggcagagccatcggcaccaccgcactcatggccagaagcaccggagacgaggagggcggggcaaaggagccagccagggcgaggagggcttggaagccttggcccacgacaccccgtctcagcgtgttcagttcattcttggcactgaggaagatgaagaacatgtgcctcatgagctcttcacagagctggacgagatctgtatgaaagagggggaagatgctgagtggaaggagacggccaggtggctgaagtttgaagaggatgtggaggacgggggagagcgctggagcaagccttacgtggccacgctctctctgcacagcctgtttgagctgaggagctgcctcatcaacggctctgtgcttctggacatgcgtgcaagtagcatagaggagatctcagacctgatcctggaccagcaggagctgctccgagacctgagcgacagcgtgcgggttaaagtgcgggaagccctgctgaagaagcaccaccaccagaacgagaggaggaggaacaacctcatccccatcgtccgctccttcgctgaggttggcaagaagcagtctgacccgcactccatggacagagatgggcaaacggtgtctcctcagtcagctacaaaccttgaagtgaagaatggtgtgaactgtgagcacagccctgtggatctaagcaaggtggatcttcacttcatgaaaaaaattcccacgggggcagaggcctccaatgtcctggtgggagaggtggatacgctggaccggcccatcgtggccttcgtgaggctctccccggctgtgctgctctctggcctgacggaagtgcccatcccaacgaggtttttgtttatcttactgggcccagtgggaaaagggcagcagtaccatgagattggcaggtccatggccaccatcatgacggacgagatttttcatgatgtggcatataaagcaaaggaacgcgatgacctcctggcagggattgacgagttcctggaccaggtgacggtgcttccgccaggggagtgggacccatctattagaattgagccacccaagaatgtcccttcccaggaaaaaaggaaaatgcccggtgttccaaacggaaacgtttgccacatagaaccagagccacatggggggcacagtgggccagaactggagcggactgggcggctgtttgggggcttggtgctggatgtcaagcggaaggctccctggtactggagtgactaccgggatgctctcagcttacagtgtctggcctccttcctgttcctgtactgtgcctgcatgtcgcccgttatcaccttcgggggactgctgggagaagccactgaaggacgcataagtgcgattgagtcgttgtttggagcgtccatgacggggattgcctactctctgtttgctgggcagcctctcaccatcctgggaagcacggggcccgtgctggtgtttgaaaagattttgttcaaattctgcaaggactatgccctttcgtacctgtccctgcgggctctcatcgggctgtggactgccttcctgtgcatcgtcctggtggccacggatgccagctccctcgtctgctacattacccgcttcaccgaggaagcgtttgcctccctgatttgtatcatcttcatctatgaagccatagaaaagctgatccacctggcagagacctaccccatccacatgcacagccagctggaccacctgagcctctattactgcaggtgtgtgctcccggagaatccaaacaaccacaccttacagtattggaaggaccacaacatcctggctgccgaagtgaactgggcaaacctgacagtcagcgaatgccaggagatgcacggggagttcatgggatctgcctgcggtcaccacggaccctacacgcccgacgtgctcttttggtcctgcattctgttcttcgccaccttcatcgtctccagcaccttaaagacatttaagacaagccgctacttcccaaccagggtccgctccatggtgagtgacttcgccgtgttcctcaccatcttcaccatggtggtccttgactttctgattggcgtcccgtcgccaaagcttcaggttcccaatgtgttcaagccaacaagggacgatcgaggatggtttattaatcccattggccccaatccctggtggactgtgatagccgcaattatcccagctctcctgtgcactatcctgatattcatggaccagcagatcaccgctgtcatcattaacaggaaggaacacaagctcaagaaaggctgtggctaccacctggacctgctcatggtggccgtcatgctgggagtttgctccatcatgggcctgccttggtttgtggccgcgaccgtcctgtccattacccatgtgaacagcctcaagctggaatccgaatgctctgcccccggggagcagcccaagttcttgggcatccgggaacagagagtcacagggcttatgatcttcgtgctgatgggctgctcagtcttcatgacagctgtcttaaagtttatcccgatgccagtgctctacggagttttcctctacatgggagtctcttcgctacaaggaatccagttcttcgaccgtctgaagcttttcgggatgcctgcaaaacaccagccagacttcatctacctgcggcacgtgccgctgcgcaaggtgcacctgttcacgctagtgcagctcacctgcctcgtcctgctctgggtcatcaaggcatcgccggccgccattgttttcccaatgatggtgctggccttggtcttcgtcaggaaagtcatggatctctgcttctccaagcgtgagctaagctggctggacgacctcatgcctgagagcaaaaagaagaagctggacgatgcgaagaagaaggaggaggaggaggccgagaagatgttggacattgggggtgacaagtttcccctggaaagcaggaagctgctaagtagtcctggcaagagcagcagcttcagatgtgacccttctgagattaatatatcagatgaaatgcctaaaaccacggtctggaaggctctcagcataaattctggaaatacaaaagaaaaaagccccttcaactgagagtctctgctgagtggaagatttggaccatgaggtgcctcggagaagttctgggttttaacaaaatggcgagtctctccggaaagaagccgagctgagtctggccccgttcttggtcatctcaaagccatgccacatggaagcattcagtcactcccggtgtgcgtttggaggacatccagctacccacataccagcagccaggcgccagtcgggtcatggtggggccgcctcccgctgcctcctttcctcttccttctctctcttcagagctgccatcattaaagagccagcttccattttcagacattttctctgatactctgctggcctgtaagccacacgagtccattctgtcacagaggattccctcttccgaacgatagcctggggtagtggcagaggcaggacaagggcaggctctccagcagcctgtgccttggtttcctttctgcctgggaaggggatgttggacaggcagacacagtagcaggtctgctgcctgagctccaccatccaggcatcaacagcaaccaccacagtgagctgcctctggcctggggtcatctgcatcacctccagaagcagtgggcataacgttgtgagtccttggaagatgcggggacagcatgagagcaggagtttagctgatgtcaggaaaggcctaggggaagccagcagcgctcggagtgtgagcatctttccctggaacgagagaaagaggagcctaacttgctatggaagcacttaggtttccaggcctggagatctgttccaggtctgtttttttaagtctaggaaagtcttgctgacagctgtttgtaggaaggaaggtggatcggggctgctgcggctgctctgtgtgaactgtttgacttgatgctgctacctctcgtggtgacattgttataacaccctggagagacccgagtgctcatggatgtcccttagctgccttagtcgggagaaccatcatcatccactcggtggacccaaaccgccatcagccatgtgacttcctaatcatgggtttcttttggttgacaagttctggctcaggtgtaaaagccacacgaagaaatgagctgtaagcggtggcatcactttggatacttagtttaaaagtatatgtgtgattttctatgttccaaaactatcatgagttttttggcccgagcaagtgtagacctccccttcctttgtgcccagactgtgactagtgagctgggacagtctctgtccagagaccacacacacacagtgagct

SEQ ID NO: 462 - protein, 1081 aa, Mus musculus
MPAGSNEPDGVLSYQRPDEEAVVDQGGTSTILNIHYEKEELEGHRTLYVGVRMPLGRQSHRHHRTHGQKHRRRGGRGKGASQGEEGLEAHDTPSQRVQFILGTEEDEEHVFLFTELDEICMKEGEDAEWKETARWLKFEEDVEDGGERWSKPYVATLSLHSLFELRSCLINGSVLLDMRASSIEEISDLILDQQELLRDLSDSVRVKVREALLKKHHHQNERRRNNLIPIVRSFAEVGKKQSDPHSMDRDGQTVSPQSATNLEVKNGVNCEHSPVDLSKVDLHFMKKIPTGAENVLVGEVDTLDRPIVAFVRLSPAVLLSGLTEVPIPTRFLFILLGPVGKGQQYHEIGRSMATIMTDEIFHDVAYKAKERDDLLAGIDEFLDQVTVLPPGEWDPSIRIEPPKNVPSQEKRKMPGVPNGNVCHIEPEPHGGHSGPELERTGRLFGGLVLDVKRKAPWYWSDYRDALSLQCLASFLFLYCACMSPVITFGGLLGEATEGRISAIESLFGASMTGIAYSLFAGQPLTILGSTGPVLVFEKILFKFCKDYALSYLSLRALIGLWTAFLCIVLVATDASSLVCYITRFTEEAFASLICIIFIYEAIEKLIHLAETYPIHMHSQLDHLSLYYCRCVLPENPNNHTLQYWKDHNILAAEVNWANLTVSECQEMHGEFMGSACGHHGPYTPDVLFWSCILFFATFIVSSTLKTFKTSRYFPTRVRSMVSDFAVFLTIFTMVVLDFLIGVPSPKLQVPNVFKPTRDDRGWFINPIGPNPWWTVIAAIIPALLCTILIFMDQQITAVIINRKEHKLKKGCGYHLDLLMVAVMLGVCSIMGLPWFVAATVLSITHVNSLKLESECSAPGEQPKFLGIREQRVTGLMIFVLMGCSVFMTAVLKFIPMPVLYGVFLYMGVSSLQGIQFFDRLKLFGMPAKHQPDFIYLRHVPLRKVHLFTLVQLTCLVLLWVIKDAAIVFPMMVLALVFVRKVMDLCFSKRELSWLDDLMPESKKKKLDDAKKKEEEEAEKMLDIGGDKFPLESRKLLSSPGKSSSFRCDPSEINISDEMPKTTVWKALSINSGNTKEKSPFN

SEQ ID NO: 463 - DNA, 126488 bp, Homo sapiens
  misc_feature (1)...(126488): n = A,T,C or G
gcgttcaccaggctccacccccaggcatgtggatccatgccctagaggatgaatgcttgcagaactttctgtgcagagttctggacacataagctcactggttaagcactagacatcaatggcaagggacctgggcacaaattccagttcttcctcttctagtagtagcacctacctcctagggttgttacaaggattatgctccttccccacaaaattcatggacaaagcttagcagtctctgcacatggtaagttcccacaaagtgttagttttgatcattagcagctgtgtgacccttgggtaatttacttaatccctctaagcctcaatttcctcatctataaagtgggggcaactaatacctaactcacagggttgtggggaggattaaatcagataatgtaggtaaaatgtttggcagagcacctgtcacactaagccctcaataaatggtatcaactatttctattattatgataaatccctgcttcacttcccagcagttatcctcaagcacctggcccttggccaaagccacgttcattactccctgcatgttttgcttaaaaataactctggttgtactatttaatgctattgtttaaacgcacaagctcctgcctgtggagaggcctggtgtctgagaccttgggagtatgtggccatcgtgatctcaagtggggagctggattcattctggactggggtacaaatgtggcttcttttataacatcagattcagcagcaccgtcaaaaatcaaacaaaagaaatctctttgagcatctattttgtattaactattgtctaggagataggagagatttgtttattccaccagtatttactgaataactgcctctaccaggtactctgcaagaggcgggggacacagagaagtgcaaggccagccctcaaggatcctacagtcaattgggggcatcagattttaaacagagattaccctgtgagaagcagaatcaaagaggtacccttgagtgctgaaggagccggcatgcaggaaactcagcaaatgggggagggcaacatctgtgaagaaatctcacgggggcagaaatgggccgaacactaactggcgagtaggagtcagcgaggcgaggtgagcacatttcaggcagaaggcacagtacctgcaatggtctagaggtgggagacagaagagccagtcacagaactgtaagcagtctggtatggcaggagtagcagaaattgggcctacagaggtggctgaaaccaagtcctaagggccttgttcatcatgctgaggagcatttgcccttgacccaaggcatggggagtaataaagcgttaagctgggagcccagcattacaggaagagcaatatgacagcggtggagggtatcttggaaagggacctgcttggcagctggatgacccattcggagtctgacccaggagagttagtagcagtgtggatggaagagggagggtatggtgcctaggaagacccccttgggtgatggggtgggacagtttaccccgtctggtacacagagggacacaaaggctcaattcctttccccaagggatttgaaaatcttattggagaacgagaactgatagcactgaccaggtgaaggaagcacctgaccaggggagattcaggagcaggaaaaggacctttcactgaatactcttttgtactttgaaccctgactatattacttattcaaaaatgaataaaattaaagcagaatagcacagacagtaagagctaagctgagagaggtagagttccctgtgggtttgaggaaggcttcggggaggaaatggggattcagtgtagcaggagtttcttgtcacagaggttgagctatgctggggctagcacagggggatttgcttgagctagacacctcatcagttctggaactgtcccggctaagcccacacagaggcctgcagaatgggggagtgtttgccatgacagctttgaaccgtcctgcaggcttcgtcttccctgctactttccatctaccttcccactccagcaagaaagagggagcacagttagaaacaaaggcatggtaagattgtagttactaactgttgccagtgctcaagactcaccccctccaggaaggcctcctgactgattcactcagaatcacctaggttactccaactctttcatcctggcactgcctcgtggtccctcacagcagggcctgtttttgcttcttttattttccctggagaaagaaatatagggttaaattgagctcttcctaggcatctaatctctcaatcccatctggctgcctgaagctttctctctcaaacctacagttcctcaaggtactaaccacatcctgaaccgaaatgagacacctgggattagccttggtggtgaggcactcattctctagtttgtttgcttagcatgagggcaacaggaagagtcccttagaagagacacagaatctagtgcaagccacaggactttggggttaaggatttttgctccctgtgtaggagatgattcccagaagtatggttagcaaggtcgtggaggtcgcccctccaccagccttggagaaagaatagctgctattctttgctattgtttcaagtacaaagcttcacgagatccgcccctggtgtcttgtatatctccctcacctttgggctcccacacctggcctcctgctttcctggcaagtgtgcccgcagcccccatccactcatttccctctcgctgtggctcagcacttcttcccaagtctttttcctccagctacccttgggcctgcaactctttggaccatccttggctttgatcccgagatgatgccagaaatcctctctgaaaagcctgcctagattgaacaaatgggatttgcttccctggccccaccggccagaacacaaacttaccttctctcactggtgtaaggaactgaggctttacccagcccagcttgtatcaaactgctgattacaatccactgtgatattataaaataaattcagagtgttgcaaattagcattcaaaaatttctttaaaagaccagttaggaccaggcacagtggctcacacctgaaatcccagcactttgggaggccatggtgggcagatcactttaggccaggagttcaagaccaacctggccaacatggtgaaaccccttctctactaaaaatacaaaaattagccaggcatggtggcatgtgcctgtaatcccaactactcaggagacagaggcaggagagttgattgaacctaggagctggaggttgcagtaagcagaaatagcaccaccgtactccagcctgggtgacagagcaagactctgtctcaaaaaaaaaaaaaaaaaaaagaccaattagcaaaaagagaccagttagctgggtgtggtggcataggcctgtaatctcagctacttgagaggctgatgctggaggattgcttgagcccaggaggttgaggctgtagttagttatgatcatgccactgcactacaacctaggcaatagagcgagaccctgtctcaaaaaataaaaataaataaattttaaaaacccagaatagaatgaaaagaaaatatcaaagtgcatcatgtatcacatgtaacacaggcaagtattcgttttttctttctttctttttttttggagacagggtctcattctgttccttaagctggagtgcagtggtgcaatctcagctcactgcagccttgacctcctgggctcaaaggatcctcctacctcagcctctggagtagctgggaccataggtgtgtgtcatcaagaccggctaatttttattttttggtagagatgggggtctcactatgctgcccaggctggtcttcaactcctaggccgaagcaatcctcctgccttgacctcccaaagtgctgggattacaggtgtgagccatcatgtccagcctgaaaagtaaacttttattttaatgtttgtttcagtctattaaagatacacactgcctgatacaaaattaaaatgataaatttgttattcaaaattcatacaactaaagacaaaagaagtttaaatgattccattttcaaatgatagtttttatggtttgcagaatttatgcttgtaatgtgattaaattataaaactgccctaagatttttgggatgccctgtcacatatacacaggtaccgggtctcgctataaagtatatttctcactttggtcaagtcatagaagtttgaaagccagtgacacagtccaaaccccacagtttatattctagcccccctccaaaaagccttctcagatctcccagcagaattcatctcttccctgctttgcccccttagcacccgatttttatttgtactccagtctcatcacagcccaccctgtgtttatggactcctggaccagagaggccatgccatttccagctttttatcacctacaaagtctagcacaagttttacatatagcaggtgttccataaactttttttttttctcttggagacagggtctcactctgtcacccaggctgaagtgtagtggcatgaacacagctttctgcagcctcgacctcccaggctcaaacaatcctcctatctcagcctcctgagtagctgggaatacagaggtgcgtgccatcaggcctggctagttccacaaactcttgttaaatgagatgaggttggaagggttaaatgtggagcactggcttcactaaatgatgttctgaatgaacttactgcaagaaatacttgacttacaggatattctgccattacacattagcttgctgttttgactaggtctgtctgtgggtctaacaccctcattttatcaacggcgaggccagaatggttaggtgacttctctagcaacacacagctagtggctcccaggagtagaacccgatctctcaactcctagaccactactctgtttaccacactcatacccgtggaggttgagtagggaatttggggaccaggcctgtcctccctgagcctccccgactccaccctttgatccccttcctggcatttgccttcctcccactcaaggatacaaatgctttaaagatgtggagactggaagtcccaggcagccttagcttttgtgaatgtcagagtcagccatccagaacatgccctagctttccaggtggcctctttgtaacaatgtttctttctatttatcaggtgagctggtcacctccttagacgtggcagcaggaagcaagcagtccttaccacagcgatatttgctcaagttactcagaggagggctcaattacaagtttctttggaaagtgataactgtcaccactcttaccacgggcacaggtgtgtggagctagacatcatattggggagggggcaggttaatttcacactactgttgggggaaatggggctgagaggctgtttggccaaatgaccgtcctttcttcctcataagcactttctctccatcaaacacagcactcatctcaagtcctctgtactcatactgtgaacagaagagcaaattatcttctccaaagccctcctcccacccctgacccttttgatcacagaatgtgggaggtttttatttttccccgtaattacaccttcaagacacttcagcttttctccaagactcaagctgcaatactgtggcttattttcccaggaagatacgctgaaaattatttctgtagctagtctgtcaagttcccccaacatatcaaggttcattttatgtttgcataatttttttttttttgagatggagtctcattctgttgcccatactggagtgcagtggcgggatctcggctcactgcaacctccgactcctgggttcaagcgattctcatccctcagcctcccgggtagctgggattacaggcgcccgccaccacgtccggctaatttttgtatttttttagtagagacagtgtttcgccatgttggccaggctagtcttgaactcctgacctcaagtgatctgtctgcctcggcctcccaaagtactaggattacaggtgtgagccaatgcatccagcctgtttgcatgatattttaagcttaaattacccaaacatggattttctattgaaaaactcaacccaactttgctcaccactgtatacctagagcagcgcttggcatgtggtaggcacttggttaatatttgttgacttattccaagaaaaagtcaccaaaaatcaaaataatatgccaccaaacaggaggttcaacagttcacaggtttttcactggagaccctgtaggcccttccaggtggggcaggggtgtgcaacggtttatccctaggagtgcagaagtggagggagggttccaggtggagatgaggtgggattctctaatcacctagaagccttggtgacaacgagactgggcttgagggggagagttgggggaaaggacagagaagggacagggaagtgatgagaagggtggaagacaggaggggtattcccgaaggcctcttgggccagtcttcaaattgggaagggggcttaatgggagagactagaattgaatttttccttttctcctcatcccccagtctgctcttggctgcagaactttcacccggggccactggctactcaatgtaccatcccctgggctcagggtctgtgcccagcctcctctgctagccagcctgcccaatttccccattgctgccagaagcattgaagtccgtgaaacaagccagcccctgtcccactctcagacaggtcgtttttaatcctgtctcaatttcaggttcaccccacacccgctcccaagtcctgctgattcattccctgcctccgggttcctcactgtcctttctgctttcaaaaccttcatttgaaattgggcctttatcaactagcatctggaggatcagcaggagctgcctgccagcctcctttgcctcgggcccctctctctctttcacaatcaggacagccgtattcatattccttgagcactgtttgactgtggcagaaacacagaggggctggccgggttgcttcctgtttgctgctcaccctcaagcccaaccagatgcttggcactcactggctatcttttcttcctcaaagcctttcccttatattcttgctaagcaagccatatttcttttctttcaaattcttaccagagactcccctctttcaagaaggcttcctagactaaggtgcatcttgctgcctcagtttctaggtgttatttgttcccaagtttctctactacccgtgctttccttacgtgggatttccccactaactatcatggagaagggagaaccaacaggcctagacggtagaccacctagatcctatttccttctccttcccaatccttgagtcttggtccccaaacttctgtctccagaatgttcttcctgaccaatctacctggccttccaatccctgtcgcatctctctgccttgagatgtatggcaatgctattttgctagtctgttcttcattctctattacgtgcagagttgaggactgggttgctttcttccttcaaatctctacctaggccttaggaccaagttgttcagggtacgagagaataagctgaccccacagggctgtcaggtgccacaaaagtcttctaacagtccttctcctccctggagtgagctcacccttgttcaccacacaggccttttacacagcacaattacaacattgagctcgacacagagacaggcactgccctgcacttaacctcctgcttattcaaatcctcactctcgttcctatcaaatgagaatgaacatttgggctttcccagaaaggggcagaggactgtgtaaagagctgagttcacccaagctacggcatggacacacccaacctggtcttcagcatcccttccagggctgagatgtcggaacacatccgtgggagccagaaaatgttaagaagaataccatcaccattttaaatattactgcttaccatatcaaatcaagttacagttatcttctctgttttacacagaaggaaactgaagcacagggaggtcaagtaacttgaccaaggtcacacagctagaaatgtggcagaggcagaatttgcattcaggcctatgtatctccaaagcccactctcttaactatgacatcacattgtcttgcatttgactggtgcttggagctttgccaaaacacttcatatacaccttctcatttgctccccacccagggagtgtttatgtgttttggctaagattatatatcgaagttagtgacagggctgagtcagctgcctgccttcatgatactcactgcctccctgcactgagaggccctcagccctagggttagctgcccctcctggtcctgaggtctgttcgaggcaatggttgcatggactaagttcatgctcatatttcctgtccccacttcttccagctgaacttgggcaaatatgtttctgacctcacagggcacctgacacacatcagggcctccccttctctgccctgagttcttccatgctgctacaggtaggagtcagctgttccacccactgtaggactgtgggcagcattactgaggtgaggtcatcttgagcagcccagtctcctgcacacttccctctttcttttgagggtcttgtcctgttctctgccctggtgcccctggaagcaactttctctgattacctctgggttcctaaagtgcatggcaccattaaggaactggagctagggaaatgcctgcaatgctactggctcctgctaggcaattggaatcaaagcatatttctttctttctttctttctttttttttttttttttttttttgagacagagttttgctcttattgcccaggctggaatgcaatggtgcgatctcagctcactgcaacctctgcttcccaggttcaaacaattctcctgcctcagcctcccaagtagctggaattacaggcgcctgccaccatgcccggctaactttttgtattttttgtggagatggggttttgccatgttggccaggctggtctcgaactcctgatctcaggtgatgcaccagcctcagcctcccaaagtgctgggattacaggcatgagccaccacatgtggccggaaccaaagcatatttcaaacccctcacctgacctggttttcatcatcacatgaatttccctgtctcatccttcttaacctttcctttgatgggaagggagacagctcatctgtctggagcggagaatagggcctgtgtggtgcacacacatctctggtagaaggcgcaaaagtcctcgaggctctttggtgtgtccagaactatgaacctcacccagtgcctgtaaattgtgtgtgtgggcctgggggcgagctcagagcacagagttaacatcctttctgagagtgctgcaatgggttgtcggctgctagaaggggtctgctgtaagctttgtgggcaaactgaccaccctccacccccatacacagaagagccccatcctaccctctgcagacgtctgggtctgcgatgattggccctggatgcaagtaaaagctgtttctcctttttgtcagcctgggaatctgaacaactgaggaaatagggaagtcggtgacagtcacagtcatgaacacccagcagattccatttccccacagcaggaggcagatcccttcccacccccaaaagcccccaggctctggagggaattcaaccaagcagggctcagaccgacctccaccagcgaggcttctccttgctgtccccttctgctcaggcgcaacgtggcagggcaggaggaaacctctctgcaagagttgccgtaccagagcacatggggtggcccgatctggggagacggggcacagaaggaatgcagggcatgggtgggtgaggggaagagggtgtggagccctggctctggcttgtccccctctcacccctccaagttccagaggtctgggctcctcattcatctcgtaagcgccaaggtggaggggggtcctaccgagggaggagctacaggccaccgcgaccagcagagagcgaaggcaggagggaccagcctggcccagccccttcattttactgtcgggggtagtgaggaggaagaggaagaggcgaaggctggcggaggaggaggtgagagcgaggactcggcagaagcgagatccgccgaagggaagtccgagcagtcggggagctcaggggggccctcccggggagagggtcgcgggctccttctgccgcttacctgtcgcgccgaggcaaagccgcagccgcgccgcggggtggctcccgggtttccccaccggacggccgggagggtgggaccggggcgggacctcccccagctgcactaacgcgcccgccccgcccctccctggccaggtgcagcgggtcccgccgtgtcctcagcctgctgcgggcccgggaactcccggcggaccggcagaggggcgccccggcttctctgcgtctcagcccgccccgggggtgcggtctttgcggccaggctttcagcgcggaaaaagattggagggtcctagtcaccccaaagaggacaggcattagcagagccgcgggcggcgggtgcatggaaccggaatgtgctgcgcgccagcctggagcgctcggagcccggaggcctgccccggagggggaaacgcggcggggcggccatgggccccggggtcctgccccaggtttgcttctcatttgtgctccatccaacaagagctcgtattccgtgtgccatgaactgtgtcaagggctccaagtgccaggtatcaggtgaatcccagccccagcaaactttaaacctactatgattattccgaatgtaccggggaggcagctgctcacacagcagagggtgtttctcaaagtgggatcccccaccagcagcgccagtcagaatcacctgagaacttattagaaattttggccgggcgcggtggttcatgcctgtaatcccagtactttgggaggccgaggcgggcggatcacaaggttaggaattcgagaccagcctggccaacatggtgaaaccccgtctctactaaaaatacaagaaattagctgggcgtagtggcgggcgtctgtaatcccagctactcgggaggctgaggccggagaatcgcttgaactcgggagggggaggttgcagtgagccgagatcacgccactgcactccagcctggcgacagagcgagattccgtatcaaaaaaaaaaaaaaagaaaaaaagaaaagaaaagaaaagaaatgggccccaccgcagacctaaatattccgaaactcgggttgggcccggcgacttgtgttttaaaagccctccgggtgattttgtgcatgctcgaccttgagaaccctgaacaattagtggcagggctggaatgagaatcctggtaaacccgcctcctaagccggtgttcggaattaccccgccagggcccgtgctgctcagtggtcctctccggcgctgcctcgtgtgctgcaatcttttggggccttagcaacagagaaggagcgcgcatgactccaaatagccaataatttgaaaactttctatggtagaaacttctaccactagttcagtttctcttttgttttgatatttaaataaatttgtctttctttctttctgttttcttcctctttctgctgccccgcctccctccttttttcttttttctttctttcttactctctctgtctctcctttctctctctctctttccttctttctctttctttccttctttttctctttctttctctctttcttttcttttcttgctctactgcccaggctggagtgcagtggagctatcacggctcactgcagccttgacctccgggtctcaagctgttctcctgcttcagcctccacagatgcatgccaccatgcccagctaacttttttttgtagagagggagtttcgccatgttgcccaggttggtttcaaactcctgggctcaagccatcctgttgcctcggcctcgcaaagtgatgggattagaggcatgagccaccgagtccagccatgaatttgtatttctaagaccctaagacctgggagcaggagcatgagtgagtagatcctagcaagaagttctgacacgcactgggaaaggcagggaagccagccgggtgttaacaggtgaatgaagaaagtaatctttttttctaacctgagactccaaggtaggtttgatctattcagaaggtgagatgttctttgatggagtcaggagagaaggccagcagagtgtggagaagaagagttgcccagctacacatgatcagagtgacgtgaaggatggacattctcccaggagtagaaaggggttcatctgctcactcttggcatgatgcccgactcccctaactctaagcagccttccaccaactcccttcctttcacattccaggccgtgggctttaagctcctagagagactttctacagagcttccttgagcatcccttagcccatctgtagaccctctggactctgattccacctcactgccccagctgcttctattcttgtcatgtgccttacttgacagctgtctttctcagaatgagggcacttcctgtggaagattgtgggatgctgcccctcatgtctctcttcttggggctgaacactccctgtacaggtcggacctaccgtctttgctctgtccttcctccacctctgccctttgaccctcaggggttgtgtgatcctgacgtgagtcttgcaccttagtcaggacccaacctaacctgaggtgaatggcccctattccttcccaggacagggtcatggccattacccccagcctggtgctcctgagagggccgggcccagcttcccaagaagtagcagcagtctgcgttgtgtgtttcgcattccggaagcaaattactcatctgattttacttcagctgacgctgattttaaatgtgacttggaatcctcagaataattagctgcctaatttggaggttcatgagtccgcaggatgtgtgacccacccctaatgtgtcatgcactgagctgttctctcctaacaggaaggacggtgcaggcttcctctccaccaagccaggaaggtttgcagatgagccaccacagaatagtgactgcaatttctgcctccgctggtacaggcaactttcgaaaaatggttttttaggctgggagtggtggctcatgcctgtaatcccagcactttgggaggctgaggtgggagatcacttgaagccgggactttgagttcagcctgatacagcgagaccctgtctctacaaaaaataaaaatacaacaggcacgggggcccacttgagggtggagggtgggaagagggagaagatcaaaaactacctagcgggtattatgcttattacctggatgacaaaatcatctgtacaccaaaccctcgcaacatgcaatttacccatgtaacaaacctggacatgtactcctgaacctaaaagtttaaaaaacatatatgatagtgaaaaaatgaaaataaaattagctgggtgtgttggcatgtgcctgtggtcccagttacttcggaggctcaggtgggaggattgcttgagcctaggagttagaggctgcggcgagctgtgactgcaatgctacattctagtctgggcaacagagcaagaccatgtctctgaaaaaaataaataaaaaaaaaacgggtttctgtaaatgaaaaagttatacgtaaatgaaatggaaaataaaaatgaaaaagttatatatgcacatggtaataagtcaggcactatgaaaatgtatacagtgaaagctccatttcccacctctctagacattgtctctatctccagaaaccttgggtccaaggtcccgtgcatattcctgactgaaagttcccataagcgcttctgcaggacatgtctagattctgttaactgcaaagacccaggatgaccccttctcaggaagtcctatgaatttcttttttttttttctcacgatcttatttttatttcttggctgttttagattcgggttttgggtgttctgagtttcacttttcacatgagtgtgcatcaagggtgttccccaccataaggcaggaaacctggaggggagcagaacagtggaagtgtgacaaaggcagctctgtgaggccgttgacaccagccctggcctttatctagtctcttccttccacacggtccctggtgaggggatacccacctctggtggggcagagtgagggagacctgcccttcagggggaggtgctggctccacttagctaggggagtgtgcaagggatgccgtgaacttgccaaggaggttagaagggaggccagctggtcaacctccctctgtcctatcactacctctcatctcacccactctcctctaccctgagggaaacaacggagtctcccactccctccctacctctttgtttcttatctgtgaagtgcagttaatgatacccggggttgttaatgaagctcaagtgagataacacatgaaagtgtgagagttgggtcttctaaattacatctgctgctctactttcctgcatattcacatttactcctcatctcattcccatgctcaggagagaaacagttaaagcgagaaatattttagggaacccaagcagagctgctcctagttctgccataatcactcatgcgctacaattcacccatttctgtgtgcctcaatttcctcatctgtaaaatggatatgttatttttatgattgggttgtaagattaaataagcaaagtgcttaacccagcatctggtacacaataagcagtcagttgaaatttggatgttagccattataatattagctgtttttcttctttccttcctccattcctcccttcaataaaatgctgttaaagtgctccatgtgttagcctctatgctaggtcaggtgtggagatacaaggataataagtcatgtctgtctcatccagacacccatagtttgtcaggggagcctgatgtaaaaatgactatgaaggagcagggctaggactagggtaaggcaagtgagggcacttctcttgagtgcaaaatttatgggggcatctaaaaactcagtaaccaagataaataatactttaatgcaatattttaaaaaatatcaaaattaatgcaaaaaatcagtgatggacaaagtatcaaaaattcaaaataaagaatcagctgggcctggtggctcatgtctgtaatcccagcactttgggaggctgaggcaagaggatcacttgagcgcaggagtttaagaccagcctgggcaacatagtgagaccccatctttatttaaaaaaaaaaaaaagactagtttccttctaagccatattgaagcctaaggaaaaaagaaaaatatataccctcatacatatttttctgtattttttgaatggttattttttcctagagcattaaagtagttgaaaaaacatttaaaacttgaaacataggtgtattaaaactcacagcattactttaaatattttatttgttccaaaatggaatttattatgattttacttcagccttagttaattttttttttttttttttttttgagacggagtctcattctgtcgcccaggctggaatgcagtcgcacgatctcagctcactgcaacctccaccttccaggttcaagcgattctcgtgcctcagcctcccgagtagctgggattacaggtgtgtgccaccacacccggctaatttttgtatttttagtagagacggggtttcaccatattggccaggctggtcttgaactcctgacctcgtgatccgcccacctcggcctcccaaagtgctgggattacaggcgtgagccaccacgcccggtctcagccttagttaattataatttatttaagatcatcacttggtcaagggaaactgtcaaacgtggcaatcttacaattcaaaatgaaataagcaaaacagttagttttgaaaatatgactaatgagtttgcttgccttaaagccaggagcttgtatttttccttttgcctcaagctccaatttggcttagcatggcattggattgggacgtggacaaagaacataaagagaacagagaggagaataagagacagggagaagggttgaaagagtcaggtgggatggggaatatattatttttcctaatgatccaaatatcacattttcaatgtgcaaaatttcagatgcacagaaaatcacaaaaaaagaagacaagttatccataattatgttacctagagataaccaatgttgctattttggtatgatatagtctgctctttttctatgcatatatgatttatatgtacatataaatttcatcaattctaaggtgcatttttaaaaatctttaacatatctgaaattggtatgtatcttaaattgatggtgttataacttagcagtgttggataatgcctgtaatcctagcactttgggaggctaagacgggaggattgcttgtgtccaggagtttgagaccagcctgggcaacatagtgagacccctgtctctataaaaagtacaaaaattagccaggcatggttgtgtgtgcctatagtcccagctactcgggaggaggctgaggtgagacccaggaggtctcaaactcctgagctcaagtgatccacccacctcagcctcccaaagtgctaggattaaatccgtgagccactgcgttctgctcgagtatccttatttttacaagtgagaattttataagcacagcagttccctgtaactgcagtctgagcccttagccactactttttgcaagtctgtctctccatttattcaagtttctagtttatgatcctcagaaaagttttctagtgttctctctcctaatctttacagctcttgttaaaatgattccttggcattttatattacctattttaggagactcttgatcagtctttcttttgtataaccgaagcctcctaatatcatacaattaataagtgttcctctcttggggttgtcaaactgtaactatggactttctacttaaatcacacaagatcatctccttaaaagcaatcaagtgcccaagatctgtcctttcacagtagagaaatttcacaactgcaatgaataaaacatccaaatgcttgtaagattttgctgtgagagctttttctgctcaaaattatgatttcttatttaatatctctctttaaaagaagaaacatatgcacatttaaccttctgaaatcttaattggatttcaatctgacagttgttttgcccaaagagaggtaataaaaggggctataaactaactccgcagagcaaacaatcctccagctaaaagcaaaacctgttatcttcccctaaaaaaagagaagtttctgtttctttctttttttctttttttgagagagagtctcgctctgtcgcgcagtctggagtgcagtggcctgatctcggctcattgcaatctctgcctcccgggttcaagcgattctcctgtctcagcctctggagtagctaggattacaggcgtgcgcaaccacgcccaactaatttttgtatttttgtagagatggggtttcaccatgttggtcaggctggtcttgaactcctgatctcaggtgatccaccttccttggcctcccaaagtgctgggattacaggcgtgagccaccacacctggctgaagtttctgttttcttagacatttgaaaaatcacaaatttcattaggattgaagtctatctgatattaatattactttggattgtaagtaaaggagaggtgatagaataactcattggtagatgagtccagatgtttaatgtcctcttaatatcctaaaatgtttgcctcattgtttattaattcccgtggaatcttatttacttattttcaataggtgatatgtgcatatggcaaaaaaaatctaaagctcaaaagtatagtgaagagggagtctccctccttctcccatctgcagtcacctagttttcctccccaaaggcagccactgttactgatttcttttgattctttctagaaacatagttcagaggagtcaccctgattttggcaagtaccttaaatagcagcttcttaattttttttttattacattgcccataatggttaaagttattttaaaagtagtcctcttactgagctctctttgtggctctgatagatttccagaggattctcttgattttctaggtagacggacatatcagcagcattcaattttggcaaagtgaaaacagttttggagtgagacctgggttgaatcctgactcttccagctgtctgatcttaaatctagcctttaaaacatgttgggccaggcgtggtggctcacgcttgtaatcccagctctttggaaggctgaggcaggcagatcacgaggtcaggagattgagatcatcttggccaacatggtgaaaccctgtctctactaaaatacaaaaaattagctgggcatggtgatgcgttcctataatcccagctacttggtaggctgaggcaggggaatcgcttgaacctgggaggtggaggttgcagtgagctgagattgcgtgactgcactccagtctggtgacagagcaacacttcgtctcaaaaaaaaaaaaaaaaaaaaccatgttggcactgtccaaaggtagcacagaggtacgaagtggtccctcctcctgggtgtggtgggtggagtgggcagaggccatgcagacccaagcactgccccttggccctctcctgggtttgttccacctggacctgcagataaatccagaggcctttgatctcaaggatttctaaccacccagagatcaggaggaaagactgcaaaggaagccctaaagtagaataaccttttctttctccatgaatggaatgtaagttatgtttgctgagggcagattaaaatagattttattgtttgaaatcaggaatttacagaaactctttgaagagctactatcatcgaagacctttaaatcccccactgtggtagtgggcaaaatagtcacgtacaattgtaatgtgtatagatgtgtataggttttctcagagttgggacccactgccaggcagggagttggtggtatttgatgctgttgtttggggaggagtggtactaagaaaaaaaaccatggttagtgaggaaaaaacaaaaaacacaaaacacactctcagttgcccatagagttatatcagtttgatgggataccctagaacacctcaggggtctgtgaatcctttaaccactcaatggaaaaggtgactggggtatagattgtctagtttgtttatatgacataacttttttccaacggtacttgagaggagtgtgaatgaactcctttatatatatatatatatatatatatatatatatatatatatatatatatatacatacatacacacaccacacacatatataaacatatatgtttatatacgtatataaacatatatgtttatatacgtatataaacatatatatgtatatacatatatatatatttttaaacagggtctcactctgttgcccaggctggagtgcagtggcaccgtcacggtgaaacgggaaaggttcccttgtccccctcacagggagtgcaacaaggggagtggctcgcttctttagggcccggctgctgaaatctctatggaacatacagatgggcaggttgtggggttcagatcccacggcagcgtctacctttggacagtgccaacatgtttttcttttgtttgtttgagacggagcgttcctctgtcgccagttagtgtttacagctcctagccccagtgggcgtgtgctaccgtgtgctcttttaattttgccgtctgtaggcggctgtgctaaccagctggattagaccctctgccttatcgcgaggttttctgtatcccgggttcttgccttggtgtaccggaaaaatcagatcatatgtgggcttggagaatgagtgcaaggttttattgattttaagtagctctcagtagataggggagccagaagggagatggagtggaaaggtggttttcccctgagttgggccgctcagcagctgggctctcctctgactgccccaggcaaactctatgtctttccgtgggccgatggcgtgccagcgtgctggcatctgccactgcatgttggtatgctcttccaccagtgtattcctctcgatgtccagctgcctgtgcgttcctctactgatctgttcctcttgacgtccagccgcttgtgtctctgcccgctcgggtctcggggtttttataggcacaggataggactgtggtgggccacggtggtcttgggaaatgcaacgtttgggcatgaaaacagaaatgcctgtcctcacctaggtccctgggcacaggcctgggggtgcagccctagccagggaccacccccttcccttcccagcacttccctgccccactcccatatcaactcttcaatgcagcctcagcctccccaggctcaagcaatcctcccacctcagccccctgagtagctgggagtacagacatgtgcaaccacacccagctaatttttctatttttttttgtagagatgggatctccctatgttgcccaggctggtctcaaacatctgagcttaagtgatcctcctccttcagcctcccaaagtgctggaattacaggcatgagccacagtgtctggccccttcgtatcttaaccaccaggagaaacagacctgaagtgatgccttgatatatgtgtgttatgcaagactagagtaagatttgacaggcatatatggttacaacagggggtgagctcagactttgaaaagatattggcttcactccctaatcatcaagacttggaatatcctgggattcagctgttgttgaagggaaaccattccaggtttgccaaacaattgagtgacttaaggggtgcaaagctagaatgcttcaagaatagagggagaagaagccctgctgtgctgatgggctctctatggtgttatcctgtcctggcatttgctaccccgataaactcacaggtgctaaatttaaaggctaaagtgaggcctggcacagtagctcacgcctgtaatctcaacactttgggaggctaaggtgcgtggatcacctgaggtcgggagtttgggaccagcctggccaacatggtgaaaccccgtccctactaaaaatgcaaaaattacctgggtgtagtggcgtgtacctgtaatcccagctacctgggagactgaggcaggagaatcttttgaacctgggaggtggaggttgcagtgagccgagaccgcgccattgcactccaacctggggtacaagagtgaaactccatctcaaaaaataaaaaatgaaagctaaagtggtcagggtagttgactcctaggcatttatttgtccctttgcaattaatctaagcaccatatggtgattccactctccttgccagtgatgggcaaagacgggtgtcttctgggggtgcttgtcacttatcctgttcttcacagcgttatcccatggccagatgctatgggagaggcatgtctcagtatgggactgggggtccctgatagaatcccccccagtgaaaggagagactctgagaatgactgcatgaagtcccccagttagctggcagttctgtagtcatgggtaagttgtttagcctgttttcatttttttttaaaggacaattatatagagtctgttgtgaaatttagattaggtaataggtataaactgctcagaacagtgctcagaacataataaatgctctatgttcaacaagaacaacagcaacaaactcagaagcactcctcgctaccgccggggagacccaggatacctaaactttactgagttggggccactcaagcctgaacagaaggatcagtggagccaacatgtgagtttcttgatatgtgcctgttactccaccagaaagcgttacttactcatttccagagtttgggcaggagccatgacagcctgttgatgagcttggctgaatcatgaaatttggcctgggtttgagggtgggcaagaatggccgcttggatcctgctcaaagttctttcgttttaggtttactcccaaagcagctgaaagcagtgcacaggatagaaatgaaacaagggtacatttaggtgggtggctgctgcttcccatggcctcttgtgtcaactcccaaagaagcacccctcagagtctgccgatgttaccattcagtgggggagaaagatgtttgccagactggagcagcagataacggcaggttcactgcctttataccccagccacatggcacccagaaggaataagaacacctattttatttaacacccggcaataattctgttaatcaagccatgtcacccaggtctaaagtctaagcattgagattcttcccatgtcagccttggggcaatcattccttatctgtacttttgccgtaggcagggcggttgctagcattgctaaaaggcatcctttctgttgggcagatgcaaagctatacattaggatgcttgcttgacaagctaagtgtgtgcaaggcacaaaagttgcacaaccacaggtggtggcagtggctgcagggccctggagttcccatttctgcttggggcctggcacagtgatctctgccttagggtagacaagggaagtaggcttcactcagggtgaagtcagacttgtgagcaaatcataagactcttccgtgtggccactgttgctgcttgctgcaacacaaaagcagacgcaaataggacatcgggagctacatgaaggggttagatggctttggaaccctgggctgcctggtgagcataaaattgtcagtctgtggaagttgactcctgaccaaatgcaagagaggctggggaggttgactatgtacaaggagaggcagagattgggatggggcagtcaagtacaaagaacctgctttttcctttagcatcttttagggaactaccttcctttgattcttagtccatgaaattcagatgaggccctcctcactccctagcgccagccaggtgaatcttaaatcttgtagccacagtgattggtttagggttaggcatgttacccaagccaggccactcagagctttctctgagacatttcttagggcaagcaaaaaagatgaactcctccccccgtcttttctcctccatccccacatgaccactgatggaatcattagatgggaagttatgtatgtttagggtggctagtgatcatctttgctattacatgaggcaggagagtcaacttgaccgtgaagccaacgctgagaaagcagagaaagataaagaatgagaggactccagtgatatcttttggactcctgggtcctgctgtatctgaagtcatttattcctagacttctcctttcttccactttctttgctttctcctcccttccctgctttctttcttcccttttcttttgtctctttttctttccttatttttttcttgttttgattgaaatttgtttgagtgtgtttttgtcactttcaaccaaaagaatctgatcaataaataatatgatgcactggattaagttattgctataagggcgtgaaaaggcttgaggtaaaagggctgtctatgttcatgaaaatccaggtctggcagggaagaagcagagagaaactgccaagaaaagcttaggaaatgatgcttctgactctccagggagcagagaaagggagttgggtggtgactcacagtggggaggtgggaacacattggattggaagggatggaccacccatccttgtgggctttattctatgagatgcccttgaaccatccagtttctaggcaggtcttggagatcttggaagaccaggaaactggaagccttccccctgggagagaaggtgatcccaagaatagagaggcaagaggctggttagtgtctggcctattccaagcgcttcaggacatactgtacctcattccctctgagcactggagaggtcaccatttctctgcttcattacaccattaggctcaagcctgttgatgttctgtgcctaaccatgtccctcatgtttgctttgaagaggttgcacccaaattccccagtgggggtctccaccattatatataaataataccgctgtaaaccccctttatgttcatctatggccattttctttctttttcttttctttgtagagacagggtcttgctatgtttcccaggctggtctcaaactcctggcctcaagcaatcctcccacctgggccttccaaagtgctgggattacaagcgtgagctaccatgcctgcagggccccgtggccattttcttaggataaacttctagaatgaaatgtaccaggtcaaaggttatgaacattattaaggttttcgattcattccaggaagaaatattatctattactagaaaagagatgtaaaaagttccagcctttgtcaactaggagagtgatgatcatcaaataccacacgtaagaggtgacttgtttttcagaaaaacagagccatgtcatgatgcctataataaattaaattaaggccataaaatagggtgtgagtgcagcagatcatgtggcattaaacaaattggactgtctggttccctggagatatataagacaaacacaccagagaggtgatgtaatggggttatcagggcatttccttgagagtatcccaacagtagcaagtgtggtggtagccacagtggcagaggcagcggtagcagcagctgtagttgcatttacttctgcgtaagtggggttaggaccagagagggaaaagagctagtctttcactctcaggaactttttgtctaatgagggagatcaccaactgcaaataaaattatcccgagggagagattttggcctggtataaataacattctaagtctattcacagttggaaaggttaatgcatttgaaagcaatgtggaagccataaagcattattgatgtggggtagagtgttaggtactagggagtcagacaagaaagacctggtccctatctgtaaggagcttccagtccctggcacagttactctagaatgtgatatgaatgtgtaacagaggggtgtgtgtaggaggcccggtggtggcatgaagaggggagtggttaacttcacctgctgcttcagaaggatttagaagaggtgacatgacctggtttgtaatgaacgagtagaagtttgccaggtaggtaagtgggagagatgcaaatagagtgaagggcatttgtgtgacgttggtggcccccacaatttggggagcaaataacatgcccctgttagtcctcataatttagtgctccaggccccacgtgcagcaatatcaggtctgtggccctctgaggcttcaccctctcccccagatccttgaggttactagtgttgaggggaacttggcgctggctggcagggctcattgcagcaggggactgcagctaatgaggaggagccaggctaggccaggcagttctccctgcagaagccgggcaacgtttgaggcctgtgaaaggaagtggatactggagtgatatcttatcctgggggtatgtcttactccatttgggctgctataacaaaatacctgagacgggataattgataaacaacagaaatctatttctcagtctggaggctaagtccaagatgagggtgctggcaggtttggtgtctggtgagggctgctctcctcttccaagatggtgccttgttgctgtgtcccggcatggagggaggcagaagggcaacctgactgacgggaggagccctcatggcctaatcatcttctaaaggcctaccactaatactgttgcattagagattaaatttcaatataaattgcttgcttgctttttcgttttttagagatgaagttttgctctgttgcccaggctggagttcagtggcacaatcatagctcgctgtagcctggaactcttaggctcaagcaatcctgcctgagcctcccaagtagctggcactacaggcatgcatcaccatacctggctaattataaaaaaaattttttttttttttggtagaaatgagacctccctatgttgccaaggctggtctgaaactcctgggctcaagtaatctgcccaccttggcctcccaaagagctggaatcataggtgtgagccaccgtgcccggcttcaacatagatttcaatataattttgaagagacacattcaaaccatagcggggtgtgtctctaaagcataggctccttgctctccaggaagtatgcccctaactgaattgctcaaaattgcctgcataaactcttggtttttccaccagaccacttccactgggtgctcagctgcctgccctggtgtgggaggtgcacacattctgaccataggcatctgtattcgttccctagggctgctataacaaagtaccacaaactgggtggctccaagcatgtttattgtctcacagtgctgaagaaatctacaaggccatgctccctgtgaggtctgtatggtaatccttccttacctcttcctggcgcctggtggctggctggcaattttttgtgttccttggcctgtgcaggcagcactccaattctccatcctcatatggtgttttccctgtcgcactgtgtcttcacatgtctggctccctataaggacaccagtcatattggattaggagcccaccctactccagtatgacctcatcttaactgattacacctgcaaggaccctatttccaaataaggttatattcttaggtactgggggctaggggttaggacttcaccatatccttttctgggggacacaattcaatctataatgggttttgtttgtttgtttttgaggcagagtctcactctgtcatccaggctggagtgcagtggcacgatcttggcttactgcaacctccgtcccctgggttcaagtgactctcatgtctcggcctccagagtagctaggattacaggcgcgtgccaccatacccagctaattttttgtatttttttttttagtagcgatggggtttctccatgctggccaggctggtctcgaactccagacctcaggtgatccacccaccttggcttccgaaagtgctgggattacagacgtgagacactgcgcccggcctataatgggttttctgagagatgtggtggtggagctttgagatggcaaagaccagtgctcccagtatttggaggtgctgctcaggggcgacagcgcaggagcatggtgttcacctctttctgcttggtgacccgaggctgcccaggagtatggctgaggggaactggggctctgctggagccacacagagtgatgttgcatctggagggaagggtggagtggagtccctgtcaagggagccattgctgggcctcttccctgctgttcctcaagaaaaggaaactgccagtgtgatgcgcactccagagcattttccttttagaacagagaaggagcggggaatgcatctgactaggtacccagtcttgtttttgtttttcagagttattctggatatttttgcttgcccattaattaaaaaaaccctgttcataattttattgtaatgtcctgaaatttaaagatgagtgaaaggagaattagcatatatatatactttttttttttgagacaggatctcactctgttgcccaggctgagtgcagtggcacaatcatgactgactgcagctttgccctccccaactcaagcaatcctcccgtctcagcctaccaagtagctgggactacaggtacacaccactacacctggctaacatctttaataaaattgagtttttcctaccagatacacagttattcaatctattcaagagtcttttgtgctactcagtagtattttaatgactttttttcttctagttcttgcacactatttgttgtttgctagatcttttctctttgcttgctaatataacaggaatcttttctctcatcttgttatctaatcagttgtgctttgtgttataggaaagctgttgatttttgcataatattcttttgcctagtcactcgcttctctgaattttcttactatttgcagttgttttcagttgattctgttaggttttctaggtttacaataatataatttaatctctttctttttgatatttttaaagagatggggtcttgctgtgtttcccaggcaggagcacagtggctattcataggtgcaatcatagtgcactgcagccttgaactcctggactcaagggatcctcctgcctcagcctccctagtagctgggactataggtgtgcaccactgcacccctgatttttatacattttatttttttctgttgtcaagttccatttgtaaccaaatgtaagtctggctgctcgctgcctgagaagccaaatactcatgaggcgaggtgtggtgaagcaccagcagttgaagaaatggctaggctcattcttccaaaaaaaccatttcaactttttgggctgagtaaagggatttaagaggaaaatgtggtatgggaaatacgtggaaatgtcgggtgcgggttctgcatgtctcgttccgatggctatcttgataatcgcccctccaggggcctggttggcgtcagtctgactttggcctgatggtggtgggctaatcatttgtaaccttcctgcaggaggattctgcagctgggcctctatgcctggtttatttcagaattggtccctggaatttctaagcaagcacataattagataagcaagcacagtgcatgggagtgcctggcgggaaagggaggaaaacaaagagttttaaagtacatttcaaggctatattttgagtttaaagaaaaaaagttttaaaatgcatcttgaagctgagatactcggttacacattgacctattcaatccttccccacccatcaggtaacagtagtgttcttgggcatctttagctagttttttactttactaggaatatatctctattttcccatcaagtatgatgctggctttgattcttctggttagagtcatcctgaatgcatctggtgttgaaattaatctctttttttttttttgagatggagttttcactcttgttgcccaggctggagtgcagtggcgcgatcttcgctcactgcaatctctgcctccctggttcaagcaattctcctgtctcagcctcccgaatagctgggattacaggtatgcgccaccaggcccagctaatttttttatatttttagtagagacggggtttcaccatgttggccaggctggtctcaaactcctgacctcaggtgatccacctgcctcggcctcccaaagtgttgggattacaggtgtgagtcaccatgcctggccaatcattttttaattagaggggatttcttaaaaaactttcttgtcccccttcccacactccatggtttggatttcctatctcttcgaacaatctttcttttcttttcttttcttttcttttttttttttttttgagacaggctctcactttgtcgcccaggctggaatgcagtggcaggatcataactcactgtaacctcaaactcctgggctcaagccatcatcccacctcagcctcccaaagtgctgggaatacaagtgtgagccactgctcctggccaatctgttttttttttttttttttttaaatacagaattacctgttgagatttcagttccttatacagagttgagcaatttttttttatcaatggaggttatttattctcattacttattatttgcatttatgctttttctccttccctgtcccttccctatgcaataatttggttagttgatgctttaatcttttctgatgctctattgcttttcaattttctaatttaataatttctacatttatctttaaaaagtctttctttaggctgggtgcagtggctcacacctgtaatcccagcactttgggaggctgaggtgggtggattatttgagccccggaattcaagaccagcctaggcaacatagcaaaacgccatctctactaaaaatacaaaaaattagcagggtatggtggtgtgcacctgtagtcccagctactcaggaggctgaggtaggaggatcacctgagcccaggaagttgaggctacagtgagcggtgattatgccattgtactccagcctggatgatgagagtgagaccctgccacacacacacacaagtcttttttaagttattttgtggctctttttctaactttttgagttgggtacttaattcatttattttcattttcatatttatgtatgtaattatttaaagctgtaaaatatgtttggttctagtcttctgcagtgtcagttgaaagagctgcttaagtgtttaagaagttctatttagtagagttaaaaaaaaaattgttgtctgggcatggtggctcattcctgtaatctcagagctttaggaggccaaagccggaggatcgcttgagcccaggaggttgaaaccctttctctacaaaaaatacaaaaattagctgggcgtggtggcatgtgcctgtggttccagctactcgggaggctgaggtgggaggatcgcttaagcccaggacttccacactgcagtgagctgtgatggtgccactatactccagcctgagtgacagggtgagatcctgtctcaaaaaaagaaaaattgttactgatttcaagttttattatcttatgacaacagcatgcctttcactctatcaaaattattgagggtttttttttggcctaataatcaattttgataaatattccatgaaccattgaaaagatgtattctttgtttccaaaatatagaatttaatatatatcaattggatcatatgaattatgttacttggatgtatatctttatttttaaaaatgttctagttgatgcataataattatatatatttatggggtacatgtgatattttgatacatgcatacagtatgtattaatcaaatcagggtatttaggatatccattaccttgaacatttattatatctttgttttggaaatatttcaaatcttctcttctagctattttgaaatatacaataaattgttgttaactgtagtcaccctactgtgctattggacactagaacttatttcttctaactgtaggcttttgtccattaaccaacctctgttcattccccacctgcccctgctcttcctagcctctggtaactatcatactgctctctacttccataatatgaacttttttaagctcccatataagtgagaacatgtgatgtttgtctttctgtacctggcttatttcacttaacataatgatgtccagttccatccatgttgctgtgaacaatagaaattcattctttttttatgcttaatagcattcagttgtgtgtaaatacattttccttattcattcatccattgatggacacttagtttgattccatatcttggctattgtgaacagtgcatggagatgcaagtatccctttgatatactgatttcctttcctttggataaatacccagtgatcagattgctggatcacatggtagttctatttttagttttttaaggaacctccatactgttttccataatgtctgtactaatacacattgttactatcagtttataagagttcccttttccctgcatcctcaccaacattcgtgtttttttgtctttttgttaatagccatcctggctggggtgagatgatatgtcattgtggtttttatttgcatttccctaacagttagtgatattgagcatttttttcatatacctgttggccatttctatgtcttcttttgagaaatatctactcagatcctttgtccattttttcatgggattatttgttttatattttgctgttgagttctttatatattctggatattaattccttgttggatgaatagtttgcaaataatttctctcattctacaggttgtctctttactctgttgattgtttcctttgcagtgaaagagctttttactttaatatagtcccatttgtctatttttgtttttgttgcctatgcttttgaagtcttagccatgaaatattttgcctagatccatgtcctgcagcatttcctgtatgttttcttctagtagtatttatagttcctggtcttacatttaagcctttaattcatgttgagttaatttttgtatatggtaaaagatagggtccagtttcattcttctgcgtatggatagccagttttcccagcaccatttattgaagagggtgtcctttccccagtgcatgttcttcatgcctttgttgaaaatcagtcagttggctgtaaatatgtggatttatttctgggttctctattctgtttcgttggtctgtgtgtctgtttttatatcgataccatgctggttttgcttattctagctctgtggtatattttaaagtcaggtagtgtgatgccttcaactttcttctttttgctcaggattgctttggctatttgggatcttttttggtttcagacaaattttacgattattttttctatttctgtgacgaatgtctttggtatttttatagggactgcattgaatctgtatattgttttgggtagtatggtcattttaacaatattaattcttcccatccatgagcaggagatgtctttctgtttgcttgtgccctcttcaatttctttcatcagtgttttgtagttttcttgcagagatctcttacctccttggttaaatttattcctgggtcttttttttttttgtagctattgtaagtgggattgctttctttgcttttttttcccagctagttcattattggcatatagaaatgctgttgatttttataggtttaccttgtatactgcaattttactgactttgttggtcagttctaagagttttttggtggagtccttaggtttttctatatataagttcatgtcatctgcaaagagcgaaagtttgacatcctctttaatctgaatgccttttatttgtttctcttgcctgattgctctggctaggacgtacagtattattttgaataagagtgggccggatgtagtggcttacacatgtaatcctggcattttgggaagcctaggcaggaggatcacttgagcccaggagtttgagaccagcctgggcaacatagtgagatctcgtctctacaaaaaatcataaaacgaggtgggaagatcacttaagtctgggaggttgaggttgcaatgagttgtgattgtgccactgtactctcacctgagtgacagagtgagatactacctcaaaaaaatagtggtgaaagtggacatccttgtcttattctagttcttagagaaaaggctttcagcttttcctcattcagtatattaggtgtggatttattacatgtgggcctttattatatggaggtatgtttcttttatgcctaatatgttgagagcttttatcatgaaagaatgttggattttaccaaatgccgttttagcatctatggaaataatcatatggtttttggtccttcattctgttaatgtgatgtatattgatttgcatatgttcagccattcttgcatccctgcgataaatcccacttgattatgatgcagtatcttcttgatgtgctgttggacttggtttgattttgttgagggttttttgcctgtatattcatcaggaatattggcctgtagttttcttttttgttgttgttatatccttgtctattaggttggtgcaaaagtaattgtggtttttaccattggaaaaaaaaaaagtcaaataccgcaattacttttgcaccaacctaattttgatatcacagtaatgctggcctcatggaatgagttagagagaattccctgctctttgattttttggaatagtttgagaagaactgatgttagttcttcttaagtgtttgatagaattcagcaggaaagctatccagttctgggtttttctttgttgggagatattttattactgattcaatcctggtatctgttactgctctgttcaggtgttctgtgtcttcccggttcaatcttggtaggtggtaggtgttcaggaatttatccatttcctctaggttttccaattgtgagctttacttatgttttgtcttgctctgtcacaggctgacagaggtaaaataagctcttctcagaataatgtgtgttgattctttcttgtatgtccagtaaactttgttttatatctttgttgctatgttatttgtttactcagatatttattatatcttcattgtaatgtaaacctttattgttataaagtgcctatcttggacacaaatatggaaattacagacactggggactccaaaaggggagagagtgggagggaggcgagcattgaaaatttacctatcaggtacagtgttcaccagttgggtaatgggcctactagatgcccagtccccagcattacacaatataaccacataaaaaatatgcaaatgtacccccgaatctaaaataaaattaaatataataatatagtgcctatatttgtctagtttaataattttccccttgaaatcactattaccaaaaggtaagagtacgacctctactctcttccttttttttaaatttacttggtatacctttgctcattcttttatctttcaaactttctgagttaccttgctttagccatgattcataggctgggaataatctgtacctttggcattttgccagcttaggactagagctgtcctaattagtacccactggcctggggaatttgcctgtttgatggaggtcttttgtttttttttttttttttttttgagaatttgtgtttttgaaaatgtctctatttcactttcattctctcccaccttttctggccctttatttcccaacttttaattgtgaaaattttgaaacaaagagatgctaaaacataaggacaataggctgggcacggcggctcttgcctgtaatcccagcactttgggaggacgtgacaggcagattgcttgaagccaggagtttgagaccagcctggtcaacaaggtgaaaccccatctctactaaaaatacaaaaattatctgggtgtggtggcgtacgcttgtaatttcagctactcgggaggctgaggtacgagaatcacttgaacccaggaggcagatgttgtggtgagccaaaatagtgccgctgcactccagcctgagtgacagagtgagactctgtctcaaaacaaaacaaaacaaaacaaggacaatgaacatctgtaaagcttccacaattgttaacattttgtcatatttgctttatttctccttatatagctatctaggcatatctatctgtttctgtatctgtagtgctgtatcattcaaaagtaagttgtagacatcatggtactctaccttaacactgcagcatgcatctcctaagagtaagaactgctcatgcctataatcccagcacattgggaggccaaggtgggtggattgcttgagctcaggagttcaaaaccagcctgggtaacatggtgaaatcctgtctctacaaaaaatacaaaagttagctggccacgagtgtgcctgtagtgtcagctactcaggaggctgaggtgggaggatcacttgcatccaggagtttgaggcaagatcttatcaacttggacgacagagtgagaccccctgtctcaaaaaaaaaaagagaaagaattgtcttctacataaccacattaccatcatcacacatgaaaattaaccatggtgtaagtcttttcatttttttatatttgagacagggtctccctttgtcacccagtgcagtggcacgatcacagctcgctgcagcctcgacctcccttgctcaagtgaccctcctgcctcagccttctgagtagctgagactacaagtgtgcaacaccacggctggctagtttttgaattttttttttttttgagatggagtcttgctctgttgcccaggttggagtgcaatggcatgatcttggctcactggaacctctgcctcctgggttcaagcgattctcccacgtcagcctcccgagtagctgggattacaggcatgcgccaccatgcccagctaatttttgtattttttttttttttgagacgaagtctcacactgtcgcccaggctggtgtgcagtggggcgatctcggctcgctgcagcctccacctcccgggttcaagcgattctcctgcctcagcctcccgagtggctgggactacaggcatgcgccaccacacccagctaatttttgtatttttagtagagacggggtttcactatgttggccaggctggtctcgaactcctgacctcgtgatctgcccacctcagcctcccaaagtgctgggattacaggcgtgagccactgcacccggcctaatttttgtatttttagtagagacagggttttgccacgttggccaagctgatctctaactcctgacctcaggtgatctgcccgccttggcctcccaaagtgctgggattagaggcgtgagccaccatatctggctgtaagtctttttaaactgtgcattccattgctaaattccagactcctggcagtctggaattataagggtgcaagtggtttactggagacagtaatcctatcctgatcatgccctgtctcagaaagataagaacgagggaagagatcataatgggctacaagaatttgaagggctgtcatgtagaagagtgagcagactttgcctttggagttacagaggagagcatttggaatgaagagtgaaagtttcaaggaggcaaattgaacctggaatggggctgccagcctcattcgatggtgagtactctgtgactagagatatccagggaaaatcagatggctccttctctgggatggagtggaggggaattgtgttggataggaactggtctataggacatttaagtttcttccaagaattcttagggggcagggacaagttccggagagacccaaaacaatatacaagttatagtctaattataatggctctagtccattttgtctaccccaaacaaagctgattatccttacatgtgttttaagattgtattttttcctctgctatttgttggctaaccatctcatagctctggtttttggtaaatctagcaaatactctttcttatattttctgttggtttgtagaaagggctaaagaactctgccttctttaaggagggggccggccctttcaatttggtaaaatgttagagatagaaaaaagataagtgaaataaattcgcattctatctctattcctttttgccccagtcctaatgtctgactgggtatcttttttaaaatatatatataactgcaaaataaaaggcctcaggggaaatatcactggaagtaagagtagcttggattgaatttatatctatgtcagataatgtgcttcagtaatagttattttcagaactccatgggagttttttcagtaaactaatgaatgggtgtcactgacaagctttccaaagcggaaattatgtgaaaactcccatcttatgggaaaggctaaacagaggagaaaccctgggcttttgctggtgggggaggggttaatgtcagttctaaagaagattcacattttcattgtttcattgaagccaattcaattttatgcaggaaatggctgaatggaattatatttctaggaagccatacaattaagtagaaagcattagtagttcttgacccagctctgctattaactgccctgggcaagtccctatacctagctacatttccacttcctagacttcaaatgttctatgtacatttaccaatccattgaagataaatgagatagcagtgattacaaatgtcgggtattgaatttgctgccaccttaaagctgtcccaggcctatgggctaaaagtgaaataagaacttccctacttagtataatacttagtataaaaagctcaggaggtcttatccctaaatagataagatgtggagtgaaatcactttaaatagacctgatttataagcagggttaggtttggttagacatggataagataaatgtattgactatgaatgtgttcagctcttgtatcaaggacttggcaagtagtccttggttaacacctgctgctttcaaatttctgaatggcttcccatctgaatctggaagtcctacagcttttctcctccagggcctattcttgacttgcggatgacaaccgttttttttacagccagcttttctgttttgttctgctccctctagaggtcccttcccctacctctgcctctgtccaaatatcttaatagtgatatcaaagaaggcagaagtcaggttttgccatttcacttgaattctgccccagagcctctctcagtttggagcaaagtgtaactgagtgtggtgtaacgaagttctgtggatgatgttgatgatgacgaatagtggggagcgattttcacagccaggagcttggctctcagcttttgtggcgcctcagactcttccctgggatgtgtagtgttccatgctggcagcatgctgtgaacaatgaaaattgtattctgtagtctctttcaatatgctgtgacttggcaagggctgaaagcaaatcatgcacctgcataaccttttcagcttgacaaagaatctctctcactccccctctcgcccctcccttccacaggaaatgctcccagacgacagcacgaacaagccctaattaagtctttcctcagatcccgacgtcttttcctccaaccacatcttgggtttagatgtgtaagtaagaggaaagtggagaaataaaaatcaggtataagacgcagctggaaattgggacctatttaattgcaagtaaagcctaagaccccggccctggtggctctttggacagttcacatagaacaagagacagagtaaactgatggaggagttaagatgcttttgatgaaaaaactggttgcaaattatttaagaacattttctcagactttttgcgtttcttatatttgtgtctgtctctgaatagaagaatctcaatgtctttcaggatatttaaggatcatatacgtaaggtgcctcatgcttccttgagaagtctatgaacacatccttacaattatatgcaaaattttgggctttgtttacttatctgaaaaagagaatccacagattttataacgtctccagggagttcaagacccaccgctttccccaaagtttaagaaccactggtattatagaagagaaagaataggtctaaaacaaaatctggaaggatggccacgtcaggaagccacaaagaaagagtggagcctatgaaagttagagaaggatgaaattcccaggcatccccatgggagacagtagggtggtgaagctcatgcactgtggaatcatttcatctgagctcacagtctagtgtctccatctattaactgtgctggctgtgtgccctggggaagttacctctccaagcctcagttttctaatctatacaatgggatgatagtgcctacctcagagttgttgcaaggatgaagtgaggctatccatgtagcatgcctctctgcctccctattggtatgatgtgtgtgtgtgtgtgtgcatgtgttgtctctgcctctacacatgtattttccattttcttgtccacattatgcctctttctgggctgactgaagattcaagaaggctctgaattctgttctgctgtttttttctgatttctttagaaaaataatcagtgtgaggtgatgtccttggctgaatacccccagctccactaggacttgtcttccagccaggctgagagccatgtgtttgagcttttccaaccagggtaaggagcagtagatgttaggagcctcgtgcttagagccaagtgaaccagctttttctgggaaggagagaccaaatcatccctgggaggatagagcctgtcttctgcagtgccccagatagcagcagccttagctgctgcctctgtggcctacttccttttgtaatttgcacaataggccagaagatggggctcttgaccctggagtcaagggccagaggctctgactttttccacatttgtactggagagaagtcagatccaccagtcctcccaggaatcaccactacttctcaattcctttccctaccctacctactccacttctgccatggctgggacttgccttccaggggagtgggggatgtgggcacatctttcctttggccaccatcctcggctcctgaattaccacgttgctagagtcagtctttctgacgccctgcctcaggtttccccctctaatccattctcccctaagggcagattttggagatggtacaatttttataggccaatacaacatagtggtcaagaactctagaatcagagagcttgttcttgactcgtctcctcaggtgaatctttccccacctcctcagagaagctctccctatcccatgccagttactcttgatcacataaccctttatttacttaacagtagtgattataactagcggttatcttgtttgatgacttgtttactttctcccacttgattgtaaggcttatgaggccaaggacactgtcttaattgctgttttcccaacacctaacatagggcacgatacataggttctcagcaaaagtgttttgaattaatagatgaatgatggaatcccagcttcatgactgcctgaccttgagtaagttgcttaacttcactgagcctcagttttttacctgtgaaatagaaaaagagtagagacattatgactattaaatgacacaatgcatttataccactaaacccaggttctggtgtgtggaagttttccctaaagccttcagcgtcctgctttttatcatttaagaaaaataaagtctgaatgaattagccagatctccacaatttgatcacggccttttattttatttattttttatttttttgagacagggtctcactctgtcacctcggctggagtggagtggtatactgaagcctctcctgggctcaggtgatcctcccacttcagcttcctgaggggctgggactgcaggtgcatgccaccatgcctggctaatttttttgtattttaaaaatagagatggaatttctacatgttggcccaagttggtcttgaactgttgggttcaagggatccatctgtcttggcctcccaaagtgctgggattacaagtgtgagccaccatgcccagcccacagcctttctctatcacaactattacctcccactgctcttctcaataactttctgctttggcccaaattgtggctaccctgaatgggccatgtgcattattattcttaagtctttgcctaagacttgagatgcttgctcttcttaccttgggtcagctaaatcttacccatgttttcagacttagctcgaatccatgtcctctgtgaaaccttcctgaagatcattttctcttctgaatttttgcaatcttcatggtttatataatattactcattaacatatatcctgtttccctgataagcctgttaagctcccttggagatatatattttagatttctctgcctctacagtgttacttgggcctgttcattagtaggtgttcaatacattttttattagattgaattaaaagcattcatatttactaagtactttctatgtgcctgggattggttgaggctctgttgagtatacagaagggcataagaaaaataatcattgctttcaaagaacttataatattttagtaagctaaagtcaacatataaagtacttaaataaccacagcatgacaactgctataagaaaggtatgaagtgccttgagaattctggggagggtgagatgacatctgttaggggtatcagggacagtagaataaagaaaggcttcttggaagagggtggcttttgagattaactttgaaggatggttaagattttgatggacaaaaatggggatgagggtaggatgtgaattccagattcaagatgacaggattagtaaagagattgatggagtgtgtggcaatgaacactaaaacgcagagactagacaggaggcttatacaggacatcagaaatacaattctgcttcagggatactgaagcccaaccttgtttccaatttcaggaccaacacaaaggatggtaagcaggggtggaaagttttaacatgtatcagactaccttccccaactgtagcttctttaggggctgagaattatttgcaacaattcttcccctgaccccaatttggacctacctgaagtctggtatgatagtgcatataaaacaaaaggccccatggccgggtgccatggctcacgcctgtaatcccagcaccttgggtggctgaggcgggcagatcacctgaggtcaggagttccagaccagcctggccaacatggtgaaaccccgtctctactacaaatacaaaaaaatcagccgggcgtggtggtggggacctgtaatcccagctactcaggaggctgaggcaggagaatcgcttgaactggataggcggaggttgcagtgatccaagaacacgccattgcactccagcctgggcaacaagagtgaaacttcgtctccaaaaaaaaaaaaaaaacaaaaaaaaaaacaaaaaaaaaaacaaaaaaaacccaaaaggtacctttctttttcttgaggagagagggttgcttcgattttagccagcctctcttttcttataaatccaaatcaaatttaatgcattattcatgatattctaaccttgtgttaggtcagtagttctgttgctaaataatagtttgccttagatcatttcctggaaaagttcgaagcctttttgtggaattgcttcaacagtcatccttagctcaaccctgtccgtgtgttttgcttctgacttgagactcaagaagaagacctaagtcatagtgagactgtgagggagcctgacactgcctgccttcttcaatttaatgctctttaatctggccattagctcaaggaaaaacaattaattttagaaggccctctcccctcatccgcaattacctcctcctgcaatcgcgaaggatgtttgcccggaatttaaacatcatctcccaaggaatgaaatcagaataggcaaaaccgacactttcccagttttcaagggtcaggtgcagctgcaaatagaagcagagattttctagcaagcagttggaaggaccttcacgcccagaggcccctgaagggagggaggcggtttccaaggcaaccgggcccgggagcggttggctccccggctcctccccctccccgcggtagcccagggtaccgccggacagcgtcctcccgtgctccgcgccctgattggctgcgcaggcctctcgctgattggttgcggcggatgcctcgcgggccggtggctatggaggcggcggcggttgatggttgaccgttggctccggggtgggggtcgccgttcgagtgatctgctcagacccgaccagagggcgcgggctgctgatgcttggcttggagcccgtgggggagacctagttcggctccgccatgccggccgccgggagtaacgagccggacggcgtcctcagctatcaggtagggccccgcctcccgcgcctcccgctcctccccggggcgcagcctcctcatcctctgcccaccctccttccttctgcccccgagcccaggcttcccaggccgctccctgagggcgaggggaggccagcccgggacaccagggggcgctccgggcggttggggaccaggccagggctgcgagagagtgaccttgggccgaacctgggatctggcccatctctgccgcatcccttgcgccgcccgcccaggagccctgacagccggcgggcggcgacctcttgttctcctcgcgtctttctgttggaaggggccggcgtctggcctcgcgttgtcctgccagaacgtgggcagaaagggtagcagggaccttgctctggtggggcacgtcttctctttgtgtttttatttctgggggtttctggttcctcagtggttcagaggaaaagccagaaaagactctggaggctgggaccaatccctgatagggtgacccggtttgtgactccctctgccccattgaacagacacctgaaaacttctgggtagggactgcaaactgggctgaggatgtgtggaggggtcaggaacaggtgcttatttaagggaattaaaaaaccaaggttaagtaactggtattggaactgttggggcggctaatgtaaggaaaagcattggactaagtgttagagtctgtagtttgaaatcctacctctgcctcacacaaactttgtgaccttgagtaagtcacttgcctctttgaacctcagtttccccagctattaaaatgggaatagttatgtctgctttgcatgcttcacagggttgttttgaggatcagacgaagtgctgtttgtgaaagggctttgtggagtaatgtttattgtgtgacactcagtgaatgagtggcagcccattgaattctcactccccgtttcctgtgcaatcagatggtgtggtttctgccttggaaagagggttggaagaggaggcaagtctgaagtacagggctctgaagagggtaatgggccatctcaggaaggatgacacgtcttggaaacaagtgccatgttgacctcagggatggtttccccgaggaggcagggaaaatatcctgagtttgcaacaaaatgaatatcagacactgactctctcctcttcttcctggttaatagtttgctacaattaatagaagatacatccttctttccttgctctgtctgaaaagaacaatatctaagattttggaaaatgcatatctaacccccttaaagcctattaaatgtattcaatctctgtttgggatacaatggtaagaaaaaataggcaatgttcttgccctcctggagcgtatcatttagtgggggaggggagaagtactatttttaatcaaatatcacacaaataaatatcataaactgtgataaatgctttgaagaaagataggcagtgccataagcgtgtataacagtggttccagacatggtctcagagaagattttgctaaggaagaaaatctgggcaaagagctaaaggatgaataaatgttaactgagggaagagggggatcacagggcctgagaggcaaagagaacagctacacaaaagacctgtggcagagggggacacacctggttagagacctgaaatgaggccagtgtggtgcagcaacaaggagcgatgaggggaatggtatatgagatgtgttctggggttataacacacagggccatttggagcccatgctgaggaagttgacatttatctgaggaacaaggggaagccactgaaggggtttaagtagaggggaaaggggagagagggggtctctcctaaccgggagagagagagagggcatgagagagtaaatgagatcatgaacagattttcttttttttttcttttctttttttttttttttgagatggagtcttgctctgtcgcccaggctggagtgcagtggtgcgatctccactcactacaagctccgtctcccaggttcacgccattctcctgcctcggtctccggagtagctgcgactacaggcgccttccaccacgcccggctaattttttgtatttttagtagagacagggtttcaccgtgttagctaggatggtcttgatctcctgacctcgtgatctgcccgcctcggcctcccaaagtgctgggattacagacgtgagccaccgtgcccggcccagattttcctactgaaagatttctttggctgcagtggggagaataggttggaatggatgtgaggatacagtgtccttaacatgcagaatgtttacaggttatattattgagggcatcatgacccttaggtttctgttagtgttctgtgaaattagtaattcttgagtacttctggagtaggatagaaaatatctcctttatatctagtttgtgaaactttcttgggtggtagggtgaggagaagaaaaggaatacaatgggaacagtaggacctcatgaaggctggagtcaggtaataggcaaatggaaatttgagagatagggaggaaaagagaatgagggtagaaggaggaaaggaaatggggatgacttgggggagagacagtcaactgactggcaatgaccaattaaaccttctatgtgctaactaggctgtgtggagatgggccttgtaaagtgagcagattgtgtaacttgatgtaaacagagaggttccagacatcacctctaaatatcataaggctgtgctgttttggaagatgtgagctactgtcctagccttctaacagttccctctgctttctttcttgcccttctgtaagactactctccacatggcagccacagggagcttttaaaaacacaaatcagatcatgtcacatcttatcttgaaacccttcagtggcttcctggtgccttttagaataaaatccaaactctttatcatggcctaccaagcctgaatacaatcaggctcttgtccaccctcccaggactgcctctcctccactctctttcttgcacctcctctggctttctgtttcttcaatacagtaagtcttgcatacctcaggtgggtcttgtgcctgtcattccctctgcccaggatgctgttttacccaggccttctcatgattcaactagaatgtcacttccttagagtggctttctctgaaccttcatcccagtcactctctttaagatggtcctgttttattttcttataacatatgacttacctgaaatattcttcttttggtttcttgtttattatcatctcagttagaagcttcttgagggcaggggacaagcagaaaatcttctcacctagcacagtgcctggtataaaattggtgctcaattgcataagtgaatgagcagctctcccgtatccaaagccagatgcctccccttaaggagctcaaggtctagtcaggattggcacagagtgacagatggccattacttcattacacaacatctcttccctctatgttgtgcctttgctcaggcgttgaagctggaaaatctttcccctcctctccgccaagaatattccattttaaccttcaaggtctggctccatatcattctattatattcgtcactcactctcccctgctcacaacacctaccaagtactatcttccgtgaaccctgacttgtggaatatacatattcatctctgctgctcacctgacagctccatttgctgttactgttaacttttattgaatgcttgccatgtgccaggcactatgctaagtgtttttcatgcattatctcacttaatgctctctataaccctgagaattatggaactttattattgttttccaaatgagaaaacaaagataataaagaggttaagtaattcttttatttttatttttattttttattttttgagatggagtttcactcttgttgcccaggctggagtgcaatggcatgatctcggctcactgcaacctccaactcccaggttcaagtgattctcctgcctcagcatcccgagtagctgggattacaggcgcctgccaccacccctagctaatttttttgtatttttagtagagatggggtttcaccatgttggccaggctggtctcaaactcctgacttcaggtgatccacctgcctcggcctcccaaagtgctgggattacaggcatgagctactctgccaggcatagagaggttaagtaattctaagtgccagggttgcttgtggccctgccagacccagggctgcatctctgcaaaggatgtgcccttaatcactgtgcattactgtggctgtgtctttgttgcctataacagtacctgtctctgaataagcactcactaagtgtttgggaaggcaggatgggaagagactgcaatgagggaggccagctaggaggccattggtataattcaggatgagttaatgaagacctacattagtcatcattttgatgagatctctgaaggtgtttatggaatttttatttatttttgagacagggtctcactctgttgcccaggctggagtgcagtggtgtgatctcagctcactgcagcgtcgacctcctgggctcaagtgatccttccacttcagcctccctagtagctggaactacagacatgaaccactatgtccagctatttttttttattttaatttttatagagacagagtctcactatgttgcctgggctggtcttgaatccctggtctcaagcgatcctcacccctcggcctcctgaagtgctgggattataggcatgaccaccacgcccagccggttattgaaattttaagagtcaatgagcttttcatagggggtagtaatagaggaaggaagtcagaaagctttaaggaaagcccctactttggattggaactggggacacctggtatcttcacagttctcctgataagcactttcagaacaagcagaaggaagtgttgaaagagaaaactggtgagattggaactctcagcatttgagccaagtggtgctggggactgaaggaaagttcagggagggtgaaaatggtggatggggaagcaagtgaatttgggcaattaccaaggcttttatgtggatcaggcctgctcagaatggaaaattttgcagaaatcttcacaataataaaccctggtaagtgggtgataattgagaaacatggctgataggagtagagttacaccccatgtcttatgatggacctgaaaaagctctaagacaagagttctgaaggagacctggattctagtgcccagtgactgtggcacatgttggagctcagtaaatatttgctgagcgaatgaatgaatggctctacagggagtgcgtcaacttttctgagggtcatagccagtttatggtaagcagtcagtaaatatttgctcatattatttaacaaaagtatcaactgtagatagcagtttctcctctcactacattgcacatacccctccaccctctcctcacacatactaggtattctttccatgtgagagaattggggaacctgtgggcattctttttatctggttttcccagatctgctagggagcttcagtaggagagatgtgggcagacttgtcaagcagagacttgagcagagaattggggacaattcagactgcaaatttacttccttcaaaatctgtagataatcgtcttagctcatggtttgccttggcagggtagacagggtcatggtagtaatcaggacacagaaaagcaattgtgtctattctaaatctgctgccaggtaacagcaacagatcttagataatggagaggttggttgtttcccataggtagtaacaagtttactggtcctggtcttggtagtcaggaagtcataatatatgtattggttttcaatttctgccataacaaagtaccacatatttgatggcttaaaaaacacaaatttatcctacagttctatagttcagaaatctgatacaggtctcactggactaaaatcaaagtgttggcgggactgtttctttctggaggttctgggagaggatctgtttcctcgccttttccatcttctagagactgcctgcattccttggctcatagttcccttcctccatctccaaagccagaaacatagcatctctcagaacctgcttttgtcatcacatttttctctgactctagtcttctgtctctctctttcacgttaaggatccttgttattacactgagattacataatggttttcataatttaggatgatctccttattgtaagatcagctgattagcaaccttacctccgtctccaaccttaattcctctttgccattataagggaacatattcacaaactctagggattaggatgtgcatctctttagaggactattaatctatcacagtgtaacctatactgaacaggagtgactccaagtggggttcagcaaaagaatcactgagaagccagagccattttggaattttaggcccctagcaggctgctgaagggttagaatgggaagctcatgggtattcaggagctcatggccactgagaagaggaagtctggaacagctgcatgagtccttgtggaattttttttttgtggctatagggtgttttcattcagtaagaaagtatttgagggcattggagagttggggacccgtgggtcagatttggtgatggactccccaaagggccagcattctgaggctctgctggatgaagaggaagatggaagtgaataaggagatgaagaactattggaggtctggtcagtaaagggcagtttggggtgcagggttctggagcgccaaggatttaagaaggtaataatgtggatcttaagctattcttactgtgggcattaatccatgattagtccatctgactaaatggtgaggttctttgcttttggcaatcttagcatactgacttactaatgttagtaaggaacacagacttgattagagttcttatctcacttagcttttgtgagatcttagcctcaatttagaactgttttgaggattaagtgaggcaacatatgtaaaacacaatgtgaggtatataagtgtattacctcggtttgctgattagaaaccttggaaatgggccaggcgcggtggctcacgcctgtaatcccagcactttgggaggccgaggtgggaggatcacaaggtcaggagatcgagaccatcctggctaacaaggtgaaaccccatctctactaaaaatacaaaaaaaaattagccgggtgtggtggcgggcgcctgtagtcccacctactcgggaggctgaggcaggagaatggcatgaacctgggaggcagagcttgtagtgagccaagatggcgccactgcactccagcctgggcgacagagcgagactccgcctcaaaaaaaaaaaaaaaaaaagaaaccctggaaatggctgggtgtggtggctcacacctgtaatcccagcaccttgggaggccgaggtgggtggatcacgaggtcaggagatagagaccatcctagcgaacatggcgaaacccagtctctactaaaaatacaaaaattagctgggcgtggtggtgcgtgcttgtagtcccagctactcggcaggctgaagcaggacaattgtttgaacccaggagacagaggttgcgatgagctgagatggcgcctctgcactccagcctggtgacagagcgagactctgtctcaaaacaaacaaacaaacaaaaaactctggaaatcatctctatatttattgattttgaaatggttgaatgtattagaactcaataaacacttgacttttttggggggggtcttggcagggatagtggtgggagtgaagtagaatgttaatgtatgtactctctgaaaacactgaaaaagatgaaagggttctttgaggtaaaaagtctgagacctactgcaggaaaggaggtgggattcatttgggcaggtccaccaccacgcaggtccagagaggagcctcaggggaagtgtgttaagagagagagcttgaggtgggctctgctccccaccttccctgttccctgtagcctctgtggctgcttccaggagctggggccattatgtaagactgagctctgcccgtgccttttaatttccatttactgtaagtgagaatctggtctgctactcagttataattcattcatttttcaaggctcatgacaatgctttctttctcaagccttgccttgcaatttcagcattttaatgtgtatttaaccctcttagttctttttatctatctagtccttgaggtaggcactcaagtcaattcacatttacgtagtgggttattatcagtgaactaagaggaagttcagaaaagaggatactcagaaatagggctttttccttcctttcttccttccttcctttcctttttcttaagcttatataatgtgtttctcaggattctaatcttttctgagtcacaagcccctgtgagagaatctgatgaaagttatggaccctctcccaagaaaagtgcacattcacacatattcccacagatcctctgaagcccatttacaagcaccctagaaatccatggaccacaattgagagatcttttttgccataaataaatgatactatcagaggaaataatagccaattggtgaggaatctgcagcaagcacaggccaaagagacctgatgttcctttcttttcatttttaatgatttcaaacaaactttgtatgtgcctgaaatttatggaacatttcaagcatatagcaaagtagagagattttgcatagtgaatcatcatgtacccatgacttggcgtcaacaatgaacacaccatctgttttttttttgttttgttttgttttttttttgagacagggtctttctccgttggccatgctggagttcagcgtacaaacacggctcattagagcctccaactcctgggctcgagcaattcttccacctgagcctccagagtagctgggactacaagcccataccaccacacccagctaatttttgaatttgttgtagggacgaggtttcactatgttgcccaggctggtctcgaactcccagcctcaaacgatcctcccacctcagccttccaaagctctggggttataggcatgagttgcagagcctggccacacaatcttgtttcatctatgttcatctattctccaaatctcagacatattatttcatgagtaaaaatttcagtgtgtagccctaaagattaaagactcttttaaaacaacgacataactgccaaaacacacgagattattatactgaaaaaatagtttcctaatataatcaaattttcatttagttgtttacatttatgtgagtaccttgtagttttttaaaaaatacttgttttatttgaatcaggattcaaacaaagtccacacattcacattcaagcctgacctttcaaatgcttttgctaatggttattgacagtggctctgttttctttggcaagacaaagaaaatggatgaacaattattcagtgaatttaggctgtggttaaccaatctaaattaaggaaactaacaaacagcaagaaagtttttcaacctgaatttttcagatgattgaccttgctctttatattttgcagttacaattttaaagaaatcaatcatctctcctaccctccctccctctgtttctctagattcccactgtgttctctgtggtgtcaggtgtctgaagacagtaccaagtattataattaattgattcctatcctctggatattaaaaaccagtaggggagccaacatgaataattattcatatatctaattatttatttatatagttttatgagaaaacatctgatcaattatcaaagagtttataaaactaataaacattcattgaaatgtatgggatacttaccatgtactggacattgtactgggtgctgggtagatattgatgaatataagacccagtacctatcctcctagaacttttgaggggacagaatctggattttgctgattgtattcccatggtgttgtttttcaaggaactctgttttattgtactttcagtaaattggtatttggatttagaggcttgatcagattcagggacaatttatttggtaagattacctcatgggtggtgatatggtctcccattaggaggcatacaatgtctgattgtctctcctttgtgatgttagtggctgttgaaaatcagtacaatccattggggattgcaaaatgattttgttccatcattcccttttcatttagtctctcccataatgagaagcttttctcatctactctgtggtaccactctatggtataatttatctaggaaagcccagataaattatttgccagttttcaaagtaatgagttggtttattagtgttatcctccaaatgtgaccaattagttaattttaaaagtgaccttgtgaagccaggcgtggtggctcgcgcctgtaatcctagcactttgggaggctgaggagggaggatcacttgagcttaggagttcgagaccagcctgggcaacatagtgagaccgcccgccccaactccgccacctctctattttaaaaataaataaataaacaaataaaataaaagtgaccttatgaagtgaactcatcaatcttaacatattgacatggtcaatctgttgtaggcattaccctactgatgctcaaattgtcctattttttggcaagagacccctttaaattggctcctgagtcctttggacacaatcctagttgtcttcgagtgcttccttactatctaacataataagatgttttagacttaccttgtacatttcctggctgggacctatgaccagccatttctccagggagctctgattccttttattacaaaatggtattttaagagactataatgtaggtactaattatactcattgctactgattgatcattttttctaagcctttgagtgggcagagctagaaaatataaatttgtaaatttaaaaacattaaaaataaaaacgcattgtatattattgttgatacttccaattcaatttaggactgcatggctcttatttaccttttgtcttaaaactgtatctcctttctctcttgccgagaatcccagtcctcagccgcactgggagtgacagaataaattcacatagctactcatttgttttatctcacaacacacaacaagcctcagaataccaacaccaaccctacaaccaacaataggataaccaaaaaacagtttcagatcttttaaaattcttctttgtccttagagtatatgccactgaggatgttcagtcaggttactatgttttaatgttacttagaataatttctcttggaatttataccatcaatttgacctttgttttcattttgtttttgattttggggaattactttaaaatttttaattttacattatgtaaattatttacaaaataaggcatattcaaaaaagtctagtttctatctttgtctcttccatcttattccctccctcctctctaggtaactatttaaaaaaatcttttgtgactttttcttcttttatttgttatttatttatttatttagttagttagttagttatttgagatggagtctcactctgtcatccaggctggagtgcaatggcgtaatcttggctcactgcaatctctgcctcctaggttcaagtgattctcctgcctcagcctcccaagtagctgggattataggcgtgcaccaccacacccggctaatttttgtatttttagtagagatggggtttcaccatgttggccaggctggtctcgaactcctgacctcaagtgatccacctgccttgggctcccaaagtgctgggattataggcatgagccactgcagtcatcctatttgttttaaaatgtaagcaaacacttatgttccaacaccctttgttagataaaaggtagcaaattatacagttttctccatcttgctttttaaacttaatattatattttggagatttttccatggtagtaataatatataattttaaatgtctataaagctaatttaatacataaaaatcctaagtagatattagactattttatttacttccctaaaagtttgtttattccagttggcctcaaaaactttatttcaatcttcccattgggaaaatgaattgccttatgttcagagttgtcttatttgggagcatagatgataactacaaaatagtaactttggaacagtaagctggaaacttgagcaggatctagaaggaaggtgatatcgtttggctatttgtccccaccaaatatgttgaaatgtaatccccaatgttggagatggggtctggtgggagatgtttgggtcatggaggcagatgcctcatgaatgtcttggtgccatcctcacagtaatgagtgagttcttgctctgagttcacccaagatctggttgtttaaaagagtctgggccctcccctctctcttgcccccatcttgccatattatacaccagcttcccttttgccttctgccatgattgtgagcttcctgactctcttaccagaagcagatgctagcaccacacttcctgtacagcctgcagaactgtgagccaagataaacctattttcttaataaattacccagtctcaggtattccattatagcaatgcaaatggactaatacaggagacgtggggatttaatgtgctggagagtttggggaaatggcatgttagatgactagatgacctgacaatatgagcaaagacataaaggtgggaatgtgcacagtgctctcgggatcagtcagcttggctggagttgcaggtttgagaagggaaatagattgccagggaaatcagctaagagtttttttgaaataattcagggtcttgtgattcagggtattgataggataggtgccattatattcattcttttaaaacgtttaatttttattttgaaattgacaagtaatatttaagtaatattgtacatattcattggggtgcatagtgatgtttcaatacatgtaatgtatagtgatcagatcagagtaattagcatatctatcatttaaaacatttattatttctttgtgttgagattactcaatatcttccttctagctgtttgaaactctatattatagtcatcctactatagtatagaacactagaacttattcttcctatatagttgtaattttttatcctttagcaaatctctccctacacttctcccccttgccttcctagcctctaatattctctcttatacttcttacttctctgagatcaactttttttagcttccacatatgagtgagaacatgcagtgtttaactttctgttcctggcttatttcacttaacataatgtccttcagttccatccatattgccacaaatgacaagatttcatactttttatggctgaatagtattctgctgtgtatatatgccatattttctttatccattcatctgttgttggacacctaggatgattccatatcttggctattatgaatagtgctgcgataaacgtggggatgcagatgtctctttaatatagtgatttcctttcctttggataaatgcccagtagtgagattactggattatatggtggttctgtttgtagttttttgaggaacctccactgttctccacagtggctgtactagtttatattcccaccaacagtgtataagggttctttcttcttcatatccttgccagcatttgttatattttgtctttttgataatagccatcctaactggagtgagatgatacctcattttggttttgatttgcatttccctgatgattagtgatgttgagcattttttcatatatttgttgactatttgtttgtcttttgagaattgtgtattcattcttttaacaaagatttatagagcactgttatgtgaaaagtctgtgctgggtgctaggatacagtggtgaggaagatggacatagttccttcttcctcaaggaacagaggagactttttttattttttttgagacagagtctcgctctgttgcccatgctggagtacaatggtgcgatctcagctcactgcaacctctgcctcccaggttcaagtgattctcctgcctcagcctcctgagtagctggcactacaggcacgcaccaccacacccagataatttttttatttttagtagagatggggtttcaccatgttggtcaggccagtcttgaactcctgacctcaggtgatcacctgccttggcctcccaaagtgttgggattacaggtgtgagccaccatgcccggccaagacattttattactaagagaattgcagtgtgctatgagggtatataaatggtggacctagcttagtttggaagtcggagtgggtaatcaggaaaggcttccaagtaagtgtgttgaggctgagatcaaagagatcatcatctctttgatcatcatcaaaggtgggggcaggtggtgggagtggcagggagagaatggtagttccaggaagagacagcagcactaagtaaagaaggtgggtgtggttccagaactaaaaaaaaaaagaaagaaatgcctaatatgatttaaagggttggagcatgtagggaagagtggatgagagatgaaaattaattttttagagaaattgcaaaggaagaaagacttggtaagaaaagggaactagctacctgaaggcatatggtaggcactcatacatgtggaatggatgaataagtaactttgaaatttcacctgtgggctaataaatgatggtgccattggtaggaataaacaaatgagcacagggtgttagttttggaaggaaagttagttgggttttagacacatggttcttgaggtgtggcatcctagtggcttatcaattactgaaccacagtttcagactgcagttgaaattgtaagtcttaagtgaggaaaacaaagagtagagagctctttcttggaaattatggttagaggaagaaaaagactaaggatgagacagaggaggcctgataagaggagcaggatggaaaatttcaaggacagcgtgtggtaaacaggcccaaatgctgcaaagaggccaaggagaccaatctacaccaaatgggacaacttgcttcacagcacttgcaaaatgccaaaatgttatacagaggtatagatggagtggggaggtggaaaaggcatgagatttacagccacaagacctgggctcatgacacgtcctagtaatcccagctgctctggaggctgaggtaggagaattgtttgagcccaggagttcaaggctgcagtgagctatgattgtatcactgcaatatagcctgggtgacccattctctctctgtttttttttttttttaaaagacctaggctcagtcctagctccgccttttatgacatttgtgaccctgggccatcattacttaatgttctctgagtgtcagtctgctcatttataaaatgagaaagataatggctaccatatttgcatctaaaaggtattgtgaagttcacatgtaaaaatacaggtaaacaattgtgtttcccccgtaagtatctcaaaaggatctggcatacacaaggtttgtatatttgaacgaggtatgtgtattactgtgactacttatttgtgtttaaacagagaccagatgaagaagctgtggtggatcagggtgggaccagtacaattctcaacattcactatgaaaaagaagagctggaaggtaagaactgccatgctgtgtgatcagggaaattggtgaggggcagcctggtgtgggaagacctggctctgtgtcctaactctctcactagctgtcagaccttggggaaaatcacttgatttcctttagcctcactttcctcatctggtaaataaaagtggggatactaatacttgtcctaccttacagggatatcattaggatctaattgcctacatgggagatagtgctttgaacacggtgaagtccaatataaatattaacaagtaacctgttctttgagaatgtgatgtactcagttcagtgcgttaattcttgacaactgcctggaaatacaaataaatacaaaacttaaagagaaaataaaatacaaatagttttaaaaactcattttggctacaaaaccctatttttaccccatttccaatatttactgtttctattctatttatacccatttctgcctggtggtttcatctaaacaagagggaaaacaggaacacacctgtgacatactcttgagttcataacatcaaagttatataaaagcccagctgaaggggaaaggaaagaagaggcattttggatgacccactctgtccagtttaccttatttcagctcttcctttctctgcacctcacccccagctccccacataaccgttatgtggtgtcctgctttccttcttcccctggggactagttggtgtgttaggagttggacccacacctggccatggttttctaattagtgttgatgctcagtttcattagaggaaggctcatgtccagtatccaatatagctttaatgagaagccacatttggctcaaaagcctttgtgaaatctctgcagcatcccctgcaatgttgaaggctatgatacagcaactttctgatgcctgagacagcatgtgaaatgttctctctgtactgcctgttcccgtgacagttttttcatcaaagttgtacaacctccagagaaaacttgtccttttgatggggagaacggaagctgtagaggctgactcagcctctgggtctgttaccatgagaactgacgtgggtggctctgtggaggtcagtggtgtttgggtataccaaggtgaagttttccaagttattttgaccagatggaagaagagaacatgtgagttgcagcagttgggagggagtgggagaaggaaagggtgtggaatggaaggctaacatttgttgaatgccccttgtgtgttaggcattagattaggcaccttatacaagttgtccttttcatcttcatagcaccccaggcaggtaggtatcattatccctattttacacatgaggaaactgctcaaggtcatcgagcctaattgcaggtgaggctggggagagaatcctgctcttttcattctgccacacagcctgcaagagaggacagtaactgtcattaaccacccaacctcaatatcttgctccatcaaataaaatttttgtatgttgctcttgcctcttcttctgttctgataatcatgtggtctctctaccctctcattgcatcctgggggcatgttgctgtcagtttagttgttctatagcaagcaccactggacctttgccctcagcaaggaggtaaccatttatgaacactcttgtctacttgggagtagaataagaaacctgagcaagctctcttgaatcttaacaactggttccgtccacggagatcagctgagtaactggcggtgggagcagcttctccagatgacatcatctgttctttatgcatgttctactttgctaaaaaagaatgctgtctgtgatgacagccttactagtgcatagtgtgttgggagatggtcctttgtacatagacttttttgaaaactagaatcttatttatgttaacacttaaaaaaaaagcattacacgcaaatggtggacaaactagaaccagatctcaggcctgatgtggtttctagaccagctctggagaagagaagagagagttgggatttgctatagggttggctgtgctgtgggttccactcagactcactccgaagggcagccctaggactcaatgaggctgtactcagggtagtgttatctcttgaaggcatagaataaaacgagtaccattttgatggaacacagaagcaaattgtgttcagattcaatatgcatgccatgatatcaggttctgtggctgcaaaaaaaatctccaggtcttttttcccctttatgtcataacttctgcccacatgacataaactataaatcattgccttaccacattttatttatttatattaaacaacaacctctagtccaagaatatgagttttttgtttttgtttgattgttttttgaggcagtcttgctctgtcacacaggctggagtgcagtgacccagtcttagcccactgtagccttgacctcctgggctcaagtgatcctcccaccccagcctcccaagtagctggggctacaggcacgtgccaccatgcctggctatccttaccccattttaagaactatttctgagatttagtctgtgtacattgttagaaactttgtaagtgtgggtcttttgcataaattaattctatcagtaagagaagttgcattaagccattatgttgctttttttttaatatgtgagaagagtcaaaagccaacatcagaacacgttccaaagatgaactcaagaagagcaatagtccatgatgtgcttcagtggactttcccagtcccagaggaacaagaggcagttgctttagttagagggatggctttttccattttttcctggcagatcattattcctgattaactactagattaatgaactctggagtgagtttaaggccttctaatacgtttttaacagaggtaagagccatttggtcatatttataacttctaaaaaggcttacatctgctcgacatgtgagattcacctctgcagttattgactttgagttaacctgtaagcccagaggagccgagcaccctgttgtatgtgctaatgagctctgtgtgagtgctgggtaagcagtgtgcgtgtactgcattgtaccttagtaggcccaatctccatctgcagggtacgtcaaacctatggttcctgtcctgcttcacatgattcattgccagttcactaaagattgctctctgcatgtgtatatgtacttattttttaaactatagactaaaattacatctttcccataatttttactaaattagaatactttatttgcacacagatagttccaaaagactaggtttgaccttttttggaaaaaagaatgacgagttagatgggaaaaaaatgggatttgtgcgagttggtaggtagaagacgggggcaaagagcggttgaatggccaacaaagtgaccacagaattagtttaatgaagtcactgggtggccagaatccagttagatggactggattttattggtgctatattcatttcctagtgtctgtttgtcatcttttctgccaatttttctcagaaaatccaaatccttgctttagaactcccagactagaaactgatgcctgattttctgacagccgcttggtccttcttagctctgaccccctgccgaacttgatttcatttctgcctgtctctctgatattttcaaaagacaggcattgcgattggctaatgttcgtgataattgattgtactaaagtaagatttaccttacttcctacagaaccattcaaggcatctataggatgtcttcaccattatgcctcaaacctacatagtgggaatttagataccaagcaaaaccatatattattcactcagcaaacatttactaagccccttctgtagtccctttctgcagtaataagtcaggacagtgagaacaattgaaccatcgtgtcttttctgaagaataacctagcctgaaactttcataggactcgaacattagaacctggactagccatcatctggacaagcctgggaagtcatttggtctggcctccttgttttactttaatagtgacagtgagtaatttaaaccaataacatgaaatctaataatgcagtttctaatatccaatcactgcctcctcaatttctcctttaaaattaaataatactagcagtataccagcatgagcccagtggaagtatttggaatgggctcaaggagcaaggagaagtagaggttctagcctggctagtaatcctttgcggggtttgtagggaagaggaaacccatggttgggatggctgtattgaagaactgaaagtcacctctcactgaggctgttcttaacctaagtccagctctatctagctgtactagattttacaacaccaggtcatcattttagaggccaaagtggttgtttagttttaaattttgttttgttttgttttgaggcagggtctcactctgtcgcccagactgagtgcagtagtgcgatcatggctcaccacagcctccacctcctgggctcaagtgacctcccacctcagcctcccaatagctgggactacaggcatgcaccaccatgcctggctaattttttattttttatagaggtggaatcttgctgtgttgctcaggctggtttcaaactactgaatgcaagtgatcctccttccttagcctcccagagtgttgagataacaggtgtgggccgctgtgcctggccagaagtggttgttcaggatcgaattatgctttttacagcacatagattcttcatgacctgcccctgcctgtttttctgtccttgtacatctcctttccttcccttttctaccctgccctggccctactggccatccttttgccccagaaccagctctgcacattcccaccttaggacctgtgcacttgatcttcccccttcttggaatactcttctcccaggtcttctcatggcctctccttcttatcacttagatgtcccctctaatcatcttaaagtctcccttctccatcctaccccttaccctagacacgctagcattttaccttatttggttcatagtaataatcaatatttaaatgatatatttttgttttcatttctgaccccccccaagcagaatatgtgtcctgaagactttgttctgttcactattgtatccccagcccttgggacaggatctggcacaattacttgactctagtctgctgctaatgccacctgggttggtctcagtagtgtgctacagggatttcattaacatactataatggaacataatgagttaacaaattgtattttattaagatggtattcaatttagtattttcacgctatatgctttttatagtttatactgataatgtcagggtctggaatcccacatcttagcagatgacctcctctggctctatatttctgtttctatgaagttgcaagatgactacattatgttcagagatctgcctgttaaaaatgacctgagatatacacgaggcaacagagaactctcctgagacaggagggtaagaagtgcgattccaccagatactaaacattttatcctcctgcctcttaacattctagcagatctctgatcatcttatcctctaatccttactgtttgttttttattttgctttatcactttggaatttggaaaacagagagggcaaataaaaggagagacaaatagagaaaggtgttagaatggcatccaaggcactttaacctgacttggaagtggagggcactatcaaggaagttgagtgcagccttaggaaaccccattgctgggaaaagaagaagataaagagttggcaactcttcccaccaagtctccttctcggggaagtcttcctgatgaagctctccattctcaggtcagttaggactttatcaacctccccatgccctggtgagtactttatttgtcctaaacacattcactttggttacatgttctttttgtggcccctttcaggtcagagtcagaggccctcttaggtgagattatgtactcctgaggaggtcctaagggcttatgctcttcagggaggtacttaggaggtattttatttgctgaacatttatggaacaatgaccatgtgtgaaacactgtgcttgattatgtaggcattctgagagaaacgtctaacttgggacaccaaggagattgcaagagaagagtgcagaataagagagatagctgcttaactttaacgcaaaatagaaaaataagtacatgagaacagcactaaccaagggtgctgggaatctgcctgcctgcctgtctgtctgtctgtctatctatctgtctatctatctatctatctatctatctatctatctatctagagatagggtctcattctgtcacccaggctggagtgcagtggtaatgatcatagctcataagctcatgcagctttgaactcctgggctcaggcaatcctaccacttcagccttccaaatagctaggactataggtgcacaccaccacacctgtctaattttttttttttttacaccttttgtggagatgaggtctcactaagttgcccaagctggtctcaaactcctggccttaaacagtcttcctgccttggcctcccaaagtgttgggattacaggtttgagccactgtgcctggcctggcactgggaatttaaaggaatgaggcagcacatctgatgggggaaatcagaaaaaataccaagaaggaagatgcatctgcagtgcatcttgaataagtgagccaagccagtgtccagaaagcactggcacatttgtggaatggcagtttgattctggtagagaaaagagtatgaggtgatggtgggtacagcagtcaaggccatgaagaggagatggagtcaaaaccaggccatttggttgctgaggtacatggcagttatacatctctagatatttcccccccagaatgttgattctctgtgagcatgtgggatttccacttttttttttttttttttttgagtcagagtctcgctctgtcacccaggctggagtgcagtggcgcgatctctgctcactgcaacctccgccgcccaggttcatgccattctcctgcctcagcctcctaagtagctgggactacaggcacccaccaccatgcccagctaattttttgtattttttttagtggagacggggtttcaccatgttagccaggattgtcttgatctcctgaccttgtgatccgcctgcctcggcctcccaaagtgctgggactacaggcgtgagccaccacgtccggctgggatttccactttttatttctcttgaacttgttattcagttcttgagaggtctttcattttattttcccactgaatgtataattggtattaaaagaagaaaagattaaaaaggagattgagtactgagcatgaaggtcctgaattcatatgggtgagccatgatcagagctgtaactaggaggatttgtttgcagggttaatttaatgtgagaggcaggaaggggcccctgctttgttaaagtgggagttttgatggccctaatctatagaaagtacggtgagggagaaagggaatggagttgaaaatctaaggtaacgctcggtttcaagcctaggaaattgagagaatgacaaggccatgaacagaaacatggaatgagtataagaccgatttgagatggaggatggtgagtttgctttgtgacatgttcaatcattgtagatagagatttgaaggtcatttgtagaagtgaattttgaaaacagaagagtgtttagcactaaaaaggaagaaaagggccaaggacagaaacttgaggagctttcctttggtggcttgttgggggatggagcagcacagtcagagtagtgcaagtgaaccaggggagggcagtggcaccggagctcagggagcccagagcacccaagtggtttggatactgcctgcaacgtggtgggctctcaagaaagtcttttgaactaagctgagagagatgtaagatgatagagatttggtgaatgagtggtgtggtgtccctaatgagggaagcttcagcagagactggggtcagaagccatatgcagaggctgtggaacaaggaagtggtgaggaaagggagttaggttgtgactgtttttggaagtggtttgataaagaaggaaagaggaaacagcagaagcttgggtgggtagcactgcttgggaaggtttctttttaagaagtcaggagaaacctatggcagggatggatggaaaggagagactgaggataacagaagcaacaggataccagaggggtgggagacaatgggatagagtcatactcattaacatacccagcttggcagaggagagcaagccagactgaggaagagaagaacttcttccatctcttctcaggaaaaactgaagtgagggctgggtgcagtgattcacacctgtaatcccagtactttgggaggccaaggcaggagaatcgcttgagctcaggagtttgaaacaagcctgggcaacatggcaggacttgtctctactaaaaatcaaaaaaattagctgggcgtggtggtacacgcctgtggtcccagctacatgggaggatcacttgaacttgggaattcaaggctaccatgagtggtgatcataacaccacactccagcctgggcaacagagtgagaccctatctaaaaaagaaaggaaaaaaaaaaaaactgatgcaaagtcacctgctctcagcaggaaggaatgtggataaggttgtggatttgaagacagtggctaaggattagaacagctcctttggtggaagatgtggggaatgggtctgagatctagagtgctgagcagcagtaaccaggcagaaatgggagaagaccaaggcatggtgcattgggcatgggagcatcagcagccccaaattctgggctccaggtttggcaggaaggcaagggaaagccaggtagaggtgacagagatctggaaatctggatcaaaacaaaagcaggcttatagaaggaatgaggccagatgtggtgactcatgcctgtaaacccagtgctttcgaggtggagacagtaggattgcttggggcaatcagcttgggcaacgtggcgagaccccatctctacaaaaaattgaaaaattagctgggtgtggtggtgcacacatgtattcctagctacttgggagactgaggtgggaggattgcttgagcccaggagttcaaggctacagtaagatatgaccaggctactgccctctagcctgggtgacagagtgagatactgtctcaagaagaaaaagaagaaataggagcagaggaactagggagggaacactattgggtcacttattttctcatgttcccctctctttgtacagtatttaatgtctttttttaaccttagcctcaccctcctcatgacttacaactagtctcttttagtactgttctagattgtgtatgctacaatgtagaaaataaaataatggaagctgatcctaggatgaatacatcctaggctgctacaatttattccaggcatgtgttaagcattttgcatgcataaccttatttactgcttatgaaaactctgagtttaaatactaagcttttaatatttcttcttaaagatgagtcacagagagattagataaattgttcaaggtcacatggcaagtgaatgatggaattgagttttggacccaggtgggctgatttgagccttacctgtgctcttaacgacttttctaaactgcctccctgccaagacctgccacacttgtcatagagcaactgtattgccttttaaaaaaatcactcagtcaaattgtcattgtcattgtcataacaataacatctgaatcagcctttacagtttggaaatcacattatttctttcagtcttcacaagatccctgtgaagtttgcaggcatgtgcaggacaaaggaagagaccttcaactccaaaatctctatatctttactcctggaagtctttgaagttttgttgttccagagctgtgaccagaccaaagaactgtgatatttttttctcttaactatgctaggctttttgttgttgttgttttttaaaactaaaggagttctctccacagaccttctgcttctttccaggtcacagaactctgtatgtgggagttcggatgccgcttggccggcagagccatcggcatcaccgcactcatggccagaagcaccggagacgagggcggggcaaaggagccagccagggggaggaaggcctggaagccctggcccacggtaagggccttgggagacagggcgggtgtccatggcccaggggaatggggaggctgaggggacatgtgactgacattagcagctggtcttgattcttgagcctttttgtaggatttccaaagcttgcttctaagaagaaatgcctctaagagtcaaaaatattttcgtgaaaacttcacagttccgggcggctgggactacaggcgcccgccaccacgccgggctaattttttgtatttttggtagagaccgggtttcactgtgttagcctggacggtctggatctcctgaccttgtgatccggtctcgatatcctgacctcgtgatccgcctgccttgacctcccaaggtactgggattgcaggcgtgagccaccgcacccggccactgtttttaaattttaaaatatacaattaaattgttatttactatagggttatttttatggtcataatacaaattatatgtgagtataaataaaattcatttctaaactcttaatattttttcaaaattgttatatatttttgtttgaacatgtggcctgtctgcctgcaaacacacagactttttgattcacatagagttaaatatatattagtctaaagacaaactttaggtgtaagaaaattatggaataagtgtgtgtgtgtgagtatgagtttgtacctattttcagaagaaaagaacaatatgggaatgaaaatcattttaataaggtggctactataaaaccaaaaacctaaaaactgaaagcaaatgtaaaaaaaaaaaagaaaagaaaacttcacagttctgaccccctaaaatcaatactataataggtaaaaccccttgctagagaattagccaatctttttgatcaaattcatcagttttccagtttcttgtgggttttcttcaagtggtcttcattcataaatttttcctcccatgaaactacttctacagagtagctttttctctgagaataaagaaatctttttcttctgcattcgtggttgtctatatatatttctaaagttgttaggtaaggaagaatgctatttctgttctaagtgtgaggctagagcagacctttctctttggttgatttcctagacacaccatctcagcgtgttcagttcattcttggcaccgaggaagatgaagagcatgtgcctcatgagctgtttacagagctggatgagatctgtatgaaagagggagaagatgctgagtggaaggaaacagccaggtgaggccctaaaatggcctgcatcaagatctgcttgggtaggcaagtgtgtacccttcagcaagtgacaggcctgcctgccttatttcttcttgggagaagctgtgactgacatggggactgacattccagtgtctcctgtggagaattttggtgttggcatctttatgatgtctttggtgttacctatgccagttgacctggagcatgggattggtgaaataacatgggatattcaggggggcccctctcatttgtttggggctcagagtaagtttatgggctatcttggtattattataggtctgacttagaagatgtagacagggccaccttggtggggacctagtttagcagacatagcataggtccagacttcttctgcaggtgaaccacagggttcaaattcaccagcagtcacagagtttttgagactttaacttcctctgggacaattcaagctatctagagacccttgggattatatccagcctgactgtaggcttccggaagtggttgtagaataattatgcttctctgagactcaaatcccagaagagccctcaggataaccaaggacatgtctagggtcctctagtaactgaccagtgaaccttacggatgatgcctgagctttggggaaggagcgagatgggtaattagcaaagcatggcttcagctctcactgaaacagctcttgctgggtgcctgctgtattgtgaatgttatgggctgagagattcaaacaggccaattgacctggtaccaagtgaaaaggcaattagtcttttgttattccatcttggcaaacttctaaaggtcacacaggacaatgataaaaagaaaaatatcattttattaatgtggtttgtcagtgtatccaaatgatatagattaaatctatttttttaattgtacaggtaatgcatgctcattatagaaagtttaagaataaagataagcaaaaagaagaaaaaaattatctgtaattccacaactgcagggttaatgaggaatataatatttggtgtcttatacatgtatgtatttgacttttagaattttctttaaataagaatggaattaaactatactcaatcttgcagtgttctattacctgcttttttcacttatcaatgtaccctgaacatacagattagattttacaatgttcagtatgactatccagatatcttcctctgtggctcacatcgaagattctctcttaaaaattcctcattttctatctttggcatctagttatttgtaatgctttcaggtggctgaagtttgaagaagatgttgaagatgggggagaacgctggagcaagccttatgtggcaaccctttcattgcacagcctgtttgagctaaggagctgccttattaatggaacagtcctcctggatatgcatgcaaatagcatagaagaaatttcaggtaaggttggggaagggaaaacagagcaactttcttataaatttaagaagtgtgggaaaaaaggagtgtggcgtgacagaaagaatacagtgggttgtgtgtccttgggcaagccacaaccttcctggcctcaatgtccttggctgtgggaagggtttcaggctaataaacgactctacctacttcacaggtgtattatggtattcaaatgacatggtgttaagtttccatttgtctgtttattcagcaaatgttttattttgtatctgctatatacttgataatgtgctaggcatggggttatgaataaagttccctcgggtgcagtggctcacacctgtaatcccagcacttcgggatgccaaggtgggtggataacttgagctcaggagttccaggccagcctggtcaacatggtgaaaccctgtctctacaaaaaatacaaaaattagccaggcatggtggctcatacctgtagtcccaattattcaagaggctcaggcacgaggatcacttgagcctggcaggtcaaggctgcggtgagtcaagattgtgccactgcactccagcctaggtagcagagtgagtgtaggggtgggttgcccctacacacctgtgggtgtttctcataaggtgggacgagagatttggaaaagaaaaagacacagagacaaagtatagagaaagaaataaggggacccggggaaccagcgttcagcatatggaggagcccgccagcctctgagttcccttagtatttattgatcatctgtgggtgtttctcaaagagggggatgtgtcagggtcacaagacaattgtggggagagggtcagcagacaaacacgtgaacaaaggtctttgcatcatagacaatgtaaaggattaagtgctgtgcttttagatatgcatacacataaacatctcaatgctttacaaagcagttttgctgcccgcaggtcccacctccagccctaaggcggtttttccctatctcagtagatggagcatacaatcgggttttataccgagacattccattgcccagggacaggcaggagacagatgccttcctcttgtctcaactgcaagaggcattccttcctcttttactaatcctcctcagcacagaccctttacgggtgtcgggctgggggacggtcaggtctttcccttcccacgaggccatatttcagactatcacatggggagaaaccttggacaatacctggctttcctaggcagaggtccctgcggccttccgcagtttttgtgtccctgggtacttgagattagggagtggtgatgactcttaaggagcatgctgccttcaagcatctgtttaacaaagcacatcttgcaccgcccttaatccatttaactctgagttgacacagcacacgtttcagagagcacggggttgggggtaaggttatagattaacagaatctcaaggcagaagaatttttcttagcacataacaaaatggagtctcctatgtctacttctttctacacagacacagtaacaatctgatctctcttgcttttccccacagtgagaccctgtctcttaaaaaaaaaaaaaaagtaaaagaaagaaacggttcctaccttcaaggagctcgccttcaagtgggggaaatagccatggaaataacaattaaaaaaagtgcaacgacagagacatgcttgataataattagagaaaggggcaactggaagttgtgtggaaaaaaggagtaaagagaattaaagactttaaaatatagcatctagggcagatattcaggaacttgagccaaagtgcccctacctcttcagtaagatgtgaaggggagatatctgattgttcttcctgatgtgattgagtgttaagttattatgtttggggcctgaatggagaaacacctggatgcatgggggagttttctcttgaattggttctgtttggctggacaggttaagaaatatttctccaaatctttctctatttcaagtatccaagtcattctgtctctctgggatcataggaggacccaggggaggggtaagcactgatgggacattgggcccccctctttttcagggaggtaccccagaagtatcactctgactgcctgggaaaaatgaaattctcatgttcatcattggagtcacattttgctaacttttgactatttgtctgaaatcccatgaatgttccttaaaaggttgtttgttagggagaagaatccctgggagctattgaagctgtttaaaactctttgtaaacaacagcagtcacgggagagttttggacagggtaatgatcaatcagattttgcatattagaaagataatgatggcagcaatatggagggtgagttgatgggagaaatgcattaggctattgcagtagttcaggtgagatcacctgcactgtgggcagtgtcagtaagggatggataatttttcttctgataactttaagtgataagagagacaggaggtgatagatagagggagacatgaggtggatgttcttttttttcccccaagatgaagggtcctgaagcatgattataatatagggggaaggaaacaatgaatataaaggttaaaaatacagaaatatggctcttcagcttgaatattaaatagattttcctcatttatttcttctagtacttgaatagtcatgaatagaattagaaattgaggataggttcagatttttgggaggcttttgaagaagtgcataggactgaagtaaaagtgctatgattcttcacatcaggtacctaatatgttcataatattttagggatactgataggtaaagtgcctaaaaggaaatcagcactgtatatcatctcatttaatttcctgtaacaaccttttaacagataatatgagctccatgttacagatgaagaactgaggtatagagagattatataccttgctcaagatcacacagctaaaaagtggtagaacagggaaacaatgtgggcctttaactccagaactcatactgataactgctatgtttactgccacttaacactaggtattgagatttttttcctcctcaaatctgttgggcttgataggtttaaatgtgatgcttggtggtaattgtctggggtgagtggttagttaacttaatttttcttatagatttctcttctaaatagccctttggagttctacagttatagttcttcttgacaattacagcaatgttaaaatcttggaggaagggaatgtaggggaaatttggcagatgacagaacaaagcaggtaataatgtgagctttcaaattatacagtcctcaatttgaatcccagctgtgcaaactgctagatgtaagaccttggagaattttctagcatttgggccttaatttcctcatttgtaaaaattgttgtactagtgctcaatagtttctatgcccaataagaataatttgttacatgaataaagtataacttttcacagtcactatcatcaaatggcactttcagacaggaagctgaaattgcacctcaatgaccctagtggagctgcttccccctactccatgccctttaccccactccacctgatgttggccttcttgggttcattaaccctcaatctgagtgttcatgtgagtgcctactttccagacctgatcctggatcagcaagaactgtccagtgacctgaatgacagcatgagggttaaagtgcgggaagcccttctcaaaaagcatcatcatcagaatgaaaagaagagaaacaacctcattcccattgttcgctcctttgctgaggttggcaagaagcagtctgatcctcatttgatggataaacatggtaagattattaggtgatttttctctctttattaataagacattgggaactagttggagatgctgacttactaggggtgggggctgtatttgtctaatatgtttccatgtccacttaggcacttagtactttttggagactggtaagattggtggctgggactggtgctcatctctctctcacggcattcctcagataggtctcagcggacccaaggtgagggacttatgccccagggtggcctcagaactgatgtagcttttgagagatagccacattggggacaatttgagacccgagaaggtaaactggagctttttaggagcaaacaaatatcttagattagggaggcaaaatacagtagagtaggctctggagtcagacttgtaggcttgtgattgtggctttaccactcacaaaatgtatgactttgggcactctactaagcctctttaagtctcactttcttacctataaagtaagagtaataataggacctactccacctactccatttattgtgaacttcaatgagttaatccatgtgaggcccttagccagatgcatggtggattataatcactcagaattttggctactgattggttccttttcctgtggccaggaagggtctcatctacatttatttcctggtctctactcatagtgaatcaccatgtgcaggggatatgcctgggaatctatatttttgaaaagttttccataggggtctctcatatgcatgtctggtgaaggattactgccttaatagagaaataaaagagggtcataaatgtgttcagaaagaaggtgcagaagtagcaagagctctgtcctttccttaccactaactagtagataaggagaaagatgtgtgtgggtcttgacttcgtagtcatcttaacctcttttctagataggctttgcaggagaaggcagaaccaactgatgatgggtgggatgtgtcagaaggggaaaagggcagggactcaggattttgttttattttctccaaataggtcaaaccgtgtctcctcagtctgttccaactacaaatcttgaagtaaaaaatggagtgaattgtgaacatagtcctgtggatttaagcaaggtgagcagagtggtgggaagttggcttcaaggcctaaggttccttttagtggaatccagagtttaattgctggaatttgggtaaggtttagtgtttcaagactctttccctaagactagagccctttctgcataaaagggggcccatctctgcatgtcttttcccttctccttcagcctggatgaagctgactcaacagtttctttctccagattcaacatactgaaaactgggactagctgcttagaatcttccctaaaacagatctcttgatttttcaattatttttttggtacctgctctccagcagttccttctcacccccaggggttttgccaaaacaatattttggatatctatttagagacagatgtctcctaaaactaactcttggttgaagctctccttgaggactgtgactttggtatctgaggccttctgtagcagcagtgtctcactgcagcttatggtccaagccttggtctccctgcctccagcctctccttgctctggtctatctttgacactgtgtttctaaaacacagatagtgtcatatcacttcctctgctcataaggcttcccattttatttggaaaacctgaaacccccgacaaaacatttgagtgtttaaaaagggaaagaatgtgacccagagcttcagaaacatttctcttggaggaagcttgggggaatgggattgaaatcagaatacctgattttaaaatccgaacctataccttaaaagctctgtggtcccgggcaagtcaacttcacctctctgggtttcagatacttcattttttttttttctttaagtgggacgaatacaatctgtcatatcctccttctggggtttttgtaaggatcaaataaaataagaaaacatttgctaaccataaaatgacatatgagtgtaagatatattttaggtgatggggccaggtgcagtggctaacgcctgtaatctcagcacttttggaggctgaggcgggtggatcacatgaggccaggagtttgagactagactggcgaaaatggcaagaccccatctctactaaaaatacagaaaaattagctggacatggtggtgcatgcctgtaattccagctactagggagcctgaaacacaagaattgcttgaacctggcagcagagagctgtgagctgagattgcgccactgcactccagagtgggtgatgtagtgagactctgtctcaaaaaaaagtaaataaaaaatttaaaaacgatatttaaggtggtggttcccaagttgtcagatgtttcttttggactttcaggtagaccttcatttcatgaaaaaaattcctactggggccgaggcctccaatgtcctggttggagaggtggatattttggaccgtcccattgttgcctttgtgaggctgtctccagctgttcttctctcaggcctaacagaagtgccaatcccaacaaggtaaaggcaaagataaaactcatgcattctatccaaaattcaaatttatgtagtgctggtagaagaaaccacttaatactgaaatttagaattaattaattttaggaatggtgtttacaattcagcagaaaagccagatgtgctggtgtgtgcctctaattccagctactagagaggctgaggtgggggattacttgagcccaggagtttgagcctgcagtgagctagaatcctaggatagcaccatggcaccccagtgtgggtgacagagtgagaccctgtctttttaaaaaaaaaatcagcagtaatctcagaaaattgaggtatatttgattaaccaccatgaagaggaattctgagatttatttctaaggctatgactgcacagtatctatagccttggaaatagagaattgaagaccattcaaaggacatagcaagggccaataacttgttaaaataggaagccaagtcttatcttctcagttctgtagagccatattccaggggaacgtctctgaataaaggtatttgtttccctttgcacaattctggcatggtttgtatggtttgcagatatgcaaacatttgttcaaaaggctattcatgcgctctgaaggtggtgatgctggtgattcagagccctgctacttacagagagtattcagatgtccagaacacatttagactcctctgtaaggcttgatcatttcaacttccttatccctctcctctccccatcattttctgattagaacaataagtggaattcagacaaccttgaatttgcaccacagtgccatgttttgaaaaagcatcttttctacagctaggaattgtgtctatggaaaccctaagaaatgtaatcacattattgaatgatgccgcacaatagcttccaatgcccatagtggagctattattaggtcaaggcaactcaaagtgctccttcattactgtcttcttttttttttttgaaggtacagtgatgatttatgtacgataagagagagaaatcttatactgtttagagaggactaatggcacttctttatatttacttacataatttcctcctctgtgtgttttgccagatttttgtttatcttattgggtccagtagggaaaggtcagcagtaccatgagattggcagatccatggccaccatcatgacagatgaggtatgtgcaacttttgcttcagtcttccatctcataaatatttattgaatatttactctgtgccaggcaatatgctagttattggggataaaatactttccattgcaatatctgctgggaagtagttcagggtacttctctgagagcccagtgtggaaggaccaagctctagaggatttttcttcctatgttatctctccttttttgagtaatcaagaatgcagagaaatctttttctggggaaactattattgccaagtaggatatatagagaaatatattaaggttggcttaactttcaagagaagatggttaattaaatacattcaagctatttacataaagaaacctcactcctgttccactaaatgagaccagtttgtataaggtcatgggtgtgacctcaggcagtgtagtgtgaatgtcttgactagtctgtaccaaaacaaccagatattttgacattttgacattgaacccacagtgcatactctggtaaggactgcactgctcggtaagctgcaaagtagggctttcaaggcatatgccttaggcggcagagggaggtgtggcctgttttttatcagctttctttgattgagaggcttaattcaggaaggaccttcattagtaattccatccagtgtttccaacctttaagatcaagaaaatttccctctcaacgtgggaaagctgattaaaattttttttttcatatatcttgcctttccttccatcctttgtggagataacataattgtacaactttagactcatgtcttatctcttcttatactagcagacatgtatttagttcttttaatgcatctcatttccacgcttgttttttaaatccttttatccttgcacttctctaagtgctaaagttttctgcatctcagatccccgtgacagagataaaaatcaacaggttgtattcatttttcaccatatccattggtgattgtttcatgtaaagttacttttaactttcctgagggttttctcttctctgtagatttttcatgacgtagcatataaggcaaaagagcgagatgatctcctggcggggattgatgagttcctagaccaggtgacggtgctccctccaggagagtgggatccctccattagaattgagccacccaaaaatgtcccttcccaggtaatgtatgcacatcagccaatgtggctattgtcacttactgactgcccaccatggacaaagcaaagaccatgtgggtatatgctaaatatatcaagatgcagctctgttttggtgcacctagaatatcaaaacaataataaaaatgaatctgggctgggtgtggtggctcacacctgtaatctcagcactttgggacgccgaggcaggtagatcacctgaggtcaggagtttgagaccagcctggccaacatggtgaaaccccatctctactaaaaatacaaaaattagctgggcgtggtggtgggtgcctataatcccagctacttgggaggctgaggcaggagaatcgcttgaacccgggaggcggaggatgtagtaagctgagatggtgtcactgcattccagcttgggtgacagagcgagactccacctcaaaaaaaaaaaaaaaaagaatttgcatagcataaattggctcaggtgtgatggggtcagtcaggattacctgggaatgaattttaagccaaattttgaaggaataatgtgaaatagaagagagaagggagaacatttcttgtgactacattgtatacaagtcatcaaatgaaaaaagcaagttatatagagagagcagatagaatgtctgatatttttctgacatattagagatgggaaaggaactcctactgtgtattagacagcagccaggtgctttatatatgcaaattcagccttcccaggaacatccctcaaaagatattgttatctctagttttacaaaatgaggaataaaactgtcttctagggcaagattttaaggtaaagtaagattacacagaggcagatatgaaactggaacttaggtcatatctaatgccaaagccccatttttctctttctaggcaaggcttagttaggagtcaggtactatggaacaggaagagaaattatggggtgtgtgtgtgtgtgtgtgtgtgtgtgtgtgtgtgtgtgtttcggtaaagtcaataaactgcatcaagtcagtaagtgtatttgaaagctacaaacacgggcatttttggttgcttttgggttatcccattcccactccctgctgatagcaggacgaaaagatagatgttacctttactaattttgtggtcttctgttaaaaggagaaaaggaaaatgcctggagttccaaatggaaatgtttgccacatagaacaggaaccacatgggggtcacagtgggccagaacttcagcgcactgggcggtaagtcctgggacgtttcacagcgatgctgcttattgggtagaagttatgcaaaggaatgaggcatcttctttctttcagcctacttctctgtggtgggaatttattggctgaagaatgacttttcaaatggaaccactgactagaagtattatgaatatatcaaatatcgtattcattcattcaagtttctcaaatcacctaccatgttttgtctcacctccagtccttcctaccattgttccctctgatttgaacactcttccctttcctcatctcctggctaactcctacgtacccttagtctcggttcttgtgtcacttcctttggaaagccttctaggactctctctggatgaggttaggtgttcctgctatgtaatatcacagtattgagctctgaccctcccttccccacattacagcctttatcatacttcattattattggttgatctattgtcttttctgctaggctgtttattccaaaagggcagaggctctattatattcctaggacccagcacagtgccctgaacagagtaggctctcaatgtctgccaaatgaatgaatatttttagaataatgtctgttctgtagcatggaatggactaggtatgataaatgttgagtgatcattttaggttaagaaactcccttagggtaggaagataggtactattttaggtgtgtgtgcctcagaataggcaatctactcttctaggccaacattttaaggacagatgtccaaggaggaggtaagtgagggaagcaggtccccagagtaggaggttttattccctaggtcagaaggtggtaaacgagaatgatattttgggttagtgtgatatccaggggtgtccccagagaaggttgagactatggctctgtctctgttaagctgtgctgtgtctaagaaggttctgctgggtagagattctcagggcaggactgagatcatggaaattagcttttatgtcctctaaccccttgctttcttcttttctgcctccttgcttgaggttgctttccttactcttctatcctcagcactctacccagtggaaactcagagttgttttggaattgtggaaagcattttatttttccaatcttggaaattcagggagaaaccaggagaggagacagaaacaggagagaatggcacttgactagcagtgtcctgcagagaagcatgttttctggtaggaagaatgtattggagggtaggggaagatagctgtgctctgggagggagcattggtggaaagaaggagtccttgcaatggaagggccactgaaaaggggaagcagccttccctttttaaaaaacattttctttaaagttgggagagatctgaattgggtggggaggcctggtattgagaggcagttcaagggaagcatatgtcctcagaaggggttccaggattgagactgtcctagaggaggtggtaatttttttcaggaaaaggttttgagtatggatttgatatttcaaaattataatttatcttttggatataaagggtgtccacactttaggaacttagaatttgaaagtagtagaatttagggcaacaaggttttcctcaaaccaatatctgtgcagagatgagattttaggttgctctttgtgccaaagaaaacaaatagattagcatcccaggctttgtgagaggtggtcacttataatcaattccacctgagggtttgggagaccattatattggatctcaacagttataagatcttggtaatggtgtctgatgtccccaagaaaatcccatattgccaggatcatcatattcttattcacaaaccgcaagtatcttaactcacaaattcaaatggagtttgaaggagttctcccataatgtcatgtcaggaacttctggaattgacaaagctaaaaggaagctctgggctcagagcttagctctgcttgatatgggagatgcttcctctttctgagcttctgtcatttttcttagagcccttagtaaagggcctcaagccatatgaccttcctcccattgtagccccttaggcaaggtgacataatggctgcatagagaatcacatttccaggccagctctggcctctttctcagtctcaaattatgtgggaggtaaatgtgagtcttttttgtatatggacatcctataagtttctgtactttcctggactgcacaaactaaaaccacattagtctgggttttataatttttcggactattagttgtgtttcttggagatgcaaaactgctttatgcttgtcatgttgcacaaccttggagcaagacttggataacatcttacggaatgttatccttgttggatggagaagtatttgaaggcagggtgaagtagactctaagaagatgggaaaggagacaaaattgaaatggtactctgagttctgtatgatctgaccctccaagccagggttaagacagatcttaaacctccctgatattgactaaggcagggatgccataagtaacaaagaaggaaatatgactagagtgttcctaggccggaagctccacagcaaggagggtgctctggaaaggggtttttcagggtatatttctgtcccttattggggatgccacttttgggaagggttaatggaaaaaagaatcaggagctgctatctcgatgatccccccacacttcaaacaggtttcttccaaagtataccagacaaatggatggctggcctgtttctaaagccctccagggaagggctccttaagtcaatgctccagagcctagtgaccctctacgcgggtaagtcctctcttgcatcaaacttaaactcatatccctgtgtgcctcctgccccagaaaacttgaatgtgaagggcagtgttgaaagggaaaggaaatcccaagtacagaaagaagcatccatgcctgatgaatatctgttgtagatgtgcaatcatagtctgattttatgcatgaatgaggtatgaggctgactccataaagtgttcagaaattattttattaatttatagttataccatccatatgagcctcagatctttccccgccttttaataactgctagactgacagatgtcttccctttctatggcttcttagaaatccatttcacataaatcttttgtctgttgctcacagacactcctgtcctcctgtgtctaggggctgagtattcattgcagcatctcaggtagcctcagagtatgtgtgtgtgtgtgtgtgtgtgtatgtgtgtatgtgtgtgtagggggtcactattatgcagggatattttctcacagaattatgctttccagaggaaggtgactggtaatgaagaggtaataatcgcatggtaataagatgctatgttagctaagaacccaggaatacttgagtcttgccccagataaattattgctgcctgcaaggttattgaggggctatttacctagaggagaaagcaagacaaagtgacactttattactaactgaagcattggtcccaaaccctgaagcagaattcatgatttaggctagaccatgtagatagcttctttacctgagctaggtttgccagataggctaaaactaaggcaggtcacaaggctggctttgcttctcttccctaagcccagacccagattatgatgttactgctgtaagctgaggaaaggtgaatcccaactatacccaccagaaccagaggaaaagagcaggtgggtgtctgtcctgtgtccacctggatacccattatactagctagatgagagagagtgttccaggagaaagagctggctggatcttctcccctagcatacagatcccaggcctcctcatactcctccaggcttctaggtgacagaaggaaagaaagagcttgccaagcctccttccgtgagagagtagcttgtgtgttttttaaaaatagctttttattatagaaaatttcaaacatataaaaaaaagggagaatagtttaatgaacccccatgtacccatcaactattaccaacattttgccaatcttgtttcatctatttcttctcacttaattttatttttatgttttctagattattttaaaccaaatcaccgacatacattttacctgtaaatacttcagtatgcatctctttaattaggacattaaaaaaattatcatgccattatcaaatctaacaaaattaacaatcattctttacattgtctaatgctcagttcttattaaactttttatgattgtgttagcaacatctttttagagttcatttgtttgacataggagtcaaagtttgcatttggttattatgttcccattctgtaatagtcccttttcctttttttctatgccatttattggtagaagaagccaggtgatttgtgctataaaatgccgagtggctctttttgttattcacctgacagccctcaccctggtgcagtgactccactcttagaaaaagtgattgaattgggaacacatctcctccttagggatattttggtcttggtctgtctcatctttgagaagaggagaggggccctgaagtcctgccaccaagtcctgttgattctacctcctgattagctcttgaatccatccacttctcatcctaatctatgctccattcattatactaccacagagtggtccttccagaatgtatgtttgattatgtcactcttctgtttatagttcttcagtaacttgacatgctattaggataaagttttaattccttaaaaccatttctggccgggtgtggtggctcatgcctgtaatcccagcactttgggaggccaaggcgagcagatcatgaggtcaggaggtcgagaccatcctggctaacacggtgaaaccccgactctactaaaactacaaaaaaattagccgggcatggtggcaggtgcctgcagtcccagctactcgggaggctgaggcaggagaatggtgtgaacccaggaggcggagcttgcagtgaccagagatggcgccactgcactccaacctgggcaacagagtgagactccgtctcaaaaaaatatataaaaataatgaataaaaccattttttaaggcctttttgacttagcttctccagccttgtctattggcattcacccttcacactgtattatccactcatatctctcagcaccttgatccaccaagcactctcacctctaagtgtcacccatgttggcccctctgcctcatctgcttaactcccagtccctgcctgaagtcatggctgaaatgcccctccctgctctatgccaccatagcaccctcacaatactgcctgtctcctgcactagacttggtcctggagagcagggctgttcatgtcttgctcattgccgcatctccagtacctggcacagtgcttggcaccaagtatctgctgctacttgtcaattgcatgaatgaattattatatacatttctcacaagtaaggggggtagttgttcagagtaagaaagtacatgtgataggggcttttttatctagaaaacatttaataaaactagtaattttaataccttaagttggttttgcacatttcctcctaacagctcagaatttaaagtctgaagctaatacttgctttcgtgttaatttttttgaactttttattgaatggataatacgcatatctaaattaattctttgtatgtttaggatattcattcaaatttacctaagtcatacccttggttgcaaagagactctctgctgacctaagagagttatctgtactggggtcaaactgaagccaaagtcttaccgctgaacagagcacatttgaaatgctttcaaatgtgtgctgtttacatgcttttagggaagacggactgtgttagaagcctgtctgttgtgtttccacaggctatttgggggcttggtgctggacatcaagcggaaggccccctggtactggagcgactaccgagatgcactcagcttacagtgtttggcttcctttctgttcctgtactgtgcctgcatgtcacctgtcatcacctttgggggactgcttggagaagccactgagggacgcatagtaaggacttttaaccacttctaatgatcccaaacaagacctaaaatattgtggcggcagccaggtccaccgtgggggaaattacttggtctaggactgaagagattggatttttcctctgaattaccatggtcttctgacatcacaccaaagagcaacacagtcctctctttagaacagactcttctgcttgaacatcagcttcagtagctggttgcccagttgaattttctgttgcctcagtgatggaaaatggatatattgatgccatttcaaaataagatttaaaatgactctgtatgtgagcttgtagtgtgaatggtatcactgtgctttctgtatattttcaaatactgaattgagtcactgaagaataggagttagttaaggaatcatgtgtcaatggagctgggcacctgaattattaaagtagtatctgtttacaggagtattacatggtgtgtacacatcactcttgctaagatgaaatacaagcaaatggccatcaaggcacacaggagagcaaagtcaggaatgtagctaagccaacattactctgtactgatgggctatggactcagtgatgactttttttcctctcagagtgcaattgaatccttgtttggagcttccatgactgggattgcttattccttgtttgcgggacaggctctcaccatcctgggaagtactggaccagtgcttgtgtttgaaaagattttgttcaaattctgcaagtaagacatttgtttttctgaaaactctaaccagatttagtgattatgctgccaggattaaatgtcagggttctactcagtacagacaggcaatatcattttggattgtaagaaacctgaaaggagaccatcatttggtctgttgtcctgcccccgggtagcaccatacccaaaatagcagatctcctattgttaaagagcttgattaatattcctcagccattattgaagtcttgactttttatctttaaaaagactttccctagctaattcaaacttctccatttccattgtgagtcaatttttaatttggcctaatatcctccccctgctgtttttttttgttttgttttgtttttttgctattgatagtggggcacaagagtgctctggtttccctaattttcctatacaatcttttcttttttccttttatatttcaagtagcagctcatgggactatggccagcccctttttttcttaactgcaagaataagatcataattacattaggtagtaatggcaggaatgtatatgagacaatttctttttttagttttcgtatccttgcgcatatcctgtgaggcaaatctgtatcataactgtgccagagcactatttagaaggaaaatacaatcagaattagggataaactgggttccagtgctcgtttagatgaaatgaattaaccacatttctgactccttgtctcttaatgccatccatccatgcgttctgatgaactttggtcttgtttcagagactatgctctttcatacctctccctgcgagcttgtattggactgtggaccgctttcctgtgtattgtccttgtggcaactgatgccagttcccttgtctgctacattacccgtttcactgaagaagcatttgcctccctaatttgcattattttcatctatgaagcaatagaaaaactgattcacctggcagagacctaccccatccacatgcacagccagctggaccaccttagcctctattagtaagtgtgctttctgcttatttttaaaaattgagcaaagggcctgagtttaattgctgatgtagagtgctaggcagtgcttacagcttctggtcaagaagtgtcttgccctttaggaaacggatctcagatacagacaaggagtattggagggctgccagaggagaacaatcaaaagtgttgacagagaagatcgactagaagtgaaacacgaaggggactcaagaaatgctttccagaccatgtcttttggttctaggcactgaaacaaaaatgggctgcaaatgtagcagggagaatttgagttagttatggggaggaacttctttttgcaaggactttgtgagcctctggactatgttatcaagtgagagaatggactctgtcctttgttgaaatgaaggactctctttctctgaaagtatgtacaggcaactcttaggaattattaggtgaagatatattaatcattcctttcagatccagaagtgtctcacactgtatcataaagatccaggagcctacttacttcctagatttcaacttaagagattatgatttctttatgtgttcaatatggtttggatcacttggaaaagaaacacggtacctggctgtgttttcaaccatctaggacactctggtcctataaacatttcttctctggaatagtattctccaaattatgactaaagatcctcttcccttagctctgtacatcaagttctggctgtacagttctgatgtggaggatctggttgtgaaatgaacaacttcagtctgaaactgtctcagaagagagagtacactttctggaggcatctgcggaccagcgacagatacactttcatctattctagttattcactcattaaccttttaaaaatcagaattaataaaaaatttattagaactttattttactagaaagtaacaatgattagggagtatcatcttcaaagcctagtgaattggctcctattggcattagagttctcatttctgtaaggttgattctttgacctctttttatcattattttctttgtttaacaaatatttattgagcacctattatgtaccaagcaccattttaggccttggaaacgcagtggcaaacatgacaaaggatctgtctttatgaggcttatatctgagaagacaggcaaagtgaccagccccggattgagtagactttggttccagaaacaaattctttgttaataaagctcaagatgatatttttttttagttgcattctactgttatttcatatggtgctgatgtgaagctagaactccttaactctttaaatgattttatgttaatatgtatgtaattgatttttaaaaaatagagtttattttttaaagcagttttaggttcacagcaaagttgaacagcaagtacagagagttagcatataccccctaccccagcacacacacagtctcccccaatatcaatatcccacaccggagtggtaagtttgttacaatcagtgaacctacacagacacatcattgccacccaaagtccatagattacattagagttgactcttggtgttgtacattctatggattttgataaatgtataatgacatgtatcctccattataatatcatacagaatactttcacttccttaaaaatctcctgtgctctgccagttgctctctccctacccccaactcctaacaactactgacctttttatgtccttatagttttgaattttccagaatatcatagttggaatcatacagtacgtagccttttcagattggcttctttcactttgtaatatgcatttaaggtcctctgttttttcatggcttggtggttcatttcttcttagtactgaataatattccattgtctggatgtaccacagtttaattatttggaattgatttttttaaacctaagtatagggctttatagctttccctattacttttcgttttgtcaatttcttcctattattctaacctgtcgagagctttttgaattttaattcagtcatgccgtatcttagaaggcatgcttattaaattcacagaccatacaaagttagtggtgttggctgtgtcagttgaccatattgggagccaggtcaggcatgaagcatgctgggactgggaggcaacatggtggccaatggcacaggtgtggtctggtctggtctggtttggctggagtaggaggcctggggaagctaatggagtttctaggtctggctctaccatgagcggccagggaatggccaaggtagtggggtattaccaaagataactcagtgtcagaaagtgcttacatcacgattccaggagactctgacttttagaacaagagcatgacgaagggtatagagaataagatattcaggcttggaagaagttattgagaagtaagtgggatatcgagacctccttgctatgtagactaaatttcatagcaagagcctaagagatagaaatcgggcaaaaacaaaaacaaaaacaaaacaaaaacaaaaacaaaaaacaaaacaaccaatcaagactcattctgggcacatcagatgccaaatgtggttatcagcacagtttaatccaagacccatgggctgatttgagtcaaacttttgtaatgactgactgaaaaattagaatgtgatggggcctacagaggggcctcagctcctcaggtctgaagtatgcaaagaagcagcaaggcagctcctgacagcctttaaaccagttgttctaaaaacatttaactgagtatttggctgttttcctcaggaatctttttaatttttcccctcagctgcaggtgtactctgccagagaatccaaacaatcacaccctccagtactggaaggaccacaacatcgtgacagcagaagtccactgggctaacctgactgtcagtgtaagtctgggagctgccagatgtcctagcattgtgaccacaggtttaggagggacttctaagtgaaggggaggagtagccctttggccaaactctggcatttaccgaaataaagctttttaaaaaacaattcttactcactttcttttatcctttcagaatttttcttgtatgttaagggagaagattacccttctcttttctcccccctacatcctacccagtgaccctgcactaaggataggtggggatgaaaccatgcaggacagggggcagatccagacatgtagggttgaagaatgttcaagtttggaggtcctctgtgataagaaaaatataagttgccagggtccttccagagccttggaagtagtattgttcagaacagttctatgtcttaggaccataagtaaccaccctacttgaaagtggcctgtgcaagacagcaccccgcaactgcataaaggtcaaggggatgctgcttgcagcctctgctcccaacaaccatgggatgacaatgagtggtggactcagtaggaaacagctatttatttggttgtgtctgcctttcatcacccagaatgcttattcctccaggaatgccaggagatgcatggagagttcatgggatctgcgtgcggccatcatggaccctacactcctgatgtcctcttttggtcctgtattctctttttcaccaccttcatcctctcaagcaccttaaagacgtttaagacgagccgttatttcccaaccagagtaggtagcatgttcatgcatttctttcacgttagaatcaaatataacagaaccttttctcagccttcatgctgcttatggggttgattggccaggtggagaactccggatgtcctgatgagccacactggcattctctcctagtgtctggcagcctctttcatagatctgtggttgggaatgaagggttaatacttaaaacctttttggtttacaagtgccagttaaggttaaggtggtagtgatggttttttaaaagttattaagtcttatttccagaatgctgttacgtttcatttccagaattctgagacacttaacacacaatagctacagctggctcctgaatacagtaaattgtcattgtgaccttggatactttaggggacccaaaaatcttctcccagggatggcttttttaatagcttatgaaatcactggcgacactgactgcagcaaccagcatgctcctgacttagtttgtatgactgtttgaaacctcagcaacctttccatgatgcagatagcattgtttgtattatgagcaaggcttttgccagttttggcagggcaagattagaggctgagtgtggagtagctacatgggccatttctttgaaagggaacttgagaaggtggagaatggctactgggacctcatcacagaaagttaacactgaaaagaataagtgcatgaattatttacatccttcagtcacatggaaacatctataataaatgaccattacatttgccatatcaaaaatataaaaggaaggtgggtgatctacagtgaccacaaagtttgtgccacagaagggccccctgaaggcctgggttacatgtacttttaccacagtataccaagctaaacctcaaacatacgaatcagtgagaagaagccacatacctttttaatttgccaaaaagttagaacagccagatatgaagaaatacattgtgtatttgtagtttatttaaagaatacactcatgctgggcgtggtggctcacacctgtaatcccagcactttgggaggcccaggcgggtggatcatctgaggtcaggagtttgataccagcctggccaacatgctgaaacccatctctactaaaaaaacaaaagttagttgggcatggtagcacatgcctgtaatcccagctactcgggaggctgaggcatgagaatcaattgaacccagaaggtggaggttgtagtgagctgtgattgcaccactgcactccagcctgggcgacagagtgagactctgtctcaaaaataaaaaagttaaaaaaaaaaagagcacagtcatttgatgccttctgatatagaactgagaagaaattcatattagtgatgatacactattgtagatagttttaataaatgtttaaggagaagataatataaaaaagggtgttcattttgctggcgagagatctaccatcagtacatcaaaaatggggatgtgctcccagtcctctattgggggataggtgctagtggccttcagagaaacctatttatgtggccagtggtgtggccttacctgcagtaaataaaaaaccttcttggtgtttcatatagaaaatcagccattgggcggggcattatttacggcatttttttttcattgcacacaataatttctgacctatacatgtataatacagcattttcttgtttttctttttcttttctttttttttttttttttctgagatggagtcttgctatgttccccaggctggagtgcgatggtacaatcttggctcaccacaacctctgcctcccgggttcaagtggttcttctgcctcagcctccaaagtagctgggattgcaggcacttaccatgcctggctaattttgtatttttagtagagacggggtttctccatgttggttaggctggtctcgaactcccaacctcaggtgatccgcctgcctcagcctcccaaagtgctgggattataggggtgagccaccatgcccaaccaatacagcattttccataaaatatatttttaatttaaatcatacaaaaattcataatatgattttgtgaatgtgtgtgaaagtgtgagacctttacatttcactacaaaacctgtgatggtttggtttttaaaggctaaacggttggtattaagcaagtaaatattttaatgaaactataactcaggaacagtttaaaatattagtttcccacttagatttcaaggcataaaaagggctgagtttatccctttaagtgctgtcaagaattcacttgggtttgtgatatttggtggtacaatgccaaatgcccacagcagcattatattgtactttgccaaaggtagacagaggaattctctatttctcagcagtcgtttccccaaaaagtataatgtttatttttagttaaaatagtcttgttttaccataccacatgatgactccctggaagttatcatgtgaagttccccaaattagtattttctcatctctgagctctttgcctgactccatttctacatttttcaggggccagaggctcatctctgccatttttccatgtatcgcctcctgatttgacttcactgattatctgctgtgactagcagtgttattttggatactttaagaatttcagatatggccaggcatggtggcttacatctgtaatcccagcattttaagggaggccgaggtaggtggatcaccggaggtcaggagtttgagaccagcctggctaacatggcaaaacgctttctctactaaaaatacaaaaattagctgggcatgggccgggcgcagtggctcacgcctgtaatcccagaacttgggaggccgagatgggcagatcacgaggtcaggagatcgagaccatcctggctaacatggtgaaaccctgtctctactaaaaatacaaaaaattagctgggcatggtggcgggcgcctctagtcccagctactcgggaggctgaggcaggagaatggcatgaacctgagaggcggaggttgcagtgagccaagatcgtgccactgcactccagcctgggggacagagcgaaactccgtctcaaaaaaaaaaaaaaaattagctgggcatgctggcaggtgcctgtaatcccatctactttggaggctgaggcaggagaatcacttgaactcgggaggtggaggttacagtgagccgagatcactctactgcactccagcctgggcaacagagcgagactccatcttaaaaaaaaaaaatttcagacgcaaagaaactttatatgatattataaaagacagtcctttccattttggtttatttcagtattttagttgcaacctgggattaaattggagtttcaaatgtgatgaaaagtagaatgataacattctgtaattttcctactgctctgcaccaaattccagagtctctggagtttgtatttcaaattactcagtcgaatgaaacaggatttattgctgtctgcttaacatatatttgtttggttgaaaggatttttccagaaactgtaggaaaatgaagcagaatcaactgggtgaaatatagtacaaacattggattaggatgtggtgaattgtgaacaatcaggattctggttgtgactggggcccctgtctcataggagcttaataccatgtgagccagggacgcagtgtccaaggcccatggcctggagacctggatgctggctgtggaccttgggcaagtccctcatcttccctgtgcctcacctcatctgcacaatgatgtgatgacacctgccatctctttccaattatgcttcaaggatgcagtgagatttgatatgatgacccaagagtagaaggtggtgtgccatggtgtgtcctagtttagcatgctccctgccttctcttctctgacattttattcaatttgggaacagatgggattggcaggaggggagctcatggtgtagtaatactctactaaagtgtgcctattggtattaccttctaatgttgagttggatttcctaaagcagcccactttgttactgaagttgctgactcctgtggaaatccccatactaagcagccttacaaaatccagtccccatagaataatgactccacacaggcgtcaaaaatggattgtcttcaattatgttacaaagcaaacacctttttgggggatggaggatgattgggtgtttggattgaaatgtagacaaaggggctgggtgcggtggctcatggctataatcccagcactttgggaggccaaggtgggtggattgcttgaagccaggagttccagaccagtctggccaacatggtgaaaccccatctctactaaaaatacaaaaattagctgggcgtggtggtgcatgactgtaatccccactactgggttgaggcacgagaattgcttgagcccaggaggtggaggttgcagtgagctgagatcgtgccactgcattccagcctgggcgacagagtgagacttggtctcaaaaaaaaaaaaaaaaagaaatgtggacaaatatagctagcaagtgtattttgagcaaaatacatattttataataaaattttataaataaactttgtaaaatcaatggtataaaatcaatatttaagattataggctatatgttacttaatttcattaaatagaaaaagaaattcagcccttctgatgcnnnnnnnnnnnnnnnnnnnnagggctgtttctacaaggccaagttttgtataaatggaatttttttttttttttttcagatggagtcttgctctgtcgcctggctggagtgcggtggtgtgatcttggctcactgcaacctccgcctcctcccgagtagctgggactacaggcacgcaccaccacagccagctaatttttgtatttttagtagagacggggtttccccatgttggccaggatggtctcaatctcttgacctcgtgatctgcctgcctcggcctcccaaaatgctgggattacaagcatgagcctggccaagtgctattctttatttcagattgagagttgggaaaaactggagcaaataatggatttctttcttgcttaaaatgtatttatatgtatgtcttattatatacaaggcagatttccctggaataaaagtctagaatgtactgcttaattttacacatgtgtgcaggcaatattatctgtgagtgaaaagtggaataatacgtggattgggtcaactgattatcagcttgttaggagtcctctgtgtgagacatggtggtataattgtgaagttctcactgtatgtggatgttcatgtgaaagatagtactttcttcccgtaaatatcttttgatttccatttgtatggaatcccaatgaatgtatctttggaaaacataatgtgtcaaaatttgtattttgttcattgatctaaatgcccgtgtaactaatcagaaatccaatttggctcagattgggaattttcttttaaaggaaaaaaatttacagaaaagactactggaagaatcatgttcaaatgacatttcacatcaatgtttcttcaatattttggagttgacttggttgttttctcctacctacaatagaatgtgcctgctgtttctctgtcgctcactttgggcttgcaggaagtacaacgggaatagcctgagcttcttgctccctgtataatttattcactttacctgaactgccttacctgcagttcatagtgagaacacctgggcttgtaacttgcctccacttttaagtgtgatagggccaagttgctttacctctctgggcgtttttctttaaaacgaatgggttaaactagatgagctcagaagtcccttcctgccctaacattatcttctatttttattttcctgtggttactactattagggtcagacatgtgaaatgtgagggaccatttagagatttagatgttatatttttggattattacagagtatacacccaagtttaggacctgtgtcatttttagtgtccccaccccgtttctatttctgttccatttgtctttactttctttgtaatcatctcattttttttccactcttgaaactcacaactttccagtccatgagcaactttgctaccatccccctcaaaaacaaatctatttaaaacaccctcctagaaaagcctctgaaccaccttcagctaaatctgtaacgtttatagaatattttaaaatcttaattcagctagagttatgatccccaaacaagtgctgacgaagctatcacagaaatgatgtctttttcaccttgtaggtatcattgttgctaaatcacatcagtacaggccttctgtggggagacagcagggggcaggggcaggactaggggatgggagtagataaaactgtgattctatcctttactttaggtaaaaaatcctaggttatgaaacaaggttctgggccaagcacagtggctcaggcctgtaatcccagcactttgggaagttgaggcgggcagatcgcttgagcccaggaatttgagaccagcctgggcaacatggcaaaaccctatctctacaaagtatatataaaaaaaaaaaattagccaggcgtggtggtgtgtgatagtagtcccagctactcaggaaggctgaggtggaaggatcacttgaggccagggaggtcaaagctgtagtgagctgtgatgatgttactgcactccagcctgggcaacagagtgacacctgctcaaaaacaaaacaaaaccaaaaaaaacaaagttctctactcttaagttggtatataagatgacctgcacagtgtcacagagatttcccactcagtaaatcactctgaaagagtttgcataagattctgtagatttgcagtatttaatgtggatagtcaatagctacatgtggcaaatggccacttgaaatttggcttgccaaattgagactgtactgtacacataaaatatataccagatcttgaaggattggtaccagaaaagaatataaaacgtttcatcaatattttatattgattacatactgaaatgacaatattttagatatatcgattaaataaaataataatttgataaatataattatttcacttatttttatattttttatgtggctactaaaaaatttaaaattagacataggggtaacgtacttctttgttttttgagacagagtctcactctgtcgcccaggctgagtacagtggcacaatctcggctcactccaacctccacctccttgggttcaagtgattctcctgcctcagcctcctgtgtagccgggattacaagtgtgcaccaccatgtctagctaatttttctatttttagtagtgacagagtttcaccgtgttggccaggctggtctcgaattcctgacctcaagtgatccacccacgtcagcctcccaaagtgctgggattacaggcgtgagccaccgtgcctggcctggctaatgtaattctattggacatgctactctacacttacatggtttggggtaggcagtgaaataccataggtagaaaaggtaattcagtgaagcatccaaatagacagaaacaacacaaatatttttgctggagtcaggagcactatgtggcacagaacacctcccagaaagcagaaaatttttctgcctgaaaaccaatgtatatgtaagaccccaagtaaaaaacaaaagcaaatgagccccaaactgtcttccctcagctttgcctgggagctgctatctttgcacttatttttctagcatcaggatattagccacatgagggagccaagcatatttgtctcattttaggcatcattcttttgtggttccccccaccccaggtattgttgagtctgtccaaagctgggtgagataccacacaagtcttgcttccctcagtgtgctgcttctctcggccttggtggaggctgagcctgttgccggtacccaccagcccagtaggttttgatgctgcctcctgaaagagattgtatttgtttcgttttgcactagtcacagttgttgtttaaactacatcaaatttggggggagaatatttgcctgtgatggaaagagagatagatgagttattgcttcaagtgttttaaaataaaagctattctcacacacaaaaaaaaaaaaagaaagaaaaagaaaagaaagggagctcaaatcaggaggaaatggtggtttttcctgtaagtgaggtttcagccagacacattttctttttctttttttcttttttctttttttttttaagtcagtagtggtttattaaatggttgtatcacatctggaaaacattattcaaaacatttattcagcgtacttcctgttcatattttagaagatgtaaagcaatgaaatttgctctaaataaatggcattttttttgccattatttggcatcttgccaggttactttttacatccaagttcaagtgatattttgttctcaaaataaaataattttcaaggtttggaagtataatgcgaaaattttaacagggattcttttttttttaattatactttaagttctagggtacatgtgcacaatgtgcaggtttgttacatatgtatacatgtgccatgttggtgtgctgcacccattacctcatcatttacattaggtatatctcctaatgttatccctccctgctccccccaccccacaacaggccccggtgtgtgatgttccccatcctgtgtccaagtgttctcattgttcagttcccacctatgagtgagaacatgcggtgtttggttttctgtccttgtgatagtttgctcagaatgatggtttccagcttcattcatgtccctacaaaggacatgaactcatccttttttatcagccaggcacattttcaatacagggtacataaatgggaggactcagttaattagatatttagtgtacacccatatatgactagaacacattcttagacttcagtgagcctacatggcagtcacgggaggtacatattaagtaagttctgggtctttgtttcctgctaggacaaatagttaacaagtggctgttctgtactgactacttgctcaggcctgggttaagtgctagggaggtgcaacagaaacttaaaagatagtatctgtcatcagataggaaggaaaaacacatgaaacaatcagatgctatatgcaaagtagtaaacagttggatgtcccctgggatgtacgtgccgtaggagttcagaggagaaaagggccactgggccccaggatggtcaagtgggcttcatgttggggatggggaggcagtggatactcagagaatttatattgcattcagagaagaactaacaaaaccatggaggaggaactggaaaccttgggcttcaaagcaaagtgaagtcaggctaaggtaccggtgatattacgtgtggctaagatatgttttgctctcactcttttggaagcttagattaaggcaggcacgggtcatttgccaggtactgtattttattaaagccacactataaagtgaggcagtccttttatgatggatcctaaattggatgggaatctccaacaaaatagagatatgtgccatggaggaaaataaagcagtaaagaagtacaggaagtgctggggtggagggaggtggccaattttaagtggtatcatcagagaagagctcaaagagaaggtgatatttgagttgaacctaaaagacgtgagggagctgcccaagaggttacctggaggaaaggcatgttaggtagaggcatgaacaagtacaaataccccgaggtgggagtgagcttggcatgtttaaggaaacagcaacgcagtctgtgtgtttggagcagagtgggcaagcaggagagcaataagagctggggtgggagatgtgatgatgccaattgtgtggccctcataggccaagaaggccttttgaccagaagccatttcagggttttgatagaggagtgacatgacccaacttatgtttcaaataattactccagtgactgcatttaaaaaacactgcagggcaaaggcagaagcaagttaggaggctgctaccattacctgaacaggagctggtggtgacttggatctgggtgggagcagtggcggtggtaagaagtgatcagactcgggatatgttctgaagggagagccaataggacttgcaaatagactggctattgggtatgagggagaagtggagttgatgctgctgctgaggtttttggctagcactgaggaccttggctgatcccagaaaatccaagttctcagaactagagtcccaacctggccctaaatgtcccaaacagaactcttcagaggatggtctgggttatgttagcatttgtcagagggttcattctccctcatcatatccacactttatgagcatcagttgggcaattaacatattcctgttgtttaaatttgcttgcattaattcaactgtaagatgaaaacattcttctgaggatttttaagccttttacaatactaacctcttttctactgtatttaacctgccaaaacatgtgtccacttctttctcatgccaggtacgctccatggtgagtgactttgctgttttcctcactatcttcacaatggtgattattgattttttgattggagtcccatcaccaaagcttcaagttcccagtgtgttcaaggtaaacagatctcagagtacttggtgcactcatgtaatttcatacattctgatgccaagtaaatttcaaaggccttttcatatcctaatcctgagttttacagtcccctaaatctgaaccttgctcctcataccttgtcatttagaaaagcaaacttcagacttggttgaattcaagacagaaaagccagagaacagaaaaaccaaggttgtttaatgaatgaaaagtattattattattgttattaataccacttactgttcttaatatgttaatatttaaacaatggaatgtgcacatttacataaatatattcaagacactgtggaaacatgggtctctggaacaagcctcgttaacagcactttcattgagcatcagctgtataagggcactgggaagaatgaaaaaggtaaaggacttggcctgaaccttcaaggatggtgccccttccttgaagggggagaatggaactgagaggagcctcatcaggagtctagggcccctgccggagtaatcatgacatctctttcgaaatcatctcaatctgatttcattgtttgtataactctctctaatatatggtatttttcaagaaactatacaaaaagtcaaacaaatgatcaatacatggggactccaaatagatttcagtttgggagcactgactaagtagacaaagaagatagaaaagctgagctcagttctatagagccccatagggtgaggggagagaaaatctgtgcgtactcagtgacttaagaagaattatgaaggaggaaagtgggagaagttggtgaggagaaggccgacaggaataaaggcagtccctgacttgcaaatgctcccttcagttgtccctttcctttctcttttttctctctacccatgaagtaggcctgttgaaataccttcttccatattgtctgaaaatttttaattttgttgaatttgctgaaatgccaccagttggaagtttatggactaaccaatccctcttgtaagtataataccttctagaatatggcattcttgcctttgtgtgaatgagcacaatcagctttctctctaatacctagctgagatcagtgctgcaggaggaatggattttgtctaaaaataggtaatatgggaacattaagcggtccttggaaaggttccaaagggataggcctaagatagtcagaaggcactgaatttctgggacatctgtgaagaacgcctctgggaggtaggacaggggagaaagggaaacgggagaatgtcaaagaaaatgttgctcatgacaggctccattttcaggaggcagagaagaagttttcttctttttgtctctccctattgtatcacatggcactcaactcccaagacccaatctgaaggctagtactattactaggggtatcacgtcattaagggtttatttaataagtttttgtgttggtctgagaacttaactaccacttagaacattgttgttagggaaacatagattctgtaaacttttagaagctaacccattcataattttggacttggtggtgttattaaagagtatttgaatcctagagtcatgactaataaggaaccaaatcaaatataacagtctgtgctttgtttcttgaatttgggtcaactctggtccagttggtatccctggccttttatcctctagcaccacttgccaaaaaagggcgaacttgtcttcctcagagtacactgcaggggtggggtaaggatctaggtgagtttagatatgttgtgaacaccccagtaagatttataaacagttgtattacaggggcattggagaggatcctaggtcaaacaaacccccaactttagccgtcttaggctccttctcaagtctctgatggctggacccctgtttcactattgatgggagaagccccttggagcaatccagtccattcaaagcccaagagattccatgcagatggctccactttgcctttatttatgctgtagacacacattatgtggctctggagagaagtcgtaggagaatagtctaagttatttatatttgtctttagaagtcattaaatttttttgacaacagatacagttgttaattatattttacttgggttaatgttgagatacacttgttttctctctacacagaggtttggaaagtaagtggaaggaagtgcaagattaatgaatatttcacaagaaattaataattgaagattgactgtttcaaaggggattcggaactattactgagcaaaaggggcttgctgcccaatgtgctagaagccaatactatgataccaggtttttgagagaagaaaagttttttatttcaagtttactaacaaggagacaggaattcagctcaaatctgtctccctgcactggctttactgcaataattagaaaatgtttagggggtggattctgggatagtaggttattggtagaaggaaaggggaggtctggaaagtcctcaggcattcatagttatctcttcatgctacctctgggtcccctgtgccaagggggtttcagcaagttgtttcttttcttatctaccatcctgcaaacccaagaatttctgttagtcattggtgtctttaactctttgggaaatggtttcagaacaaggtcatagatttcctaaggagttgctgtatttcatgccttttttttttttttttaagaacctcactcaagaataaaaagaaatatggatattgtgatccagtttgatatgttttaccccaatgactataacttaaaatacaaaaataatatattttcccccttagccaacaagggatgatcgcggatggattattaatcccattggccccaatccctggtggactgtgatagctgcaattatcccagctcttctctgtactatcttgatattcatggatcagcagatcacagccgtcattattaacaggaaggaacataagctcaaggtaaaaagaggttctgacctagaaggctgctgtggcaacctgttacattttcgtaaaattttagggtaagcacatctagaccagaaattgtagaatctcatagaagaggttcataaggggtttccattctttaataacaaagatttctttggagattagagtggaacatggttgtatggtatgaaagcaacgtggactccattactctcctctcacacctgtggggaaggtgattgggtagagttcctggtgatccctatatagctatatgctttgggtcaagcaactgtacagcttgtcttcctgaggttcaggtgggggcctgggccactgtttcctagaggcaggtattctcccactggtgtctgttactatagtttctaggccgaaactggaaccctaggatcctagggaagtaacagagcaggcaagcaatatccaaatctgtcaaggatctgggggtatgtggtaggaagccaataaggacacttacctctaactcccatagtttctaccatctagaatggtcaagatgtggcagggtgtctggttaatcttccagagaagaatggatctttgaatgtgtaagactcagagtcagctggaggcacttggaaaaataatcaatattggcatatataggacaggctaagattcccctttttcttctttgtttcctcctaaccaggaggggctacaagactcctcttggatccctgaaccccttccttcttatccatacaccccttcatgctttgggcctgagacccgtagctcactgttctatgccctactacagctagcctactgatggtgacaaagactctgtttccccacagaaaggctgtggctaccacctggacctactgatggtggccatcatgctgggtgtctgctccatcatgggcctgccctggtttgtagctgcaactgtcttgtccatcacacatgtgaacagcctcaagctagaatctgaatgctctgctcctggagaacagcccaagttcctgggcatccgagaacagagagtgacaggccttatgatctttgtgctgatgggctgctcagtcttcatgacggctatcttaaaggtaatcatcctttcagtcattcagcaaatatcaagggcctgatttgtgccaggaatcctgccaggtgctggaaatacagtggtgccaaatacttacaagtataaatccctgccctgaaagagtttattctagagggataagacagataacatgtagttaagaaaattagttaagaaacaaacatgataactacagaatgtgaatagtgatataaaggaaatacacagtgctttctggcactatagagaactgagaggggtctattttagtaggatggtcagagaaggcttctctgaggagatgctatttaagatgaggtggaggccaggcgcggtggctcacacctgtaatcccagcactttgggaggctgaggtgggtggatcatgaggttcggagatcgagaccatcctggctaacacagtgaaacctcgtctctactaaaaatacaaaaacaaaattagccgggtgtggtggcaggtgcctgtagtcccagctactcaggcaggaggctgaggcgggagaatggcgtgaacccaggaggcggagcttgcagtgagccgagatcatgccactgcactccagccagggcaacagagcgagactccatctcaaaaaaaaaaaaaaaaaaaaaagatgaggtggagccatgccatggatggtgggacatggcatggaaggaggggagaaaagcagtctagtcaggcccttaggtgggaaagagtgatatgtgttctacgaaatatcagggccatgtggctcatgggcattgagtcaagacaagagcacagtgcaatgagaaggaaagagaggcaggggcagatcatgtagggccttgtcgacagtgggcaaggtaacctttgaagggttttaacaggagagggacatgatccagctagtttaaaaagatcactctggctgaggtctagggaagaatagaagcagacagaccagtgaagctgttgcaggtgacagatgatggtggcttggataaggaagctggtagcagggacagataaaaacgcatggcttctgtatagcttggaggcagacccaaaggtctcaattgttgactggatgtggaatggggtgaggaaaatagaaaaatcgaagaaacctgttaggtttctgacttgaccatctggtggagtgtgatggcatttattaagatggaaaagattgtatgatttttgtgaggggtggggctgtgatcagatttggagtgagatgtctgggagtcatctaagtgaagaggctagaggagggttctggactaaaatataaatttgggtataaatttgggagtcaacagcacataggtggtattgaaagccgagggaatagatgagagaactcagggaaaagagacgacgtaaaagagaagtgggacataagagcagagttagaggttggatagaagaagaggtagcaacagagtctcagaaggagctgccagagaggtgggaggaaaactagggggatgtggtattagggaagccaagtaaggaaaatgtttcaagaaagagggattgggtagacacgtcttggaaaatgaagactaagctaaggccattggatttagcaacattggaggcctcaggttatctgacaagagcagagtcagtggattgcattagtttctgctgcctgtgggtgatttagaagtagaagcaaaagcagaagctgaccatgataaaaatcattttgttctgaaatgaaatgattacatgtaagttaaattacaggcctccatgtctggctcttcctccacccctgtctggggatgggcagacacacacacacacacacacacacacacacacacacacccctctttaacagaaatgatgccttttaaatcttccacaatctcaaaaatcttccaaatccttagggatttagtgcattttaacatggaacttttttactgaccagtgacttgaggcaggagttgggggtatcttatcagagaaggaattcagtggaactatagagtagaaatccaattataggtggctaaagagtgaataggagataaggaagtaaggactgcaggcaaatctttcaagaggtttttctgcgaagcaagatggaaaaatggcagtggctagtatgagaagtggggctaaaagagaggttttttttgttttgttttgtttttggtacagatagaggatactttgaacattaaaaaaatgttttgtgggtggaaggcctgcatctgggagattggggtgagaaggaaactttacggctgtattcccaggtgccagccattctggagcactgccttgtctcccttgcctcctcttcccttttttttggcaaatcttcaaccaccccagcctgtaccacaaatgcccttcaagggtgagaactgagagggatgggaaggatttctgaaccatcttcctgtcccctcactttccactcaaccttaccacccacctctcctgacacccctttcccacctcatattccctgtccccagcccaactcccactcccacctggttgaggcaccatctggaagagcctaaacgttgctgcttctccaagatagaaccatgaaggcgcggcagtggccatccctgggctttcccctagctgcttcaggacaattctcttaggacaactattcagtagttcacaaacaacatcgaattggaatgtctaatcactctacagctggaacataaaatccaatgggggattttctaattttttgttttttaaaattttactttaagttctgggatacatgtgcaaaacgtgcaggtttgttacctaggtatacatgtgccatggtggtttgctgcacctgtcaaccgatcatctaggttttaagccccacatgcattaggtatttgtcctaatgctctccctccccttgccccccaccccccaacaggccctggtgtgtgatgttcccctctctgtgtccatgtgttctcattgttcagctcccacttatgagtgagaacatgcagtgtttggttttctgttcatgtgttagtttggagggattttctaattccacaaattagatttgagaatatttatatagtcccaaaaaaactaaattatagtccaatttagttttcagctctgagactttccttgccttgattctataggcccaatttccctacctcagagtcaatctgaagattacctaggttgatagacatgacgtgatcagaaagtcatgttcaaatactgtgtggatgttcaagtgcagtataataatgtcggtgtttccccccagaccattacctctttgataagatacgtccccactcttgccctcaagccactggtcagtaaaaaaggaagcttttttggttcacgttaaaatacatcaaatccctgaggagatgattgtgagattacagaagatttaaaaggcattatttctataagagaggggtgcgtttgtgtgtgtgtgtgtgtgtgtttgtgtgtgtgtgtgtatgtgtgcccatccccatggaggaggaagagccagatgggtgagatgggaagtctaacttacatgtaatcatttcatttcagaaccaaatgatttttatcattgtcagcttctgcttttgcttctactcctaagtcacccacaggcagcagaaactaatgcaatgtgtctgcagctattttgtgactttgtttcattcttggagatttaaaagtgtatatagttttgagtgtgctatgataccaaatttaatttctggcctttcttgtccttttgtcttcagtttattccaatgccagtactctacggagttttcctttacatgggagtttcttcactacagggaattcaggtattgtatggttcagccagggcagtttcttctcactgcaagtttgcatgtcctgtccagggagggacagctccccaagagaagcacaaccagttcttgagaaaattgtttcctagtcttgccacttaggctattttagacatgtatttggatatagggagaaaaacagccatgttggcaggagagtacagagacttccagggtggtctggcttgatgtcatggctccagttattcattaattattcaacagacaatttttttttggcatgtattaaacattagttgctttgccaggtgctagtaaacttggatctgaaaggttgatcaagaaccaaactggctttcactcatggacagatctaggttagtgccaggctaaagtataaaaatggggtgtttaactttgggagagggttcattggcagaagagataggggaatagtgggagttgctcctggtaaggagatgtcacttcttgttatactctgcatttttccatccatcaactattgctctaagtctttcaaaaagaaaaatcaggagcttgtcattgataacttgggtattccagataatataataacttaggctgattattctttgtttgaatggaatgtcctatggccattcttttttttctttttttttttttttcctatggccattcttacatactgagttctactatgaacttgggcaggttatttaatctctggttctcttttttccttattgtaaggatgatcattttttatatatctaggatgttatgaggttttattttatcttttcactataaataatcaatgaatggctccaaactcctaaaacaagtaagaaatttggttttgataataagcaaaaagatgtaattggtttattttgttttcaacaccccctgagaaagagctctcttaggagacacagcgtgggataagagaaagaagtttgaacctagaattagaaaagatggattcaaattttgactttgccacttaataaccttggccaaattgcctggtcttttaaagtctcagtttccatttctgtccagaggaaatggtgttacctacctttcagagcaggtaatgtaagagatatgaattggtctaacaaagcttctgacccagaatgccctcctgaaaataaatgccagttccttcctttcagttctttgatcgtctaaagctctttgggatgcccgcaaagcaccagccagatttcatctacctgcggcatgtgccgctgcgcaaagtgcacctcttcaccctcatccagttgacctgtctcgtcctgctctgggtcatcaaggcatctccagctgccattgttttcccaatgatggtgaggtggtttttaaaaaataaattcttattatcattgttattttttagtggtaaaatattataactttaaaatttaccatttttaagtgtacagttgagtggcattaagtacattcacattgctgtggagctattaccaccctccagctctggaactttttacatcttgcaaagctgaaactctgcacctattaaacactaaatttccattctcccataccctcagcccctggcaaccaccattctactttctgtctctatgtattgattattctaggtacgtcatataagtgaatcacagaatttgtccttttgtgactggctaatttcttttctttctttctttcttcttttttttttttttttttttttgagatggagtttcactcttgttacccaggctggagtgcaatggcatgatctcggctcactgtgacctccacctcccaggttcaagcgattctcctgcctcagcctccctaatagctgggattacaggtgcctgccaccacacccagctaattttttttgtattttttttagtagagacggggtttcactgtgttggccaggctggtctcaaacttctgacctcaggtgatccacccgtctcaacctcccaaagtgctgggattacagacatgagccactgcgcccagcttgtgactggctaatttcatttagcctaatgtcttcaaggttcatccatgttgtagcatgtgtcagaatttccttcctttttaagattgaatagtatcccactgtatgtaaatactacattttgtttatccattcacctgtcaatgatactgttgtaaatatgggtgtacaaatatctgtttgtgtctctgttttcagttctttggggtatatgccaggagtggaattgctggatcatatggaaattctatctttaatttttttctaatcctctagatccacaccctcctggtgggtttctcaattttgtcaggctacatataagggtttgtattcgtgtgttacgttcatgggttaaataaatagcagattactgggaactcctagaagggatcctatcaattccagatgtattaggaaagtagtcactaaattagagagaaatgtacttgaatttaataagcctgatttgcctcattccttgtccagtcaccaattatagctgatgaacagcagtccacccaggcaggattaattctttgttttcctttggctaaaatggccctcatggaaagaaagtggagcagcagttgagatgccctggacatacctttatcggggaaatcagctgtcagattttaggcgagtcactttctctctctgggcctcagtttcctcatttataaagcgagtgtcaggccaggccagagggcaaagacaaaaaccactagagacaaatgatgcaggcccaaagcaaggatttgggtaggggaatgtataggcaaaggatcagagggaataaagatgatcttctaagagaacccatcatcccactgtgaggaatgcttgggtggctgtggctggtcccaccatggcccagctccagcagaggctttctacccacctgctgtcctgtagccttcctgctgacccctagccatctgcagatgatgtgctcatcttttcaatgacagaatccagttagctgctctctaagttgtagagctgttatgatagttaaaatactgtatgtaacacatgttacctggcacaaagaaagcattcaataaatggtgactgttaggattattatgagtttgattttgcttgaaatgtcctagtctgctgtgaaaataaggctttgcttttaagtccaggaaggaaattagtccctttaattcacttttttttttaatttttcttcaggttttggccttggtctttgtcaggaaagtcatggatctctgtttctctaagcgagagctgagctggctagatgatctcatgcctgaaagcaaaaagaagaagttggatgatgccaaaaagaaggccaaggaggaagaggtcatagtccttgcaccaactgtatacctgggggcctcaaattacagaacataggaagggtcatgtgaaaagtcagcatgtctggaatcccgagggttatatttaggagctgggaagattacccccaaagatgttctcagctaagaatggattagggattcttgcttctgtctgttcttaatttttgggtttgacaaccacttattttttcctttgtttacaatctactcaccaggctcatacctacaatgtgaacatacagtatgcccttattagcagattcaatggctcacattctttcaaaaggtctaatttgacaaatacataagacccattatttcctagaatgtttgtaatatatctaattgcaaatggtgctgtggttggcaccatgcaaagataacttgcataggactttctgtcttttttcatttccctcagcacttggcatcttgtcatctacacaatggaccctcaataaatggcctatatgtgcaaagaaagaatgtgtagcaaatgaaaataccagaccaagaaatgagtgagctgggaagtgtttccaaatacagttagtgcctaaaatagtgtcctttgaaaaaacttttaaaagacttttttttaggccaggcataatgggttatccctgtaattccagggcttttgggagttgaagctggaggattacttgaggccagaagtttgagactagcctaggcaatataatgagaccctgtctctacaaaaaaaaaaagaaaagaaaagaaaaaaaatcaaaataattagctggatgtggtggcacatacctgtagtcagctacttgggaggctgaggtgggaggataccttgagcccaggaggttgaggctgcagtgagctgtgatcatgccactgcactccagcctaggctgagtgagatcctatctcaagaaaaaaaaaaaagatgacttttttttcccctaatatcttgaactttaaaaatcttgtatttctaaataagcttcaacaattataaaatataaagtcaatggaagaaaactttaaagagaatattgatagaattcactacataaaatgtgatgctttcaggcatccaaaactctaatcaaaattttaaaataacagataagttgagacatgttaatatccttactattcaaataattcttataaattaataagaataatatgaaattgaaatgagcaatggacatatataatttacgaaaaagaagtacaaatgaccagttgccttatgacaaaaatttcattctcactaataatcaaagaaatgattgtgcagcatctggattttatgaaatgaaaataaatattaaaaaataaaaaagaaatgaaaatttaagcaaggagaatacttttttacttgtcgaattggcaaagatttttaaaagataaaaacaagtgttggcaagactgtaattgaaattggcttctcatacactaaaaatagtaatataggctgggcgcggtggctcatgcctataatcccagcactttgggaggccgaggtggttggatcacctgaggtcaggaatttgggaccagccgggccaacatggtgaaaccctgtctctactaaaaatacaaaaattagctgggcgtggtggcaggcgcctataatctagctattccggaggctgaggcacaagaatcgcttgaacccatgaggcagaggttgcagtgagccgagattgtgccactccactccagcctgggcgacagagtgagactttgtctcaaaaaaaaaaaaaaaaaaggtaatataagttgcataaatctctttagagggcagtttaaccttagagtcttaaaaacgtatatgccctttggcccagcaactctaatttttaaatttatcctaaggatataattagcaatgtagacaaaatattttaatttgtggtgacataaagaaaaaaagaaaattagagtaaatgtattacaatggaatattgtacaacagtttaaaaaaatttttttttgagacagagtctcgctctgnnnnnnnnnnnnnnnnnnnnnnnnnnnnnnnnnnnnnnnnnnnnnnnnnnnnnnnnnnnnnnnnnnnnnnnnnnnnnnnnnnnnnnnnnnnnnnnnnnnnnnnnnnnnnnnnnnnnnnnnnnnnnnnnnnnnnnnnnnnnnnnnnnnnnnnnnnnnnnnnnnnnnnnnnnnnnnnnnnnnnnnnnnnnnnnnnnnnnnnnnnnnnnnnnnnnttacaggcgtgcagccaccgcgcccggtctaaaaataaagttttaaaaaatacttaatgatgataagtattttgtaatgatactcaatgatgtgtgctgtagtcccagctactcgggaggctgaggcaggaggatcgcttgaatctgggaggcggatattgcagtgagccgagataacaccactgcactccagcctgggtgacagagagagatcctgtctcaaaaaaaaaaaaaaaaaaaaagaggctggatgtggtggctcacgcctgtaatcccagcactttggaaggctgaggcaggcagatcacctgaggtcaggagtttgagacctgaccaacatggtaaaaccctgtctttactaaaaatacaaaaaagtagccaagtatgttggcgcatgcctataatcccagctactcaggaggctgagacaggagaatcacttgaacccgggaggcagaggttgtagtgagctgagatcatgccactgcactccagcctgggcgaaagaacaagactttgtctcaaaaaaataaaaataagaaagatatgtggacgtgtttctgacattttatgtgaaaaacatagggaatataaaatggagcatacagtaagactgtcaaagaatctcacttttactaaaacatatacatatacacataccgtacacacacacacgtgcatgtgtgcaccccccacacacgtgaaaaagattggaagaaaatacaccaaaatgtttattgtgttgctctatgtctctctagttggtaagattatacattttttgattaattttcttcctccatatttattgaatccttactctgttggtcactgttccagatacagtagtatacaggacacagacagtccctgaccgaccacatggagcttacattctcttggaggagacactgtcaacaagcaaacaagtctatatttgttttcttggttatagtgctataattctacacacacacacacacacacacacacacacacacgtatataattttaggtagtgatatgttttaagaaggtagggagtgagggagttactttatttaggatgattagagatgacttctgaggagacatctgagtagagacctgaatcaagtgagaagcaaattatgagaatatctgggagtaagaacattccagggcaggggtacagaaaatgcaaaggtcttgaggaggaatgagcttggtgtgtttgaggaacaccaagaaagccagtaagactggaagggacagagtggtagcagggagaccagctaggaggctggcagcagctcaggcaataggggagggtggcttatgctaaggtagaggtgatgaaagtggctgaattgggtacttattttgaagatagagctgacaggttttgctaatgatggtgggcatgggtgaaagaggaatcaagtatgactcttagatttttggactgaacaactgaatgaatggttgtgctatttattaagatggggaagaccaaggagaacagcaggtttaggaggaaaatcaagagatctcctttggatgttaagttcgaggtggctggtagacattatattccttattttccaaaattcctgaagtaagtacatatttgttaacacgtgttactttataaaattattttaaaagctaaatgaaataaaagaaaaaagtgaagactttttctccacctcatagccaacattcatgttcatttctttatgttgttttcaattttttaacatagttttcatataactatgataattatataattgtgagtttgtatttatatatatagcacatatatattctgatttttcccctcaacctgatttcataagacactttcatgtttctatttgtatcatgatattttttaaatggatgtataatgttctatagtattatctcatacttaatttaaatatttttcctttgttaaaatttttagttgttttatattactttgaacatctttgtacagatagttttttctctgtaattattttctttaaattagtgggattattttcttttctttttttttgagatggagtctcgctctttcgcccaggctggagtgcagtggcgctatctcggctcactgcaagctccgcctcccgggttcacgccattctcctgcctcagcctcccgagtagtcgggactacaggctctcgcccctgcgcctggctttttttttttttctttctttctttctttatttttattattattatactttaagttttagggtacatgtgcacaacgtgcaggtttgttacatatgtatacatgtgccatgttggcgtgctgcacccattaactcatcatttagcattaggtatatttttagtagagaccgggtttcacggtgatagccaggatggtctcgatctcctgacctcgtgatccgcccgcctcggcctcccaaagtgctgggattataggcgtgagccaccgtgcccggccagattattttctaagaaaacattttattatggatttctaaaaaaagttattttagattcagggcatgtgcaggtttgttacatgggtgtagtgagttatgctgagctttgggcttctaatgatcctgtcacccaagtagtgaacatagtaccccataggtagttttccaacccttcccctgtcttccgccttttggagtccccagtgttttttgttcccatctttgtgtccatgtgtacccaatgtttagcctccacttataaatgagaacatgcattatttggttttttgttcctgcgtcagttcacttagggtactggcctccagctgcatccatgttgctgcaaaggacatagttttgttctctttgtggctgcgtagtattccatggtgtatacatactacagtttctttattcaatccaccattgatgggcacctgggttgattccatttctttgctattgttaatagtgctgcaataaatatatgagtgcagatgtctttttgacagaacaatttattttcctttgggtatataccaagtaatgggattgttgggtctaatgctagttctatttttagttctttgagaaatctccaaactgctttccacaggggctgaactaatttgcattcccaccaacagtgtagaagtgttcacttttctccacaaccatgccaaagtctgttattttttgactttttaataatagtcgttctgactgatgtgaaatggagtctctttgtggttctgatttgcatctctgatgatgcatgatgttgaccagtttttaatatgtttgttgactgcttgtatgtcttcttttaagaagtgtctgttcatatcctttgccctttcgcttctatgcaccaataacacccaggctgagagtcaaaccaagaacacaatcctgactacagtagccataaagaaaatgaaatacctgggaatacacctaatcaaaaacatgaaagcactctctagagggagaactacaaaacattgctgaaagaaatcagagatgattctctgaaaaagaagtcagattagaaatgattctctgaaaaagaaatcatctctgatttctttcagcagtgtgttttttgtttgtttgtttgttttgagacagagtcttgctctgtcgccaaggctggagggcaatggcatgatttcagctcactacaacctcctgctcctgggttcgagcgattctcctacctcagcctcccgagtagctgggattacaggtacctgccatcacgcctgggctaatttttgtatttttagtagagacaaggttttgccatgttgaccagtctggtctcgaactcctgacctcaagtgatctgcctgccttggcctcccaaagtgctgggattaaggcatgagccactgtgcctgacctctttttttttttgagatggagtctcgctctgtcgcccaggctggagtgcagtggtgttaaaaactggtcaacatcatgcatcatcagacatgcaaatcagaaccacaaagagactccatttcacatcagtcagaattactattattaaaaaatcaaaaagtaacagacgttggcatggttgtggagtgcagtggtgtgatctcggccgactgcaacctctgcctcccaggttcaagcgattctcctgcctcagccttcctagtagctggaactacaggcatgcaccaccacgcccgactaatttttttttttttttttttgagatggagtctcgctctgtcgtcgcccaggctggagtgcagtggcgccatcttggctcactgcaagctctgcctcccaggttcacgccattctcctgcctcagcctcccgagtagctgggactacaggcgcccgccacctcgcccggctaattttttgtatttttagtagagacgggggtttcaccgtgttagccagggtggtctcgatctcctgacctcgtgatccgcccacctcagcctcccaaagtgctgggattacaggcctgagccaccgcacccagccagcctgacgtctttcagcagtgctttgtagttctcttcgtagagatcttttaccttatggattattattatttttttattttttatttttattttttttttgagacggagtctcaccctgttgcccaggctggagtacagtggcgcaatctcagctcattgcaacctccgactcccgggttcacgccattctccgtctcagctgggactacaggcgcccgccaccacacctggctaattttttatatttttagtaggaacgaggtttcaccgtgttagccaggatggtctcgatctcctgacttcatgatctgcccacctcagcctcccaaagtgctgggattacaggcgtgagccaccatgcccggcctaccttattgattattttaaacctacaaaggtagaaagaaaaggcttcttattgttaataatttgtttatttgaattagcatccaaagaagagccatatattgcaattggttgatatctgtcttaaatctttttaggggttccctttccatttttttaaagttgaagaaacagggtctttgacctctagggcttctcaccatttagattttgctaaatgtgtcccttggtgtcatttaaaatgttcttctgtctgctatatttgtagtaaattggtcattagctctagaggtttactcagattgacattttctttttttcttttttgaatgccattccacatgtataaatatctggttgtctctcattttgtggtaactcaagtctatgaaagaacctaattatattctttataataaatgcacaatgaaattaggtagaaattgtggtagaagaatgggctggtgaacttatggtcttacttggtccaagatataataatgtttctttttcttccaggaggctgagaaaatgttagaaattgggggagacaagtttcccttagagagcaggaagttactaagtagtcctggaaagaacatcagttgcaggtaaaacttccaaacaccaaggagtttacttttgggttattctctaagtgttctggctttgtggtggtggtggtgtcacaagtgcagctgctggcataaagagctaaatattcagcctcccagttccatcctgtgaaaataccttttccatctcattgtttattgaatacctgctatgtaccaggcactgtatcaggttatgggaatcacaagaagagaggtaagaaagccaatgtactgagtgcctcctttgtgctgggattgtgctagagggtttacttatgtgttgtcagttaacctgtactcatatgaatatcactatccacatttgtataagtgaagaaactaagtcttagagagttttaggtaatttatccaaagttacaatgttgctgaatagaaagattaggattcaaaccctggtcgtcttctattcctcaaaccagtgctccttctgcctttctttgccaccttccaaagatgaaaaggatgtggtctttatttccagagagttctcagcctagtaggcatgaaatccaatgcttgggcaagcttttggggataggcagaaatagtcaatgttagcctggcttgtggcatctgtagttctgggagcaagggggaattgaactgggatcatgaaaattccttacttctgccaatgattttagcccctttctctatcaaacctattgctcaccacaaatgacaggaagctaaattggtccattcatggttttactcctagcatcttgtttctgaattggaagagatacacatagcacttgtgtacctctaggtaccataagctgaaaaacctagaggtcaagagggagcagagcaaaggaaaagagcaggatatctgggtcattgagattctgaagaatttactgctgcatcactgagttggttgtggtttatactgtgggggaaattaggacagtctttttcgtaataatagtcttggttcttaataaactttctacgtgttgttgtggaaggagccgtgagcttgatttatctggtggcaaagtaggaacaatgtttcccctgtaacaggatgctgcctcctctcttggcattttagaaggagataatctggcttgcagcaaacatcaaactattctgtttctaggaaaccaagggctgggttcaaggtcttgattctctacttgctgttgtttgaccttggatagtcacttagctctgagagctttcatttctgcaccttcaaaatgaggatgttaataatctctgttgctatgatagttaagatactaggaaagtcctttgtgaactatgaatagaagagatttggctgtttaaatgggaaaatgaatgaaaaatgcctggcatgcagcaagtgctccgtaagtggtagttcctgatgctacactgttgatatcatagtgttgtcagcagcatctccagtgaggcccttcggaggagtgcacagttgtgggagcaggactggctgccacctggcacaccagcccagctttcagcaccacctcatgggccaccttgccattctgacctcagtggctgcaggagaaagatcagactccatcttgttccccgagttcctgagagctgttggctgcgtggtctcaaaccccatcttctcccttctattgggacagtgatcattatagactgtggtatgtattttacttgtatgtctgacattcactgtcctaatgattgatttcagatgtgacccctctgagattaatatatctgatgaaatgcctaaaactacagtttggaaagctctcagtatgaattctggaaatgcaaaggaaaagaggtaaagagaactgtaacatctggtttttatttatttctggcttttgacaatggcgatattgaaggtaaaatgtgttttagttgtaaaatggaatttgtgtaataaatagcacttccaggaactgccgctaaccacataagaatagctataagccttaaaaaagtaaaaatgttttctaaatatttggtcagggtgttttaagcagcccgtttacacaggtccaaggtcaggaagggattattttggcatataaatttgctttgcctgtttatttcctttaatcctctttctagttctcatttcagaatctgaagggcatgtctctggttactgcaaccacacaaagtaggaaattgctaaaatattcagatagtgttgatagtactgatacattctttaacctatttcacttgttacataatgagaactaacaacaagtaaagatttttgaaatattaaattgtaactggttttttttttctttctttctttttcttttcctttttttctttttttgtttttttgagacggtcagtctctgtctcccaggctggagtgcaatggcacaatctcagctcactgtaatctctgccatccgggctcaagcaatccttctgcctcagccttccaagtagctgggagtacaggtgcatgccacccctgccagataacttttgcatttttatagagatgaggatttactgtgttgcccaggctggtctggaactcctggactcaagggatcctcctaccttggcctcccaaagtgctgggattacaggcgtgggccactgcacccggccgtaactgtttttctgttttgaaaccaaataccgtatatcatttactaatagcatagatcaaccttaatcaggttaatgaagaaaatggaagaacttgaggcatttttgcctgcattgaggtaggctatatgccaaaatttcttgaataatttagtccaaataccatttaaatataagtaaataactgaagacaaaatctgaggccttcctaaagtcaacttttctagttaaaaaaaaaaagctaggaattaggagacctagtccttcgattaattccttgtataacttggcagaccactgtttctggtgttcagtttactcagcaggaaaatggagataataataactaactgccccactcctgaggctgctccaaggagaaactgaagtgctctgaaaagtcacagccaccagtgggtggtagtggtgatttatgtct

SEQ ID NO: 464 - DNA, 2303 bp, Homo sapiens
atgcctcgcgggccggtggctatggaggcggcggcggttgatggttgaccgttggctccggggtgggggtcgccgttcgagtgatctgctcagacccgaccagagggcgcgggctgctgatgcttggcttggagcccgtgggggagacctagttcggctccgccatgccggccgccgggagtaacgagccggacggcgtcctcagctatcagagaccagatgaagaagctgtggtggatcagggtgggaccagtacaattctcaacattcactatgaaaaagaagagctggaaggtcacagaactctgtatgtgggagttcggatgccgcttggccggcagagccatcggcatcaccgcactcatggccagaagcaccggagacgagggcggggcaaaggagccagccagggggaggaaggcctggaagccctggcccacgacacaccatctcagcgtgttcagttcattcttggcaccgaggaagatgaagagcatgtgcctcatgagctgtttacagagctggatgagatctgtatgaaagagggagaagatgctgagtggaaggaaacagccaggtggctgaagtttgaagaagatgttgaagatgggggagaacgctggagcaagccttatgtggcaaccctttcattgcacagcctgtttgagctaaggagctgccttattaatggaacagtcctcctggatatgcatgcaaatagcatagaagaaatttcagacctgatcctggatcagcaagaactgtccagtgacctgaatgacagcatgagggttaaagtgcgggaagcccttctcaaaaagcatcatcatcagaatgaaaagaagagaaacaacctcattcccattgttcgctcctttgctgaggttggcaagaagcagtctgatcctcatttgatggataaacatggtcaaaccgtgtctcctcagtctgttccaactacaaatcttgaagtaaaaaatggagtgaattgtgaacatagtcctgtggatttaagcaaggtagaccttcatttcatgaaaaaaattcctactggggccgaggcctccaatgtcctggttggagaggtggatattttggaccgtcccattgttgcctttgtgaggctgtctccagctgttcttctctcaggcctaacagaagtgccaatcccaacaagatttttgtttatcttattgggtccagtagggaaaggtcagcagtaccatgagattggcagatccatggccaccatcatgacagatgagatttttcatgacgtagcatataaggcaaaagagcgagatgatctcctggcggggattgatgagttcctagaccaggtgacggtgctccctccaggagagtgggatccctccattagaattgagccacccaaaaatgtcccttcccaggagaaaaggaaaatgcctggagttccaaatggaaatgtttgccacatagaacaggaaccacatgggggtcacagtgggccagaacttcagcgcactgggcggctatttgggggcttggtgctggacatcaagcggaaggccccctggtactggagcgactaccgagatgcactcagcttacagtgtttggcttcctttctgttcctgtactgtgcctgcatgtcacctgtcatcacctttgggggactgcttggagaagccactgagggacgcataagtgcaattgaatccttgtttggagcttccatgactgggattgcttattccttgtttgcgggacaggctctcaccatcctgggaagtactggaccagtgcttgtgtttgaaaagattttgttcaaattctgcaaagactatgctctttcatacctctccctgcgagcttgtattggactgtggaccgctttcctgtgtattgtccttgtggcaactgatgccagttcccttgtctgctacattacccgtttcactgaagaagcatttgcctccctaatttgcattattttcatctatgaagcaatagaaaaactgattcacctggcagagacctaccccatccacatgcacagccagctggaccaccttagcctctattactgcaggtgtactctgccagagaatccaaacaatcacaccctccagtactggaaggaccacaacatcgtgacagcagaagtccactgggctaacctgactgtcagtgtaagtctgggagctgccagatgtcctagcattgtgaccacaggtttaggagggacttctaagtgaaggggaggagtagccctttggccaaactctggcatttaccgaaataaagctttttaaaaaaca

SEQ ID NO: 465 - protein, 685 aa, Homo sapiens
MPAAGSNEPDGVLSYQRPDEEAVVDQGGTSTILNIHYEKEELEGHRTLYVGVRMPLGRQSHRHHRTHGQKHRRRGRGKGASQGEEGLEAHDTPSQRVQFILGTEEDEEHVFLFTELDEICMKEGEDAEWKETARWLKFEEDVEDGGERWSKPYVATLSLHSLFELRSCLINGTVLLDMHANSIEEISDLILDQQELSSDLNDSMRVKVREALLKKHHHQNEKKRNNLIPIVRSFAEVGKKQSDPHLMDKHGQTVSPQSVPTTNLEVKNGVNCEHSPVDLSKVDLHFMKKIPTGAENVLVGEVDILDRPIVAFVRLSPAVLLSGLTEVPIPTRFLFILLGPVGKGQQYHEIGRSMATIMTDEIFHDVAYKAKERDDLLAGIDEFLDQVTVLPPGEWDPSIRIEPPKNVPSQEKRKMPGVPNGNVCHIEQEPHGGHSGPELQRTGRLFGGLVLDIKRKAPWYWSDYRDALSLQCLASFLFLYCACMSPVITFGGLLGEATEGRISAIESLFGASMTGIAYSLFAGQALTILGSTGPVLVFEKILFKFCKDYALSYLSLRACIGLWTAFLCIVLVATDASSLVCYITRFTEEAFASLICIIFIYEAIEKLIHLAETYPIHMHSQLDHLSLYYCRCTLPENPNNHTLQYWKDHNIVTAEVHWANLTVSVSLGAARCPSIVTTGLGGTSK

SEQ ID NO: 466 - DNA, 3990 bp, Homo sapiens
atgcctcgcgggccggtggctatggaggcggcggcggttgatggttgaccgttggctccggggtgggggtcgccgttcgagtgatctgctcagacccgaccagagggcgcgggctgctgatgcttggcttggagcccgtgggggagacctagttcggctccgccatgccggccgccgggagtaacgagccggacggcgtcctcagctatcagagaccagatgaagaagctgtggtggatcagggtgggaccagtacaattctcaacattcactatgaaaaagaagagctggaaggtcacagaactctgtatgtgggagttcggatgccgcttggccggcagagccatcggcatcaccgcactcatggccagaagcaccggagacgagggcggggcaaaggagccagccagggggaggaaggcctggaagccctggcccacgacacaccatctcagcgtgttcagttcattcttggcaccgaggaagatgaagagcatgtgcctcatgagctgtttacagagctggatgagatctgtatgaaagagggagaagatgctgagtggaaggaaacagccaggtggctgaagtttgaagaagatgttgaagatgggggagaacgctggagcaagccttatgtggcaaccctttcattgcacagcctgtttgagctaaggagctgccttattaatggaacagtcctcctggatatgcatgcaaatagcatagaagaaatttcagacctgatcctggatcagcaagaactgtccagtgacctgaatgacagcatgagggttaaagtgcgggaagcccttctcaaaaagcatcatcatcagaatgaaaagaagagaaacaacctcattcccattgttcgctcctttgctgaggttggcaagaagcagtctgatcctcatttgatggataaacatggtcaaaccgtgtctcctcagtctgttccaactacaaatcttgaagtaaaaaatggagtgaattgtgaacatagtcctgtggatttaagcaaggtagaccttcatttcatgaaaaaaattcctactggggccgaggcctccaatgtcctggttggagaggtggatattttggaccgtcccattgttgcctttgtgaggctgtctccagctgttcttctctcaggcctaacagaagtgccaatcccaacaagatttttgtttatcttattgggtccagtagggaaaggtcagcagtaccatgagattggcagatccatggccaccatcatgacagatgagatttttcatgacgtagcatataaggcaaaagagcgagatgatctcctggcggggattgatgagttcctagaccaggtgacggtgctccctccaggagagtgggatccctccattagaattgagccacccaaaaatgtcccttcccaggagaaaaggaaaatgcctggagttccaaatggaaatgtttgccacatagaacaggaaccacatgggggtcacagtgggccagaacttcagcgcactgggcggctatttgggggcttggtgctggacatcaagcggaaggccccctggtactggagcgactaccgagatgcactcagcttacagtgtttggcttcctttctgttcctgtactgtgcctgcatgtcacctgtcatcacctttgggggactgcttggagaagccactgagggacgcataagtgcaattgaatccttgtttggagcttccatgactgggattgcttattccttgtttgcgggacaggctctcaccatcctgggaagtactggaccagtgcttgtgtttgaaaagattttgttcaaattctgcaaagactatgctctttcatacctctccctgcgagcttgtattggactgtggaccgctttcctgtgtattgtccttgtggcaactgatgccagttcccttgtctgctacattacccgtttcactgaagaagcatttgcctccctaatttgcattattttcatctatgaagcaatagaaaaactgattcacctggcagagacctaccccatccacatgcacagccagctggaccaccttagcctctattactgcaggtgtactctgccagagaatccaaacaatcacaccctccagtactggaaggaccacaacatcgtgacagcagaagtccactgggctaacctgactgtcagtgaatgccaggagatgcatggagagttcatgggatctgcgtgcggccatcatggaccctacactcctgatgtcctcttttggtcctgtattctctttttcaccaccttcatcctctcaagcaccttaaagacgtttaagacgagccgttatttcccaaccagagtacgctccatggtgagtgactttgctgttttcctcactatcttcacaatggtgattattgattttttgattggagtcccatcaccaaagcttcaagttcccagtgtgttcaagccaacaagggatgatcgcggatggattattaatcccattggccccaatccctggtggactgtgatagctgcaattatcccagctcttctctgtactatcttgatattcatggatcagcagatcacagccgtcattattaacaggaaggaacataagctcaagaaaggctgtggctaccacctggacctactgatggtggccatcatgctgggtgtctgctccatcatgggcctgccctggtttgtagctgcaactgtcttgtccatcacacatgtgaacagcctcaagctagaatctgaatgctctgctcctggagaacagcccaagttcctgggcatccgagaacagagagtgacaggccttatgatctttgtgctgatgggctgctcagtcttcatgacggctatcttaaagtttattccaatgccagtactctacggagttttcctttacatgggagtttcttcactacagggaattcagttctttgatcgtctaaagctctttgggatgcccgcaaagcaccagccagatttcatctacctgcggcatgtgccgctgcgcaaagtgcacctcttcaccctcatccagttgacctgtctcgtcctgctctgggtcatcaaggcatctccagctgccattgttttcccaatgatggttttggccttggtctttgtcaggaaagtcatggatctctgtttctctaagcgagagctgagctggctagatgatctcatgcctgaaagcaaaaagaagaagttggatgatgccaaaaagaaggccaaggaggaagaggtcatagtccttgcaccaactgtatacctgggggcctcaaattacagaacataggaagggtcatgtgaaaagtcagcatgtctggaatcccgagggttatatttaggagctgggaagattacccccaaagatgttctcagctaagaatggattagggattcttgcttctgtctgttcttaatttttgggtttgacaaccacttattttttcctttgtttacaatctactcaccaggctcatacctacaatgtgaacatacagtatgcccttattagcagattcaatggctcacattctttcaaaaggtctaatttgacaaatacataagacccattatttcctagaatgtttgtaatatatctaattgcaaatggtgctgtggttggcaccatgcaaagataacttgcataggactttctgtcttttttcatttccctcagcacttggcatcttgtcatctacacaatggaccctcaataaatggcctatatgtgcaaagaaagaatgtgtagcaaatgaaaataccagaccaagaaatgagtgagctgggaagtgtttccaaatacagttagtgcctaaaatagtgtcctttgaaaaaacttttaaaagacttttttttaggccaggcataatgggttatccctgtaattccagggcttttgggagttgaagctggaggattacttgaggccagaagtttgagactagcctaggcaatataatgagaccctgtctctacaaaaa

SEQ ID NO: 467 - protein, 1034 aa, Homo sapiens
MPAAGSNEPDGVLSYQRPDEEAVVDQGGTSTILNIHYEKEELEGHRTLYVGVRMPLGRQSHRHHRTHGQKHRRRGRGKGASQGEEGLEAHDTPSQRVQFILGTEEDEEHVFLFTELDEICMKEGEDAEWKETARWLKFEEDVEDGGERWSKPYVATLSLHSLFELRSCLINGTVLLDMHANSIEEISDLILDQQELSSDLNDSMRVKVREALLKKHHHQNEKKRNNLIPIVRSFAEVGKKQSDPHLMDKHGQTVSPQSVPTTNLEVKNGVNCEHSPVDLSKVDLHFMKKIPTGAENVLVGEVDILDRPIVAFVRLSPAVLLSGLTEVPIPTRFLFILLGPVGKGQQYHEIGRSMATIMTDEIFHDVAYKAKERDDLLAGIDEFLDQVTVLPPGEWDPSIRIEPPKNVPSQEKRKMPGVPNGNVCHIEQEPHGGHSGPELQRTGRLFGGLVLDIKRKAPWYWSDYRDALSLQCLASFLFLYCACMSPVITFGGLLGEATEGRISAIESLFGASMTGIAYSLFAGQALTILGSTGPVLVFEKILFKFCKDYALSYLSLRACIGLWTAFLCIVLVATDASSLVCYITRFTEEAFASLICIIFIYEAIEKLIHLAETYPIHMHSQLDHLSLYYCRCTLPENPNNHTLQYWKDHNIVTAEVHWANLTVSECQEMHGEFMGSACGHHGPYTPDVLFWSCILFFTTFILSSTLKTFKTSRYFPTRVRSMVSDFAVFLTIFTMVIIDFLIGVPSPKLQVPSVFKPTRDDRGWIINPIGPNPWWTVIAAIIPALLCTILIFMDQQITAVIINRKEHKLKKGCGYHLDLLMVAIMLGVCSIMGLPWFVAATVLSITHVNSLKLESECSAPGEQPKFLGIREQRVTGLMIFVLMGCSVFMTAILKFIPMPVLYGVFLYMGVSSLQGIQFFDRLKLFGMPAKHQPDFIYLRHVPLRKVHLFTLIQLTCLVLLWVIKDAAIVFPMMVLALVFVRKVMDLCFSKRELSWLDDLMPESKKKKLDDAKKKAKEEEVIVLAPTVYLGNYRT

SEQ ID NO: 468 - DNA, 4102 bp, Homo sapiens
gtcctaccgagggaggagctacaggccaccgcgaccagcagagagcgaaggcaggagggaccagcctggcccagccccttcattttactgtcgggggtagtgaggaggaagaggaagaggcgaaggctggcggaggaggaggacaattatatagagtctgttgtgaaatttagattagaacataataaatgctctatgttcaacaagaacaacagcaacaaactcagaagcactcctcgctaccgccggggagacccaggatacctaaactttactgagttggggccactcaagcctgaacagaaggatcagtggagccaacatagaccagatgaagaagctgtggtggatcagggtgggaccagtacaattctcaacattcactatgaaaaagaagagctggaaggtcacagaactctgtatgtgggagttcggatgccgcttggccggcagagccatcggcatcaccgcactcatggccagaagcaccggagacgagggcggggcaaaggagccagccagggggaggaaggcctggaagccctggcccacgacacaccatctcagcgtgttcagttcattcttggcaccgaggaagatgaagagcatgtgcctcatgagctgtttacagagctggatgagatctgtatgaaagagggagaagatgctgagtggaaggaaacagccaggtggctgaagtttgaagaagatgttgaagatgggggagaacgctggagcaagccttatgtggcaaccctttcattgcacagcctgtttgagctaaggagctgccttattaatggaacagtcctcctggatatgcatgcaaatagcatagaagaaatttcagacctgatcctggatcagcaagaactgtccagtgacctgaatgacagcatgagggttaaagtgcgggaagcccttctcaaaaagcatcatcatcagaatgaaaagaagagaaacaacctcattcccattgttcgctcctttgctgaggttggcaagaagcagtctgatcctcatttgatggataaacatggtcaaaccgtgtctcctcagtctgttccaactacaaatcttgaagtaaaaaatggagtgaattgtgaacatagtcctgtggatttaagcaaggtagaccttcatttcatgaaaaaaattcctactggggccgaggcctccaatgtcctggttggagaggtggatattttggaccgtcccattgttgcctttgtgaggctgtctccagctgttcttctctcaggcctaacagaagtgccaatcccaacaagatttttgtttatcttattgggtccagtagggaaaggtcagcagtaccatgagattggcagatccatggccaccatcatgacagatgagatttttcatgacgtagcatataaggcaaaagagcgagatgatctcctggcggggattgatgagttcctagaccaggtgacggtgctccctccaggagagtgggatccctccattagaattgagccacccaaaaatgtcccttcccaggagaaaaggaaaatgcctggagttccaaatggaaatgtttgccacatagaacaggaaccacatgggggtcacagtgggccagaacttcagcgcactgggcggctatttgggggcttggtgctggacatcaagcggaaggccccctggtactggagcgactaccgagatgcactcagcttacagtgtttggcttcctttctgttcctgtactgtgcctgcatgtcacctgtcatcacctttgggggactgcttggagaagccactgagggacgcataagtgcaattgaatccttgtttggagcttccatgactgggattgcttattccttgtttgcgggacaggctctcaccatcctgggaagtactggaccagtgcttgtgtttgaaaagattttgttcaaattctgcaaagactatgctctttcatacctctccctgcgagcttgtattggactgtggaccgctttcctgtgtattgtccttgtggcaactgatgccagttcccttgtctgctacattacccgtttcactgaagaagcatttgcctccctaatttgcattattttcatctatgaagcaatagaaaaactgattcacctggcagagacctaccccatccacatgcacagccagctggaccaccttagcctctattactgcaggtgtactctgccagagaatccaaacaatcacaccctccagtactggaaggaccacaacatcgtgacagcagaagtccactgggctaacctgactgtcagtgaatgccaggagatgcatggagagttcatgggatctgcgtgcggccatcatggaccctacactcctgatgtcctcttttggtcctgtattctctttttcaccaccttcatcctctcaagcaccttaaagacgtttaagacgagccgttatttcccaaccagagtacgctccatggtgagtgactttgctgttttcctcactatcttcacaatggtgattattgattttttgattggagtcccatcaccaaagcttcaagttcccagtgtgttcaagccaacaagggatgatcgcggatggattattaatcccattggccccaatccctggtggactgtgatagctgcaattatcccagctcttctctgtactatcttgatattcatggatcagcagatcacagccgtcattattaacaggaaggaacataagctcaagaaaggctgtggctaccacctggacctactgatggtggccatcatgctgggtgtctgctccatcatgggcctgccctggtttgtagctgcaactgtcttgtccatcacacatgtgaacagcctcaagctagaatctgaatgctctgctcctggagaacagcccaagttcctgggcatccgagaacagagagtgacaggccttatgatctttgtgctgatgggctgctcagtcttcatgacggctatcttaaagtttattccaatgccagtactctacggagttttcctttacatgggagtttcttcactacagggaattcagttctttgatcgtctaaagctctttgggatgcccgcaaagcaccagccagatttcatctacctgcggcatgtgccgctgcgcaaagtgcacctcttcaccctcatccagttgacctgtctcgtcctgctctgggtcatcaaggcatctccagctgccattgttttcccaatgatggttttggccttggtctttgtcaggaaagtcatggatctctgtttctctaagcgagagctgagctggctagatgatctcatgcctgaaagcaaaaagaagaagttggatgatgccaaaaagaaggccaaggaggaagaggtcatagtccttgcaccaactgtatacctgggggcctcaaattacagaacataggaagggtcatgtgaaaagtcagcatgtctggaatcccgagggttatatttaggagctgggaagattacccccaaagatgttctcagctaagaatggattagggattcttgcttctgtctgttcttaatttttgggtttgacaaccacttattttttcctttgtttacaatctactcaccaggctcatacctacaatgtgaacatacagtatgcccttattagcagattcaatggctcacattctttcaaaaggtctaatttgacaaatacataagacccattatttcctagaatgtttgtaatatatctaattgcaaatggtgctgtggttggcaccatgcaaagataacttgcataggactttctgtcttttttcatttccctcagcacttggcatcttgtcatctacacaatggaccctcaataaatggcctatatgtgcaaagaaagaatgtgtagcaaatgaaaataccagaccaagaaatgagtgagctgggaagtgtttccaaatacagttagtgcctaaaatagtgtcctttgaaaaaacttttaaaagacttttttttaggccaggcataatgggttatccctgtaattccagggcttttgggagttgaagctggaggattacttgaggccagaagtttgagactagcctaggcaatataatgagaccctgtctctacaaaaa

SEQ ID NO: 469 - protein, 1061 aa, Homo sapiens
MFNKNNSNKLRSTPRYRRGDPGYLNFTELGPLKPEQKDQWSQHRPDEEAVVDQGGTSTILNIHYEKEELEGHRTLYVGVRMPLGRQSHRHHRTHGQKHRRRGRGKGASQGEEGLEAHDTPSQRVQFILGTEEDEEHVFLFTELDEICMKEGEDAEWKETARWLKFEEDVEDGGERWSKPYVATLSLHSLFELRSCLINGTVLLDMHANSIEEISDLILDQQELSSDLNDSMRVKVREALLKKHHHQNEKKRNNLIPIVRSFAEVGKKQSDPHLMDKHGQTVSPQSVPTTNLEVKNGVNCEHSPVDLSKVDLHFMKKIPTGAENVLVGEVDILDRPIVAFVRLSPAVLLSGLTEVPIPTRFLFILLGPVGKGQQYHEIGRSMATIMTDEIFHDVAYKAKERDDLLAGIDEFLDQVTVLPPGEWDPSIRIEPPKNVPSQEKRKMPGVPNGNVCHIEQEPHGGHSGPELQRTGRLFGGLVLDIKRKAPWYWSDYRDALSLQCLASFLFLYCACMSPVITFGGLLGEATEGRISAIESLFGASMTGIAYSLFAGQALTILGSTGPVLVFEKILFKFCKDYALSYLSLRACIGLWTAFLCIVLVATDASSLVCYITRFTEEAFASLICIIFIYEAIEKLIHLAETYPIHMHSQLDHLSLYYCRCTLPENPNNHTLQYWKDHNIVTAEVHWANLTVSECQEMHGEFMGSACGHHGPYTPDVLFWSCILFFTTFILSSTLKTFKTSRYFPTRVRSMVSDFAVFLTIFTMVIIDFLIGVPSPKLQVPSVFKPTRDDRGWIINPIGPNPWWTVIAAIIPALLCTILIFMDQQITAVIINRKEHKLKKGCGYHLDLLMVAIMLGVCSIMGLPWFVAATVLSITHVNSLKLESECSAPGEQPKFLGIREQRVTGLMIFVLMGCSVFMTAILKFIPMPVLYGVFLYMGVSSLQGIQFFDRLKLFGMPAKHQPDFIYLRHVPLRKVHLFTLIQLTCLVLLWVIKDAAIVFPMMVLALVFVRKVMDLCFSKRELSWLDDLMPESKKKKLDDAKKKAKEEEVIVLAPTVYLGNYRT

SEQ ID NO: 470 - DNA, 102445 bp, Mus musculus
  misc_feature (1)...(102445): n = A,T,C or G
accacacctagccacttttaatatttttagatttttatctatttgtttaatgtgtgtatgtatgttggaggaggagcacacatgtaccctggcacatatgttaggtcaggagacaacttttggtagtctgttctttttttccatgatgtgatctcaagagtagaacccaaatactaaaatttggcatcaggttccacccagctctccctgtagcagctccctgctcctctatctccttgcatgctctgcttttctttctttctttctttctttctttctttctttctttctttctttctttctttctttcttaaaggatttattcatttatttaatgtatatgagtacactgtagctctctctcttcagacacaccagaggagggcctcggatcccattacagatggttgtgagctaccatgtggctgctgggaattgaacttaggaccttcggaagagtagtcaatgctcttaactgctgagccatctctccaacccttctggtgagatcttatttgtgtatgacttccatgtggtggtgatgagacacaaagtcctattaaaatgaaaatcatggggtctggcttagtggcaaggttgttacttaattgacaggaggctcttgttaaatccatggatccattctgattcatgggaattcagagagatgggctaacagaggacgggcctgatatcttctattcagtgtgttttgagacccatgcatgttgttgcatgtggtcctggttcatttacattgtcagacagcattccattacaaagacaggcttttgtttgcttgcctgtgtgtatccatgtgcacagggacagaaagcccggaagtcaacattgtgtcttctctcaaaggcttcatgattagctttggtgttctaagtctacagttactttgtgttagattttgcatttggtgtgaggtgaggcatggggatatacttgttgaaagaaagaaaggggaaaggaagaggaggagaaggaaaaggaggaggaagaagaagaagaggaggaggaggaggaggagagccctttggagtgatgtcagcagattggcacagcaggaagtctcacctttttttttttttttaaattttatttattcattatatgtaagtacactgtagctgtcttcagacactccagaagagggagtcagatcccgttaccgatggttgtgagccaccatgtggttgctgggatttgaactcctgaccttcggaagagcagtcgggtgctcttacccgctgagccatctcaccagccccagaagtctcaccttttatcccttcacagaaacagaattcactaacaaagcacctttacgggagaagcctggaatccagtcaagagacagtggtatccaaaggacagagctgagacagactacactgaacccatcctgcatcacttctgagtctatgactttcagttaataccatcttctgcaaagaagcctccagtactctggtcccagacagatcccagagccaagtgatgtcccagatcaatggagaagaggaattaaagaacggacgttctgccttgctggcattgaggcacacggtagagggacacagggtagggagcagggggctcagtgcagagttggtaaacttgaaggaactgagagaaaccgaatattatctgcttttattatattgaaagatttagagggaattggcagaggctgcgttaaggaaaataataaaatgaaaaccattcctgggatcaaaatgtacaaaaccgtaatcaaaaagtaatgcacgtatatagaattttaattttaaaaatgaaatagcctgtgaagtctatttttgtcccatgaatctgtgaatccctgtagcaggaccacactgccttgagttctgtagcttaccagtccctgtgagattcagcagctttcagcactaagatacaatatgcagccaaatgttgggaatgttatttttaaaaatatattacaagccaggcagtggtggtgcatgcctttaattgcagcacttgagagtccaggctagccttgaactcagagcctttggctccggagtgctgagattaaagggcagacaccactaacaccatgcctggctagccattagtatctttgattccagttcctagtgtctctcttttggttcccttacttaagttttagacaaaaatgaagtcattgcattgctaaatttgtcctttgtgatttgccttcctgatattttctccaccatttcttccactcctgccccccaacatcttactcagctataccaaagtttccattgtcttcttctccttttcctcctcctctccctcctccttcttcgagatttattttatgtatttaagtacactgtcttcatgcacaccagaagaaggcattggatcctattacagatggttgtgagccaccatgtggtttctggaagttgaactcaggtcctttggaagagcagtcagtgctcttaactgctgagccatctctccagccattttactctgttaagcttaaatttcctcgtacccatctttgcctgtctctagtctaaagcacacattcttcaggtcatcgcctgtcatccccttcctcttttgccacttcagctgagaccattagcttcttttatcttgaccccttagctagagctcttatctccccctgattcccatggcctcctctgtgaacttcactgcagacataaaatgtctgagttataatagccagttacctgactgagcatccccactaacctgtaagttctggaaaggcagtgtccttgttcttaacccttgacccgaggggcctatcatcatgctggggcacataagaaatgtttagtaaagaaatggaatctcgccgggcgtggtggcgcacacctttaatcccagcacccgggaggtagaggcagatgggtttctgagttcgaggccagcctggtctacaaagtgagttccaggacagccagggctacacagagaaaccctgtcgagagagagagagagagagagagagagagagagagaggaagaagaagaagaagaagaagaagaagaagaagaagaagaagaagaagaagaagaagaagaagaagaaagaaagaaagaaagaaagaaagaaagaaagaaagaaagaaagaaagaaagaaagaaagaaagaaagggaaaagaaaaaagaagaagggaaaagaagaagggaaaaatgggaaaagggaaagggaagaagagaaaagaaatctggtctcccatctgcatagatgcttggaacagattctgtaatctctttgagtctctatttcctagtcttgtaactgtacagaacacctatgccacaaagtggtatgagacttaagtgggtatccacattctgtgtgtttttaaaaaaagatttacttatttattttatgtctatgagtacactgtagctatatagatggttgtgagccttcatgtggttgctgggaattaaatttttaggacctctgcttgctctggtcaacccctctgctctggcctaaaggcttattattatatataagtacactgtagttgtcttcagaccagaagagggcatcagatctcattatgggtggttgtgagccaccatgtggcttctgggaattgaactcaggaccttctgaagagcagtcagtgctcttaccaactgagccatctcaccacccccttgttttgttttttttcaagatagggtctcactatatagctctgcctgtcctggaactcactatgtagaacagaatggtcttgaaatcacagagatccgcctgcctctgcctcccacgcactggaattaaaggcacgggtcactatgcctggcttccatattctgtaaaggcctgttccatggcaaaaaaaaaattaaattatttctgtgtatacagtgttctgcctgcacgtaggcctgcaggccagaagagggcaccagatctcattacagatggttgtgagccaccatgagggtgctgggatttgaactctggaccttctgaagagcagtcagtactcttaatctctgagccatctctccagtcctcagcaattttttaataagtgtttgtccctttcttttccccaccttctgtgactctcaacctgtgggtcgcgaccccttgagggttgttgaatgacccttttacaggggttgcctaagaccatcagaaaacacatgttcatgatccataatagtagcaaactaccgttatgaaatagcaatggaaataatttcatagttgagggtcaccacagcacgaggagtgggattacagggtggcagcatcaggaagttagacctttcagagctatcccttcctatgtacacttcctgaactggccactaggtggcaatagccagtggcctgattgtctcagcactgcctcccaaatgccctgtgccaggccctcttatacttcgccccccccccaccccacccccaaaagcaaaaagcaaaatggttaataatttggtgaaggaggatatcctttcccaaaacagctttttgagagcctatcaccattcttggcagcctggtcatgaacttcagaaaattcttacttgatttttcccgttatagattataattcaattcaaagtgtatgaagaggggccgtcttaaggaaagtggaggagagaagacactgagagacaaagagaaaatgaatagtgaacattgtagtaacaccacagagagaagatgtttataggctcatcctacagagaggatgctcacactcatccttctcctctacccagcagacatccctggtgcagccagtttcctcaccagtcaatcaagagctgaggctgaggaaaaaaaatcctagcacttgggaggcagaggcaggcagatttctgagttcgaggccagactggtgtatagagtgagttctaggacagccagggctacacagagaaaccctgtctcaaaaaccaaacaaacgagctaaggcttggggggtaggcacatgcacatgggaaggggccaggggagcatcgggggggggcattaaaagagatgaggaaaaagtctctgctctaaaggagtttatggtctggtggtggacaaaggatccataaaattaagtgctaaactctagattccaagaccatgatgattaccagtgagatttattctgtttaagataggattttaccaggtagcccaggctggtgtggaaagcccccttgtgtccctaaccgtcttcaaacttctgattctcctgcctctgtttcctgaggttttggaaaataggctcgtgccaccatgcctggctctctgagtagctcgggaataacagcagagcttttcagaggaacagagtcacgattggcttggctagagagagataagcattctgccttctcacaaagccaatgtcagctgttcatataccaggacaaactaagcacccagccatcaaggagcttcaggaggttaatatgaaacatggtctgggtctgtacagatagcgtggaatgagctcaaggcaagctaaggtgaagaacgtaagctatgaaaccgtatataccagctcctctgtgactttaaagggtattatttgtaactgtacaccgctaaaacaaacaggcttccttgaagacacttcttcttcttctttttttgtttttgtttttgtttttgtttttttcgagacagggtttctctgtgtagccctggctgtcctggaactcactctgtagaccaggctggcctccaactcagaaatctgcctcccaagtgctgggattaaaggcgtgcgccaccaccacccagcttgaagacacttctaaggcatattcctagtggtttatctgagggtgaggccagaagtgggagtttaagaagtgacaagtttaactgggcatggtatgacgtacctttagttccagcagtcatgaggcagaagcggaggcatttgggtctctgtgtggtcaaggccagcctggtctacaaagcaagtccaggacagtcaaggctacacagagaaaccttgtctcataaaatcaaaaccaaacaacaacaacaaaacaaaataaaacaaaacaaaacaaaataaaaaacaaggaaagagaagtgacaagtttattttcttatattacaagttttactaataattaagtatcaccattttttgtaatgcaaagttaataaaaataaaaacatggggctagagggatgatggcttagcaggttaatagtccagctactcttccagaagacctgagttcaattcccagcacccacatggagactcacaactgtctgtaactccagttccagggactccagcacccttacacaaatagacatgcaagcaaaataccaatgcataataacaaaaaaaaatcattttaaaaaaagaaagaaaataaattaaaatacattcattggtattcaatagatagcacaggcccagaacagcggccgagggcaggttctggatcgccatggctgacggaagagctcacatttgacccgtcctgttgaatttccattatttctgttacaattccagcctaaactactagtattcccctaccaccaccttttctcatgccccctgtgggtatacacatcttttttttcttatgtaaattggtgtgctgcctgcatgtttgtctgtgagggtgtcagatccctggaagtgaagttacagacagctgtgagctgccaggcgagtgctgggaatggaacccaggccctctggaagagcagccatctctccagccccctcctctaccctcttttgagacagggtctcatgtagcacaggctggtctagctctttctctatagccaaggatggcctctgattctccaccttgctcctttagcctctacctccttggtgctgggtttacaagtgcgtgctactgcatacagtatacagtgctaggctttgagctcagggctttgtgcatgccaggtgagtgctcagtggtctgaactacatcccagtccttggaagaggcttcctaagaggtggcaagggtgctggaggcatggcttggtggttaagaacctgctcttccaggtgacaagagttgtgttcccagcacccaagttaggtggtggtggcgtcagctcaagcaggggacctgatgccttaggtctctacatactcacacatgaatatagttaaaaacaataaaaacaaaaatcttttaaaaattttttttagaggctggagagatggctcagaagttaagggcatttgctgttcgcccagaggttcctgagttcaattcccagcaaccacatggtgnnnnnnnnnnnnnnnnnnnnnnnnnnnnnnnnnnnnnnnnnnnnnnnnnnnnnnnnnnnnnnnnnnnnnnnnnnnnnnnnnnnnnnnnnnnnnnnnnnnnnnnnnnnnnnnnnnnnnnnnnnnnnnnnnnnnnnnnnnnnnnnnnnnnnnnnnnnnnnnnnnnnnnnnnnnnnnnnnnnnnnnntctccagccaccatgtggttgctgggaattgaactcagtacctctggaagagctgtcagtgcagtgctcttaaccgctgagccatctctccagcccccaaataaaatagtctttaaaaaaattttttttattcatatctgtgtgtagaagtgtgcacctgtgtgcaggtccccatggaggccacaagaaggcatcagaccctttggagctggagttacaaacagttatgagccaacccaatgtgtgtgctggacacttaggaccttagtaagaacagcaagagctctgagccatctctccagccccacgtctcttttcttttctttctttcttttttctttcttcctttttcttttcttcatttctcttttcttttcttttttaatgtggttgttgttttgaagggtagccactgagacaaagaataaaaggatgagtgttatcggaaatacccaggacaggtccatggaagagacgtgaggtgagaaggcttcaggaagaagattcatctgtgtaagccaagcggcaggctcttagccttctcaggctacaagctgcatggtagctattgatatcttttttttttccctgtcaacgttgcctgaggtcagtttcaaccagattttgcttggaccacaatattgggtggagacctagcagaagcctgtgagcatccactaaaaatatttagtgactccatgcctgggcctggcactgtattaggccatggaagctggataaaagaataacagaccacccctgctgagagaaaccctgtgctagaaaaaaaaaaaaaaaaaaaaaaggaggaggaggaggagcaggaggaggaggaggaagaggaagaagaagaggaggaggagaaggaagaggaggaagggaggaaaccttcagtatatttcaaaaggaagaaagacatcaggcctctacttgagcacaggctggaaactggacggaggaaagatggatcctgagagtccagcctgggagactatacagttagcctgtccgtgagccgcataagctctcattgaagaaaggctctcagtcattaatggacaagtctattttctgccagtgacaggctggagtgtgtgtgggggtcactcctgtggagttagtgtactggtccctggtctttaaagttcatctctagccagggatgtcgcctgctgagctttccagaactttcacttcaggtcacagagaaagtcagacactaagggttacagtcttcaaacgtcgcccacaagagggcagtggccggaagcacgttcgccggccctaggaaccgcccgatgctttctggactccagagtaccgttcccaaaccgactgagactggggacaaaggtccggcactcagcacacagccccctaggactggtgtctggtagcggagctctggagtccttcattccaactccctgtagtttggcatctgaaaccctgacttggtgggaggccagtcagaaggtatcaaaaacaaaacaaacaaacaaaaaaaaaatcgagcctgacctctcagggcgaaaggggatggctctaccccaaccccaccctctggtgagtcacctctctccaaaccagagcctgcctctcctgcgccccgtgccaggcgagcagggctgggcgggtactaaggtgggctccatccctgagcccaaggcgggccgacaagctgcagcgtgtccccgcgggtgtccctgtttactctgagccctggagcgaggtgggggcgggtccatgtggccactccttcactccgcctcctgaggacgcaggccccaatcccagaccggttcttacaaagtctccaaatcaaagctcagcctttcccgcaccttcccggcggaccggccacccctgcccccaccctaggctagggaggcactgtctgggtttccccaaggaaatcaggcctccgcctagacagcggctcgggaccccactgaggggatctgaaatcctggggtgtgacatagagttttaaagaggcactagagcgcagctctccttgccccttaccccattcccacccttggctctaccggctctagggagcgctgggatgaggtagacgcagttagaggacagggtgcccggggactcccactctcggaccgcttcccagaactccaaagcttgtagcgcctccgactccccctccccagggcagcgcgccaaatcagcgcatgcgcactgtcaggattgccgcgtagctctttctcccccccccccnnnnnnnnnnnnnnnnnnnnnnnnnnnnnnnnnnnnnnnnnnnnnnnnnnnnnnnnnnnnnnnnnnnnnnnnnnnnnnnnnnnnnnnnnnnnnnnnnnnnnnnnnnnnnnnnnnnnnnnnnnnnnnnnnnnnnnnnnnnnnnnnnnnnnnnnnnnnnnnnnnnnnnnnnnnnnnnnnnnnnnnnnnnnnnnnnnnnnnnnnnnnnnnnnnnnnnnnnnnnnnnnnnnnnnnnnnnnnnnnnnnaccccccccccccgcggcacttcagtccggggagcagcggtgcgagctccaggccagtgcactgaggaggcggaaacgggggagcccctagtgctccatcaggcccctaccaaggcacccccatcgggtccacgccccccaccccccaccccgcctcctcccaattgtgcatttttgcagccggaggcggctccgagatggggctgtgagcttcgccctgggagggggagaggagcgaggagtaaagcaggggtgaagggttcgaatttgggggcagggggcgcacccgcgtcagcaggcccttcccagggggctcggaactgtaccatttcacctatgcccctggttcgctttgcttaaggaaaggataagaatagaagagtcggggagaggaagataaagggggaccccccaattggggggggggcgaggacaagaagtaacaggaccagagggtgggggctgctgtttgcatcggcccacaccatgctgaccccgccgttgctgctgctgctgccgctgctttcagctctggtctccggggccactatggatggtgagtgagattccggcggcccccatggacccctgggggctcccccctccccaacccccactcctgcgtctggatggggaagggagacgcgggagggggtgccttttgttatcccagtccagctgacacagcagcggcctgactgggggcggggatggggtctgatttgggggatgggagcctgggacaaatgatgcttccagggccccccagctcagacaaagaccagaggcctgggtaggaaaagagggctccccctttttctgatcttgggattaagaggccttctcttcctatctctggtacgggagggcctctgcctcccctacatcctccaccctcccgcccccccacccccatctgaattgtgaaggaatccggatttgctgtgtaccgctgcaaaagggggcggagggccttttgcagtggactctgaaggctggaaggcaaagccggctaggggtgccctgctggccaaagggcaggcaggccgagaaagctgtgggtggggataggcagggccccctgtttgggtgtggaatgagccctgcatcccaggcatggaggcccgggtccagaatcctgggctgcctgcctgggttccgaagtgagcagctccccgctgagggcctcagtcaggagcccggttgagggatggaggggtctggtgacgcttatggctggctttcccttcttaattcctgggagctttaagatgagaggaaaaacgtcagatgtcatcattctggaagagactggagaatggtctggaacgctggggaggggttcagaggaagctctgtctccccgatttcaggcttgatcacagtttgggttggaaggagagttggaggttgggatgggggttatgaccatgcccccaatcctgctcatttagtaaatgtgtaaagcccagccctgtctcacttcatacatacactttgtatattagttaggtttgggctgctgtgttgttttgggggaattgcatgcccctcgtccctatttctgtcagctgtttttcctcttccatgagtccccagttcaagacttgcccaggcttcacgctggggtcatggggttgaattgggctgggtccctaacttgagaaggggtgagattttgtgacttcctgtcaggtttgcctctcactgaggacaacagcttcgtagcatcttacagccctcctctgccttcaagagcttgccaggccgggattgggaaagtttttctctgaaactagattatgtatcctcccccacccctgtctctaacttgtttcagttgtgggaggaggacaagagggtcaggaggcagctgtgcccaggaaaacagtttactcagtggccttcagtcatgtcatgtcggggactgtcttgtctagctgccacccctaattttctgcctgcgatgaggaaagagactttgccctgtcaggcaagcctgtgcagccaccctctgtccttcacatctaacgtcatcccgtgctttcttcttggtctcagagctgggatgggagaagaagggaaactgaggcaaagagctttgggaagaaaatgtattaagcaagaaatggacctgccagaagccctgtggaggagggtggatggaatcaggtagaagggaaagatgcccgtggagatgtgtggctcattcagtgctgggtcctgggaagcagaacccccaagaccctaaatgctgggctaagttgataggtggtcattgaatgaggaactctgacacgttccccttaactgtctctagccgcgtacctctaagtctccagttcatttcagctctgcacacagtttctcagggctgggataaaggtcagtggtagggtatttgtcctagtgcacgggatgccccctgttccatctctggcaagaaatacagtccgagagaaaggactacttcctggggaggaagagagaacctgtagaaaagtagaccccgtgcattctggagctcttagccaggccctctagacactgaacattcgtcttggctttctagagaaggacccttctgcctcgacctacctaacagttctaattgcccttcctgttgctcaggaataactctagggaccgccccatactctcttccctctgtgtctgaaactcatccgggagtcctttgccttatggggtgagaggcttcacttcctcctggtagacacatttggatacatttgtagccaaggaggatggaaaaggcagagaaggatcattgacagccctgctgagatgggacacttcgtggtggaggaacttgacaggcagccagctcagggaagacagctgacttctttccccagctctctcctctccagcgtgagccggcatgttagtagttgctaggaaaggtggacagttgatgtgagttatgaggttgaagtgtcagcctcctgtcttcctggagaacgttccagttctctattccccctgttcagatccaaatcctaaacatcccttcttcaaagccaggcacgtgtaggaaattcattggggctattattttgatgttgggggctacttcacaagacttttttctttttcttgttctctgtgcttttatttgttttattattctctatcacctgcctttactgggccttccaaccttgtcaccccaggcccagccctaagtcagatcctttccaaactcataccctcttcaaaccccttcctggggttgggcacagctcggtgggggacggggtggcagggcacacatagcatgcttaaggccctggattctgtcccctgtaccaacaaaacccaaatcaaccagccatcgcttactattgcaaagaccttccttatccccattttactcttaattgcaaaccaaaaatgtattctctcacacacaccctgaattctcttctgggggtcttccctgccccttggattctttaccctgcctgtgatccaggtctgagcaggagagcttgcttgtccttggggaacctgggctgttgagtgggaccatgcaagggtcccagagttggtggtgacttgtgccagggaacctggtcccgcctcctgtgttctgtcccagatttcagcctggttagcaggatcctgcattgtttggagaaggaagcagttggctctggagtgtttcccgtgctgcgacctcatggcaccagcgcagagcctcccagaaggtgctgaggggcagagagaagggattcttcatcacactcccatgagatgacaatcccatgccctgacttccctggctgaagagtttgacttccatgtgtgttgtgtggggattgggggagacaccctcccactctgttagagacagcagcctctaacctggactcccattagtcaaaatgtttctgatgctgggactttgtctcccaaagccaggatatgtactgccctccactctgtcacagggagagggggtcattttctgggttcaccccaggagagctgtgtcaccctctgggcaacctctgccctgagcccacttcctgtcttttttggctgtctgctttgctgtgtgtctgctctgtgtctctggccctcttggttcctaccctttgcagcctttcagctttgattgttctcagtcactgtcttaatttcttttgtctaagtctgacttctgtgcagtcccctggatcttgaaagctactggtagtggtatttctcctgggctttcctgcctgtcccttaccttcctggacccagatggtcccctccaacttcctctctcctaaccctcctcactgattttgggaagtgtcattagggcacatatttctggaacaacaacaacaaaatgaaaaaaaaattgattttttttttttttgatgttgttgttgtgggctaaaagggaggactggaggtatttcagaaagaaaaaaaggaggtgagacttctagtagaacttcctcctaatggaaaagacctagagaacaggtcaggagcttaggtccttaccaccagtgagcggtgagcgcaggccatgtgggcatgggggagggccaataacggactcagccttgggagaaagaggttgacctccgcaggcattccagtggatctggattttatttgtgggggaaaggaagagacagggtcgtgggtcaggctgatgtcctgctgagtcaatattgactcaggattgaagggtagacccttctcttcccctggcggtccaagccaccctgtctgtccatctgtcccaggccgcagagcagggtttcagactcaggaatgacaaaaatgtgtctgaacctcactgagcaggaaggagccactggtaacacccaaaatacataaaatttggggaaagctctgtgttgggcaggaggccttccctgcctggctctcctcaagtatttgaaagctcagattcctgcagtctgtccccagctctgcttgttctcttagcttagccatgcggtttctcttacagaatgtccccagacctattagagggtgcctagccctctctctaccctgtcactctccaagtggcccagggtcactttcttgctgttccagccttctgtctcctgtccttcaggaagaatgcctggggctcccaggggttgttgaagggcaggcactgcttctttggaaagtctctgtctgagactatactttctcccccttccctagccaagcattctggctcctgccaccaccctaccccaaggtcccagagtgggacagaagagatagccaaggcttgagccaggcagtggggtctgtgttgtgtctggatacacacccaaccccacacctcctggcctgcctggctccagcttggtggccctgggggccttggctgggctgggtgcctggttggggaggggcagggtgttggctaagttagcatggcggtcacatctctaggcaaagctgagaacagacgcccctgtgtccccgtgctccttcagctctctctccctcctccctctctccagcttctcccttaggccccagccctcctctgtcccattcttaccccactcctccatgccctcctccccagaggctacccagtctgaacaatgtctgttgccctccctctgacagggaccgatgttcctacctcttctttctcagggttctctgtaggatagccactggcaagcatctcgtagcctgacagttggaccccagggcttcagatctgtgtatggcacttagtggtcacttttaaagaatgttcattgccatctggtgtgggggacggtgaggggatgggcagggaccagaggttggtcaccaattcctgacccacaaagacaggttttctgagtgtggagttcagatgcacaagactccactaaggacatctaggttggcttggcctttaaagagattatacatttcctcctccatcccactccctcccagctccctcccagcctggaggaagcgtcacttggctgtggagactgccccaaagtaggttatgttatgtgttttccttctccccctgaaggaaatcaaagacaggcttcagccttctcactcaaaattcctagggctttctccaccatggccgacaggaagtcctttcacttatctctctccaatccttctgctatcctggctctcctgagagacccacaacctccccctccaccaccacccccatccaccctctgcccctgggcctaaggagatggtgcaggatagggtctgagccctcctcttcctttctgggagggagggagggagcccatcccccacggccctccacaagagcacatctggtttgcgaatctctcatttcagcttttggagtttgccagctgctgtttcctctgtcaaattcaggccaaaaatgggggtggggggggacagtgggggaaccatgtgagggccaaaggaggggatccatggctgggactgggaagacagaggaggtcagagcgaccagccggtgacctcaggccctggctgtgagttctgccacactgggagtgtcagggcatgggctcagccccaggtgggagagggaagacgtgtcattggcctgggtatcttggggagggggtccgctctgaactccaaacacccccatctgtctctgaatcccactgtggtccctctctcccccctcaggccgcctggctggccaggggaagcgatggtctccagcatgctaactaggttggcagggctgtttccccgggaagacctcacagctggcccagtggggcaatgaactcagcattatccacctcctcaaggggcctttattcccggatcagggtgggagggagggagggggactccaagggggcctggccaggccttccttgatgtgtttcctgaactcagctctgatgctggccaggggcctgggtacagtcccctctgccagagctggggatgagggagagagggacatttcagtgtggccatcagactccctccttcggagccctgacacacttttcttactctcctgtctcagcctgagttagtactgtgtcgtctccccaggaactgtaggtctggaggggtccatggcctttggatccatcacagtgcctagttcagtgcctggcacaaaaccggcctccagttctgtgtcagggaaacagaaccgggctttacccagcgggagaaaaggtgatagaagctgggagaggagattcctgctctggtgtggattgaaagaccccacccccaccccatgcaggacatggtgactggaacagatgggctgcctccccggtgagggctgcactctttaagaacctagagccctggtgctaaagagatgactcagtggttaagagcaccgcttgcttttccagaggtcctgagttcaaatcccaccatgcaaaggcagcttgcacctgtttctaactccacttccaggggatccggtgcctctgtgctctcctcaggcaccaggcaagcgtgctacccagacagcagtgcaggcaaaacacccatacacgtaaaacttaaaaagaaagaaaggaaaaacaaaacaacaaatgcagatttggctgaactgggttgagtaagtcctggtttgtcactttataatcctgggcaggtctggcccagaaactgtgggctagccttccctcatatcaacttgtggggaagactaaataagacggcacacggaaagagctagtttatcactgtctgaggctcccaggactgccagctgtctttggtgtagctcctcactgggggatgaaagggattagaaccaggtggtccctatggatataatcactccataggtgaggggcatcccagttagttcctagagatcaagccagccagcaccctgcctctgatgggtccttcttatccagagaactcccccgaaagctgaagtttctgcccagctgccctctgcagataacatctccaggccacgctgtgtgccaagggcagctccccagttctcatctgggggtccagtggtaaggagtaggagctgggtgatataggtcaagaggccagtagtgtcctgaggtcagaagcagaggttaggaaaggccagctgctggctgtcagtgggaacaagaggaacatggaggaaaggcacagcagagggctctgccctgccccgccatcatccctggcagggtgaggggtgctggtgtctggtgtggtgacaaacagcaaggaggtagagggacatgctgtacagacaacctagaaaacttgggaaggggtgataagatcctcttggctcctccagtgttccagacctactgtatagagaggatggatgctggagaagaacgagccttaggaaaccccagggtccaagagttgacttctgtccttccttgacatctaccctttctttccttgcctccagcccctaaaacttgcagccctaagcagtttgcctgcagagaccaaatcacctgtatctcaaagggctggcggtgtgacggtgaaagagattgccccgacggctctgatgaagcccctgagatctgtgagtaccttcccgggcttgctctctccagataagagcagccatctctagcctagcatggaccttgctctgtgcttgtatttgcccgtgacacagctaaaagtgtagccgcttctccggagtgcctgcagggtgcctggtgtgtgtagcagcagcacctgggatttctcctttggctgctacgtgcccaagactattggggacagtatcctctggggctgcatctctgtctcggggagataaccgcgccaccctttccttcgagcatttcctctggctggtgctcactgagcagcctccaggtcttgccaggtaccctgctgcccttagtcccaggccaaaggccactgccctgtaccagaagccccacccctgtgcccttcccgacaccctcccctcccctgcccccaataagtggtgtaatcagaggcagctgtttaaactgggagaaaggtccccacccagccttcacccatccagtggccaggatggggaatggttcatagggtagaagacttgctgccaagaccctagagtcctggggtctccacccagtgtctcccccacatggccaatcctggccaaggtcttagcatgctcagggcttcatctggctctggtcctatctgtgcccttttcccatacctccaaccatggttatcaagggtaacatgtagggtgggaatgaaggctcctgttttcttccctaccccagtgtcctgccctgggtgagtaggagccggggtattagacctgtagcctcctcctggctaaactacttcctctccacacggttgaccccctgcctgtgtgatggaaggacagaaaaccaaggagaagggctgggtcacactcttgttcattcttctttctgtttcctacaaatctcatcttagataattcccaaataacagaatcacatagccccatctggcccactgacccgacagaggttctgacaggtttatatagcccatgtggatgctcccaagagtggccaaagaaacactctgacagacgcccagacacgtggacacaggggtacacacaaacccaggcagggtcacaaaatggaaactcccttgcccacaagccactccctgcacaagcagtgccagtagggctccacccacacagacacaccctctcctaccttgcctgttgggaccattgtcttaccctctcgtccctccacctggttaccatggtaattaagagggatgtggtcagtaggccacaactttggacctctccagatccttttgtagatctttgctctgggttgcaagtctagaataatactgttgaattgaaatatagtataagtcacatacacggttctaaaatttccaagtagccacactaaaaaaattaatttgagtgcttttaccaaagacacctaaaatattgtttcaatatactaatgctatctgtatgaaattattagagatcgtttgccctcctttgatatatcaaaaactagtatatattttataagcaattttaaagatttacttaattttatttatatgagtatactgtagctgtcttcagacacaccagaagagggcatcagatcccattacagatggttgtgagccaccatgtggttgctgggaatcaaactcaggacctcaggaagagcagccagtgctcttaaccgctgagccatctcttcaacccctataagtagttttaacttaatgcacactcacagcatttgagaaccacatatggccggtgctgtgtacatgagttgactcacttgtagacccagctctgctctctgagaaccatacaaaggtggtttgtgtttgtttatcatttgagctcctttctgccagggactatgtttccttaacgctcatcaaaatctttcacttctgccttctgcctgtctcccgattacaggatgttgaggctggaggttccctaagcgtggtttgggagtaggccctagctctcccctctgcacagccgtccccagatgtgtggctactcttgtgagcagctatatgtagaagggtccgtccagtccctaaacctcttgagatctagaatgtatggctatctgaaatgccaatcttggcttattaaatctatctacccagtacagagacgactagacagccaccccaggcagcctggtcatgccgtcacttctgtttgctcccaggtccacagagtaaagcccagagatgcccgccaaatgagcacagttgtctggggactgagctatgtgtccccatgtctcgtctctgcaacgggatccaggactgcatggatggctcagacgagggtgctcactgccgaggtaagggctccccatactctcctgtgccaacaatacaagatcttttggcttcgtgtctggtgggatgaccagtttgtgatcgaggaccatctttgagctttagtgtgtatgagaccttgttctactctcatgcccaggcttgcccggccctttgggcttggagattgatcaaagagccctaagggcttcagccgtgggcctgactgaccactttcctctggctgtgtgtgcttagataagtcactgcctcttttcaagtccgttctcaactattcagcatttttatactgtttgtttttaattgtggactccttcaaaagctttcctatctgactcctgacagaggattggaggtgctgtgctcagagctggggataggcacagagggagagtttgtgaccctccagaactgcaaatctgggaggggcccggaagccactctgctccttcctttcccggcagcccatacattctcagagctggtggctgggggaggcagtttagtctgaggagggaacactagtgataagtcatacctcttagctgtgtagcagcttgagaggaacccatggtgtgggtagtgacaaagcttcaggcctagctcttagagaaatagtagcctcttttcttctgccctgggctctgggcctggagcaagcaacgtctgacagaccttgaggaagacagtcatgggagtcggggtgcggccagtgtcgtatgtcatacacatgtcagaaaacatctgcctgtgggaggcggcacatctggatcctttcactccggcatggactgtggagcaagggaatttgtgggggatttttcccctcctttctttttggctgatttcatctggagatcctggaaagagatacagaaattaagtttagggataacttcagccccgtgaccaagcttagccaacagtgtgtgcccaggttcaattccttctggaatacctttttagttacagaaacaaacaaacaaaaacttgactttgaacctcccccaatattagagaagtcccccaacccccgccacccagccccaaaccaagacgtcttttctagattttccacagcaggcaatgttttcttccttggcaaaagacagcgaaggcggtacatttgggctttctggtcagagaagggcagaaggagtaaccgaggcccacctccccaccccagctcctcctgccaggcttagcgccttaaacaccttagcttctgagctgttctcttctgtgtggaggagtggggcacttggacaaaggggtctttgtggcttagttgcccagccccaacaagcccttaattgggtcgctggtcttgggggggctgttctcgtacccctccctgccctgcccccgtcttaccccttctgtctcccctgtggaagtgggtcatggcagaaggaagaatccattttactccccctcttcatcctccatctggactctgggtcttccctccgaggcccccagaactcaaagctgacttagaagagtacttttaggccagaagacaaaagcaaccgtgtgtctgtccattcttcaccctcagctggagctgatgtagtaactccctttgggtacaaacacaaggcacacaaaagggacaagattcactgtcccttcctgtggatcccagaacccatcctagggtagacacagatatactgagtgttggggcaggaagaggcgggtgacaagccacagttggctgtgaccctgtacctgccgtgttggccccttctgggctttgcaaaaatactatactgcacttgcttcctcagccccctcgctctcagatacaatggcctttacttcaatgcagtttgtgaagggtgactggaaatggagggggtttgctgtcttgggataactgtgtgtctggggtggttgctgtcctgggatggttgctgtcctggggtggctgtgtgtctggggtggctgtgtgtctggagtggttgctgtcctggagtggctgtgtgtctggggtggttgctgtcctggggtggctgctgtcctggagtggctgtgggtctggggtggttgctgtcctggggtggctgtgagtctgaggtggttgctgtcctggggtggctgtgtgtctggggtggttgctgtcctggggtggctgctgtcctggagtggctgtgggtctggggtggctgctgtcctggggtggctgtgagtctagggtggttgctgtcctggggtggctgtgtgtctggggtagttgctgtctcagggtggcctgagtgtctctcttgtcccgtgcagagctccgagccaactgttctcgaatgggttgtcaacaccattgtgtacctacacccagtgggcccacgtgctactgtaacagcagcttccagctgcaggcagatggcaagacgtgcaaaggtgcgtaaacatgactgtgtgggtagggtgtgtgcatgaggaggctggctgcaaggtgggctggagcagggccgggccgggccggggggggggggggcaacaacaggggatggcgtggtccaagaggcagtcaacacatagtgtggctacaagccctcagcattgctttcagcctacccttaatatacatgcctccaaaagttgtagctagcgcgtgaattttgctgtcaacggtgaaacattagcccgacggcatggcttgcacctgtaactaccatatttggaaagctgaggtgtgtggattcctgtgagttccaggccaacctgggctgcagaaggaaccctttctccaaaaagtagatcacgcacgctttacagataaaaacacaaagctccttcgcaaagtttcttcaattccgatgctgttcccctcttcctggagggcagacctcctagtcatgtgtgtgctgccctactgcaagcctcctctcccgcccccccccacccccaccaaaatctaattggaagtattgcttgtgtgtgtgttctctttccgtaagtgatgccacactgtgggtataacttacagtgtttctctttagcgtgttccagggatttccccgccccccatccctggtagtatgtagagatttatctcattcattaaaaaaaaaaccactgtgacgtgaatctatgaccacagcttacttggccatttccctgttgatgagtaagatgttcccaatgcgaacttttctgttttaaatggccccaagtctgcacaaatctaccttcttgatgcagctactctgacctctctaaatcatactcttgtgacctgcctttctctgcctttctctctctgtctctgtctctctgtctctctgtctctctctctgtgtgtctctgtcttgtctgtctctccgtatgtgtgtcttggtctgtctctctctctctctctctctctctctcacgtgtacgagtgttttacctatatatatgtttgtgtaccataagtatacctaatgtccatggagggtgttggatcccctggaactagcattatgggatggttgtgagctaccatgtgggcactgggaatagaacctgggtctttgacaagggcaccggtgttcttaaaccattgagccatacgtctagaggtctcttctgtatttttttaagatttatttatttttgtatatatgagtgttttgcctacatgtatgtgtggtaccacatggagacttggtggctaaagaggtcagaagagggtattgggtctcctgaaactagtattccacatggttgtgagtcaccacgtgggtgccgggaacagaacctaaatcctttgaaagagctgtaagtgttcttaaccactgagccatctctgcagcccctgtgacttttattttaatatttatttatttatttatttatttattatatgtaagtacactgtagctgtcttcagacactctagaagagagcatcagattttgttacagatggttgtgagccaccatgtggttgctaggatttgaactcaggacctttggaagagcagtcggtgctcttaaccgctgacccatctcatcagcccccgtgacttttatttttaatgcagatctagggatcaaacccagggccttgcatgtgtcaggcgagcaccctgctgctgctgtatgtaccacagtctttcatttctgttatcccatctcctctaacttaagctttcccttcatcataacaccaaccttccgtttatcaccagaatgcaagtttcatgaagacagtaatgcagctctgttttcaaattcatcattgtattctctacctgccccatctgttatccaagaaatgttttccaaatcactgtcagtgcgcatgacccagaaaatcccaaaactgtttgccgggcagtgggtttgcaccttctgaactgtaatcgattccgccagttgtctgctggtgtctcggggcacctgtgctacactagaatgaacatctcctcttccttttctctctgggcagattttgacgagtgttccgtgtatggcacctgcagccagctttgcaccaacacagatggctccttcacatgtggctgtgttgaaggctacctgctgcaaccggacaaccgctcctgcaaggccaagaatggtgagtgggtctgccagtgaccacagagccggggacctgcaatgcggctccccagtgaatagtcgcctcaacggttacaagtcccaactgccctttctctgtcccatccccagagccagtagatcggccgccagtgctactgattgccaactctcagaacatcctagctacgtacctgagtggggcccaagtgtctaccatcacacccaccagcacccgacaaaccacggccatggacttcagttatgccaatgagactgtatgctgggtgcacgttggggacagtgctgcccagacacagctcaagtgtgcccggatgcctggcctgaagggctttgtggatgagcataccatcaacatctccctcagcctgcaccgtgagtcactcagagggcagggaagcgggggagacgggcagagtctgagaccaggtctgtgctccttgcacacaggagcagattggtggctattcttccttttcactctgagccggctctttcatttctggttcagggctaagggatgcctcagcggagaagtgtcaactgagaaggccacgaatggtcactctccagagaccagggactgtcccgtctttgaaagcagagtgtcattagatgcagaggggctttcccatacagaagcatctgcaggggggctggggaaggacggacgttgttaagtagcagagggcagaggagcctgagcctggcttgctttgggcttccatgtgattttgttaccctcaggagtatggccagaaaggacgtcctgctgttgggtaggtgccaagtccctgagcctacttcctgtctgtggcagtcaatgagacgaagggacgaaccacgggccactggagcatttaggatgtgctggccattcccatgcaggcttctcttctcttccgaggcaactttgctgtctaagcgtgaggaagggtgtcacaggctggactcacgcatggctgggtgcagatcccctctcgtgctgttacacaaacaaacagtaattgcttcagagtcaacagctggccgagtcacattccccgaaaagccacacagggctgccgggaggggtctggcctgtggttgatctgtccccagccctcagacatagatctctgaccttgagtaaaccagagctccccaccacaacttagttccctaaactgcgtaatgggctgttgttactctgtccagatctgataaagtgcaaactggtggtaaagattgccttgctaatgaggctgagggcaatgaactgtggatcctatagcctttggttcttagtttggtttggtttggtttggtttggtttggtttggtggtgctcgctgacagatgctaagcaggcatcctacggctggctagatccccgctcctgtagtaggtctgtaagctcttcttctaggcctgtgaggctccctcgaagaaagccaaggtcccatgaggttataaaggattcagtttgattgagggtcctttcaggggtgggagagagggcgatggtggaaaacagagcaaatcttcctctctgtggcctcaggatactgctcagacatcaacctctagctctgcagttatcagtgtccaaggttcacctgtgattgggtgtctgtccttctggagcgcacagcagagaactgccagacacctttgggataggtagctcaaggagccctgtgtgctgagactggagacaactaccctgcctgtgtttctagttcaccatcccactcaacaggcgtgcttgggcaaagagggttagcaatggcagccttgcctcggggccagacatgggtataccgggtaggtggctatgatgtgccccctgggaaccttctcaacttctgccctggcctggccattcttccccaaagaagcaggaagtaaccttgggtagcgacacccctcccttggcaaacagatttgccttgcctaccaggcttcaggacttcactgggcctctggggcagagtccaggaactctatctggaagcgaccaaggtgcttggagaaaatcctttcaggaggaatgattgggttccatttgccccagctcccgtccctccctacctcgtccccacccccactcctgacgccagagtgtctggctgtcaccctgaggatggtggtttgctcacatcccacaaactaattatgggccctggcttgaggatgtcggaagtgtctctgtaacaccctcccccacccctggtacatccccttcctcaggaggaggccttccctggggtcagggagctccaggggccccggttacatacctgcacaggggctgctgttctatagttagttctctggagaatgaaggaaaaatccactgccttctgccttccatcctgcagccagatcctcccaaccttccccatgactgggacctctgtgagacccctgggaacatacctaagtcggtagggaagagggtggggagggggtcaggaggttgtcagaaggttggggtgtgtatcttatgactgagaagaggggagccagtgaggacatccgactggtgcggggagatgggggaagcctgcctcagagagacctctgcaaacagaaataaatgtaaagaaggaaggaagctgggaagggggccctgttcacatgggtcctgaagcatggggaccggtctgctcggcatcctgagagccctgtgagctccccagccacccacacaaggcccattacctcctccctcagacagcacagtctgctaattccatagccccatgcgtggccacactggcctagattggtgtgcctgtcttcttctcccacctcagctacagcccagacccaccttctcttctgcctaatgaactgggagacctgaacgggtgaggccagaaaagaaaggggagtgagctgggagagtggctcatggcaggctgtgttccatctccaggactgaaaagggaaaagagactcatggggttgaaggtgaggacagagaagtcactagagcccacatcaaagtacaccaagatccttactcaagaaaaataataaggaaataagtactttctctctttttaagcgtcatcccttctccagagacgtagtgttcatttcagcatgtacaagtttaaaaaaagtgttgctaaaggttattaatttttttatattttattaacttctttactctctgtgtgtttgtgtgtgtgtgtgtattcgtgcacacatgaatcatggtgcgcatgtggaaaccagaagacaacatatgagagcccttcactgcttgggtcctgggggtttaattcagggaatcaggcttagcagtttccccactgagccaactcaccagccctcttaacaggatttgttttgtatttttaaggcaggatcctgtgcggcccaagttgacctctaacttgttacacagccaaggctggccttcaacttctgctccctcctgccttgagtccccagttgtaaagttcagctttgcggttatgttcttacctgatagtctcattagaaatttcctatactatgattgcattattagttttcttggtgcacgttatgtgtgtgtacttgtgtgtagatggcgtgtgtgtacacattcgtgcaaaatccaggagtcaatatcaggtgtcttcctccatacccttctgccttatttttaaattgttattacatatgtatgaatgttttgcctgcatgtatgtatctatgcatgcctagtgcccaaggaggccagaaaagggtagcagatccctcagaagtggagttagatagctgtgaaccaccctctgggtgtagttactgcaaattagcaagtgtctgaatcactgatcccttctttcgcccctgccctcttgccttagtttttgagataaggtctcactaaacctggagcttgccaactgaggtagactggttgaccagcagtaccccagtatcctcctgtttctgcctctctggtactggaattacaagaatgcactactgggttcaccttttaaatatattttagagacaaagttttgctgtatggccttggttggcctggaactcacagagatctgcctgcctctgcttaaaaaggcgtgtgccgccaccgtgtctagcaacgactcgctttttaaagtggatgatgggaatagaacacgggtcctctggcaccgatgccctaacactttgctgactgaaccgcctctccatccctaattagttaatttttttaaaactctatagcccaggctagcctcaagctcacagtagtcctcttccatcagcagccttccaggtgtcaagatcgtaggtgtaagccaccatgaccagcttttcatctgtggtatataaaattgtaaataaatgataccataaactgtgtacacatagacataaatattttgaaagtgattcacacaagactaaagttctgaaactaaatcccaagagggtcaacaggcctgatattcccagagcccagaaatggccctcccatttaaccccttaagtgctccgagcaggacagatggttcagtctgctcaccccacccttcctttcctcagctgaagggctctggcgtgtccccattccttgcctgaggatgtggccattctaaggaggatgaggctttgggaaggtgacactgcaaacagaggcctggaaggaaatgccacttgacgaagttgttttgcgttgtgctgtatgagacgggggagtctggaggggtttacaggtgtcaggggtttccttcttgggacgtcctgcctgggctaggaagacctagaaaaaggactgtctgttgcaggcaccagggttgcaaaacaagtctccatccaagcccagttgaccaactttgcttctcttccctcctctccacctttttgggaggtggagtgagtagatgtgttttaaaaatctcaacaggaaatagggtggtgctttttctagagggcaggcaaatagaagaccctctgtgtctgcgatcaactgaaaggggtgtgggggtgtgtgtgtcctttcccctttctctgcctcatgctgtgtatagaacacttcagaagccgagcttcgtggctcatccctgcagccccaacatgggaggcagaggtagcaagactgttagtccactccaggccagcctgagttacacggcggtactctatccgaacaagaaaactacacaaaacacccaaacggaactgttccagagttcacacacgaaaggcacctccctcctttcgcctttctgactcccacggggtgtcctgatactgtggaggactggccgttctatccgctggcccaggacccctgcaccctagctctttggcttctcatcccctttcggtttcctagtcactaacaccactttcttgcttctcccctcctggcccgcaccagctctgtgtctccgggcccagatccagccttgtcctctcctcccccgctgtctccttgaagttgcctcccaagccagcctaccccagctctgtcctccctgttttcaatccagaggaagtaacttaagcaagacagacatttcagagcccagtgagaatttctcaatcatgcagagaccgtaagtcaggcagagcagaaaccaggatttcatccatgggaattctggctgggtgtataagcaggggcaggaagggtagtcagggaagaagttatgataacttctggacttgctggtagaatgagcaagagctgaagtcaggatttggtagcaaacaggaacacgaggccgtgttatttagtcaaacctgccaggctcgcctcactagccagatccctcagtgggactgcaaactgtcctctgccaatgtcctcggcattccaaggccagggaagagaagggggaaggatgccctggctccaggacaacagagggaggattcggtattcagtaaatatttgttaagccaatcaatacgtgtgcgtagtgtgcgtctggcaccggggaggaaatgtaaagataatgcctgacctgcggcatctgcagtcaggtggaattcataacgccaggagctcctggggtcactggagcctgtaacacggagaggcccctttcagtcggtcaagttccagcacagagagctcctttgtgcaggcaaagctcctttccatagggggaagttcctccatgtagggggaactccttccattgagggaagctccgttctgtggggagagtctctcaacagagtcagtgtgaaataagaacaccagtttcagtgcccacgcccaccccgttggccaccgtaactcgggaggtcacaggtcgaaagggaaggtaggaaagactggggttcgggaagaggtgacacgtatggagtggtcatgggctacatgccccaaatgtaccatcccatttactgatggtttaccagtgctcagaacccagctggacccagggcagagcacagcattggaagtagcatggaagaaataaggaccagaaccaagtgtgttccctggggatgtagctaatgtagaaatggagttctttcgtcttcaagggacgtggtgcgtgttctacaatctttgggtgtgttgatgtatctagagacttgccggtcgtcatggcgcacgcctttaatcccagtgctgggcagatttctgagttcaaggggccagcctggtctacacagcgagttccaggacagccagggctacacagagaaaccctgtctcaaaaacaaaacaaaacaaaacaaaaaacaacaacaaaacaaaacaaaacaaaacaaaaaaagatatagagactcccttcctgcacccagatctcctgagtttacagaaagtgaccggaaccatgtaactgaacctaggatcttgggagtctgcttgtgtttctgggaaagcagcccactacttaagaaatttctcttgagcaatgtggatgatggagaaggtgagaaggaccggagatggatgtgtgcgcagcatgatgagactggggctgcaagcagagctcagcacttgtaaacactcgccaggtctattctagggcctggaactgaaagtcctttttgaggacgccatcgggctgtggtcttaaccttttgactcatttatccttctcagacccctcccccgctctgctagaggccccgccactctaccaccagaccaccaccacattcctcctccttgggcttatcagagctgctcctgttttagggcttagaacctttgaccagagctcctctggagggcaagtcagccctgggagtgcgggggcacggagggaacctctacccttcaggggttttgctgtattgttttatttaggtttagtttggttgggcggatgtattttgtttgttgtttgtttgatttagatatgtttgttcattttaaaatcatgtgcctatacacgcacctgtgtgagtttatgtgcatcgtgtgtgtgcagatgccatggagctggaggtacatgcaattgtgagccacctgatgtaggtgccaagagctacacccaggtcccctggaagagcagcaggtgttcttaactactgagccatctctccagcctcgagacaaaaattcaagtcaccccagctggccttgaaactcactgtgtgtagtcaaggttggccttaaactcctgaccctcttcccccacctcttaagtgctggcgttacatataaatcttgtcatcaggcccagctttccagtcatgccagttatgcccatagccagtctaggtttgtggagcaggaatatgcagttcctgtaggcaaaagcccagggctccccctgaaccccaggctataagaccaaggcccgtatctcagagactgataggcaatggtgaacgatatcccttctcagtatgcccaagtctctcaacacagctttatagagtagtggcctgtggttggggatggggtgtggggaggaacagaggaagctgaactttaggagagaggaaaataatgtggtggagtgggcttggataacaaaggagttttgcttgagactaataatctccagctgcaaaaataccaaaggggaggccaggctggctagggacgtcatttcttgccaattccttacagtcaggtctgctgaatgggaccctgcctggtctttggggaggtgaggggagcccagccaagggcagacacatgagaacagggactgtcactgccctgctttcccagaagtgggagggaacgcaagccaggagagaggctcccactcaggttccccccatcttgaggcttggcctgagaatggagcagcatctggaagcagggcaccagctctctgcaggcttcttcctctttccctcttgccaagggtggatgggtgagcagggccagggtgttgccagtcctagggctgggcagtgactcagggaagcctgaggaagttggagagaaagccatttgtgccagctggtgctaaggaaaacagatttgacggatgatttttgcacacatgccagtggccccccagacccccgcagcgcccaccaagtaaagggcacagagccctgttgatttcggctgccctgctagctgcccggggccacaggaaggtccctactttgggacttcagtttcctttggaggtggcccagtgggtttcattttaatctggtttctctatggtgactcgtgtgtgtgtgtgtgtgtgtgtgtgtgtgtgtgtgtgtgtgtgtgtgagagagagagagagagagagagagcacttgcattgagctttctgcctctatgacccttgtcctcttcatgcttccctgcctgccccccaaaatggaacagtcttgggaacccagaggacagagtagctgggtttgggaatgtgtcagcacttgtaggggtaatacctcatccctatgacctctttctccagttgtctcagggtggggtttaccagaggggacctgaagaggaagccatttatgtgagccttcagtgactacttcccccgctcgctcctctgtcctcagtcctgtgactctgagtcagtcgtcccagccagccaacttccctggatgacatgttcctattccctgcaccccctcccactattaagaaacagctcctggatccctgtggggaggaaggggggttagggaggggttgagcagagttcatcattatacctgtagctgtgtggcagagtcatccctacagggctgagtcctgatagtgtgggccgagcttcagccagaggcaggcagtaaaaagacggctggctacctgctgttgaaacagtgcagataaaagtctctgccttaggaacgttcaggtctgcaagtggcatttcttctgagagtgtatttgaaaggggccagcggggggtgcatggaagcctgggctgtgttgggaaggctgccaacagttgtccttatccccagacttccaacagtccttggcttaccctcctcctgtggcccttcatggcttagaatgactgtggtagctgccatgtaccatcagaagttcctctttctctgtctcctggtttatctccagggtcctattttcgcctcctcttggactctctgtacttcagttctcattccttctgtgcttcctcggggtgtgagggaattaagtactaacatggaagaaacggggacgtgaaggcaagaagaaggagtttggctcatgtgactgattccccagcctcggggccaccagtcttgggtcatgctgtatgaacttcatattttgaaatacttttctcccaagctgagttcatttatgaacattctacttcccagtaattttttttctttaaatttatgcaacatgcacagcttccagccggtacttcttgttagtatgaaataattagacttaccatgtagagcgaatataaatcaggcccaaaccaaagataatgtgccgttttggttagttaggacacccttttctcaagagaaagcaggttaaagagaaaatatcagggtgagttggtaggcctgacctcctgcctcttggcactacaagatagcactttcctgatgaaaactggattagaatcggaagatcctgtcagtcagtcagtcagtcagtcagtcagtcagccagccaatatttacctagtccctcctgcttatgacaatcctgagcctaggatgggggctggggcagggggttgagtctatttggagacttctatttggagagaccagatacttggaaacataaagaatgtcaaagtgtgactgtatccgctgcgaacacccacaagagctccggggaaggtggctgcagctggctgtggctgaggagggttaggtcgcagagaaggcaagctcaccagaggaacggatgcctgtgggtgggcctgtcccacatagctctctccttccttttccagacgtggagcagatggcaatcgactggctgacgggaaacttctactttgtcgacgacattgacgacaggatctttgtctgtaaccgaaacggggacacctgtgtcactctgctggacctggaactctacaaccccaaaggcatcgccttggaccccgccatggggtaagagtgtcgggctggcattctcactctcgaaagaggaggcagaagctgtagtgggaagtgtgtgggggatcccggtccctgcgccccatttatcatgtgtgcacccacaggaaggtgttcttcactgactacgggcagatcccaaaggtggagcgctgtgacatggatggacagaaccgcaccaagctggtggatagcaagatcgtgtttccacacggcatcaccctggacctggtcagccgcctcgtctactgggcggacgcctacctagactacatcgaggtggtagactacgaagggaagggtcggcagaccatcatccaaggcatcctggtgagggggctgctttgtctgaggttattctgaggagaccaaccaccagagcctcctgctgacggggagtcctttgggggacttgatctctagggctcccagtgagtgtggaaagagcagagttaaccagcccatgtcttctggaggggccagcaggaatgtgtcagagaggaaggctatggcttcccattctgatgggagcagtcatttaaagacaccccttttacttccctttttcttatttgaggcttaaaataacccctgggagatgagcaggcagttgacaaaagcggggttcaaagatgtttggtaatttgccagaggttacacaactgggaacaacgctcgaacccagccaggaggtcctgctgctcagtgcagaccgtccactccggagtagcttgcgtgtgcagccatgcccggggctttgagtggaactcttccagtcctaaccttgaaaaatctcacagcagactccttatcttgggcaaatggaaacagctggcccctgtaggcttccttgggacacgagagaaccctcagtccccaaaaaagctgcagtcaagttgagcattctctggggagggaggttagggcccgagtttaactcatctgcaaattctcaaagggtctgcaaggagcttaattctgcgagggacattgttttttcttgtcctcggtggtaggatggtccagtgatcagcacatctggtgtgttagatagcagtgtcaccacagaggcagagtatagaaaggaatagcatctctttgaaaactccagttctttactttgtgaaggacgaataggagatggacaaacagaaatttccagaacacacgagtttagcatcaggttaaacaaaactagcggggaaagttcggacgtaggtgatgggagtctgggtggcaggcggaggccgatgggggatgaagggagcagccttttcatcttgttgaccgacgctgcctgccgtctcagatcgagcacctgtacggcctgaccgtgtttgagaactatctctacgccaccaactcggacaatgccaacacgcagcagaagacgagcgtgatccgagtgaaccggttcaacagtactgagtaccaggtcgtcacccgtgtggacaagggtggtgccctgcatatctaccaccagcgacgccagccccgaggtaagcggtcaacagggcacctccacagtcggcttcaccccaacagcactgtctgctcttctgcatatctctttcaaattgagagtgtttctaggcaccttccccaagctacttctcctcgcctctccacgaccggaatcccttatgcctgggttgtggcaaggcggtgaatactagttctgggcttcaaagtcctaaaatgggacaagagcaaagagcaccccccatctgacccgagcagagccccctgaagggtgctgacagctctctcctctgcccccagtgcggagtcacgcctgtgagaatgaccagtacgggaagccaggtggctgctccgacatctgcctcctggccaacagtcacaaggcaaggacctgcaggtgcaggtctggcttcagcctgggaagtgatgggaagtcttgtaagagtgagtatcagggagagttgggcctgctgggggtaggggtgggtccacagacattcccctgtaacccgctgcctctgcctagatgcagagaaacgaagggcagagacataaggggcccacacccaagagcagcgatatatctagcacacgatcactcattctgcgagtgttcagcaaacacacactgggtgtttgacaccgttcgggcagtgaagggtgtggggggacagaggagttgtcaggacagtcggaggatgtgatatctaagccaagctctctgctgatgaagtgaggcggccaaccgtgtgactgctgagagatcatttatggaggagtgaacttacggttcaaaggccctgaggccagtgtagggtgtggtctgccgagacgctgggtaaggtgtcgtggtgtgagtaaagggaaatgaagggaatttctcactgggatgaggagcttatgaccactgtggaaagaagatgagtgattgggtgcgtcctgtgtacgcttatactgtgctgggcaggagggaagaagccaggtggctatttccatggtgtgggtcagagtgacatggtttaggttaagatggtgacagactggtagaatgaccagataccaacgtgctctgaaagcactccgatttccatgaaaagttgctcgagtcaaatccccatgacacagcggctctaggactagagtggagcatgttatcttgtgtcttctgggagtgactcatagccctgtctgctccagatctcctgacccagcccagccaacgcactatagcacctcagacccagatttcaatttgggtggtgaccatgtgtgcgtgtgaatgtgcgcatacatgtgtgtgcattgtgtgtatgcgtgtgtgtctgtatccatgtgtgtgtgtgtgagtgcatgtgtgtctgtgtgtatatgcatgtgtatctgtgtgtgtgtgtgtgtgtgtaagcgagtgcgtgtgtatctctgtgtgtatgtgagagcaagtgcatgtgtgtctgtgtgtctgcatgtgtgtgtgtgcgcgcgcacgtgtgcgagttcatgtgtgtatgtgtgtgtgcatgtgtgtatgtgagcaagtgcatgtgtgtctgtgtgtatatgcatgtatgtctgtgtgtgtatgcatatgtgtgtgtgtgtgcgcgagttcatgtgtgtctgtgtaactttgtgccctttgtacttgccctagaacctgaacatgagctgttcctcgtgtatggcaagggccgaccaggcatcattagaggcatggacatgggggccaaggtcccagatgagcacatgatccccatcgagaaccttatgaatccacgcgctctggacttccacgccgagaccggcttcatctactttgctgacaccaccagctacctcattggccgccagaaaattgatggcacggagagagagactatcctgaaggatggtgagggcgtcagaggtgggcggtgtgtgggaagagctcctgggggatgaggcgcctgagacaggaagacatcagaggcttagattgctccctcacagtatgaagagtccttgctgacaagctggctgggctggttggcatggagatgaggggatagacaggttgacccctgtgtgacccccttcttggctgagccaaaaagagtcggaggatggatggatgtgttaggcagtgagggctgccttggccagcccttgggaaaattcagggtctcgccgccattggctcagagccctggagctgtgtacagcatacagccaggagaggccataggccctgaatcacagccgggcctgccatgtcagacagggctcatccacaagtgtaaatgctcagaatgtatgcagctggatctcatggccacggatatctctacctctctgtggcctgagaactctgtgtctgtctctccctctgacctactttggcagggccactgtgcagtggagccgttccccttgagggcttctgagctgtgtgtgtttttgggggccccaagatctggttccttaaccagtcaatctggcttgctccccaccctctgtgcagctcagagaacctcagcagtcagcaatcataagactgtgtggaaatcaagaatgactcctgtcaggaagacactggggacccctgtacagggggaactgctatttaagggacactagataaagcctttggctaagggaaaattcacttcctaatttactcatttttgtgagtacaggttttttaggcccaggatggtggcgtcatactggagcaaagagccagtgcatatcgccccggctgtccacctaagcacaggcccagacatgccctcatctgagagctccccttagtcacgtagtttcctggctgcctcatgctgtttttcaaaatgtagatgtggcatcgtagatgcagtgtagatgtggcatctgaaagggtcgtctccatccccacccccacctctgccccaccctccctcccccatctgcccaccattcagggcaccacatgcctcctgctccccctgcctggccaccatctctctctgtgtcatgtgtccttcaagggtcacccccatgcgctctctacaccctcacaggcatccacaatgtggagggcgtagccgtggactggatgggagacaatctttactggactgatgatggccccaagaagaccattagtgtggccaggctggagaaagccgctcagacccggaagactctaattgagggcaagatgacacaccccagggccattgtagtggatccactcaatgggtgagtctgtcccggggcgtggggtggatgcatgtacatctcagaggactggggagggaagcggcaaagccaggggcgtggctgaggcaggcaggctgcagaggcaggaacgggagcctgaaaaaggagcctgaaaagagatcgtgtgtttgtccgtctgtcttgaggagggaaaacaaaaccctggtacgcaaccggaagtctgcttctgccgctccactacagagctctctcctggttccccttggctccaagccgccctagcctttgggtctgcacagttcttgcttgccaacatctgcacctgccttccttccctcacccaccacttcctgtcccatcctttgctgtctggaactcccggatacctcacatttggtttcttgtcagcgttgggtctcagagaagccccccaccccatccctgttcacccaaacttgctgcctagattctctccgccactcacatttaattttcctcctgattttatcactccgacacgactttcttgaacaacttgtttctcctgggatgttcgctcctaagagatggggaaccttggttttgctgcatcctgggatgccagagccatgctccaattagagtagccattcatggtggcctgagttgctgtgatgtggggtttagagagaaatagctcagagagacccctgggaggaactctggataccacctagataccacctagtgcctagaatcacaacagaagctgttgtgacaagggtgaccatgtggtgctgaccagtcactgcccacaggtggatgtactggacagactgggaggaggaccccaaggacagtcggcgagggcggctcgagagggcttggatggacggctcacaccgagatatctttgtcacctccaagacagtgctttggcccaatgggctaagcctggatatcccagccggacgcctctactgggtggatgccttctatgaccgaattgagaccatactgctcaatggcacagaccggaaggtgggcaggcatgtgtgcattgtttaaccctgtttctatggaaactccatgaggatgtacatgtctgtgtgtgtagggcttcgtgcttcttacaggtctacacatggctactctatgaatgtatgttttcatgttgtgtatattgtcttctttgaggatgtctatctgcatatggctgcccacaagcacacctgtgtgtgcacttctgtgcgtgtgcacatacatacatataacacacttcagggtagtcacgcagcaacatgtaaggtgctaaggggtagcatatatgcatatttgttcactccgttggttcatgagttgtgtttgcctttaggtatatgggccaaactgtcttggtgtgtcaggcccttcacaataaagctctgggcacctctaccatcttgtgtctcctactccccacaactcaacactctatgaacaagctgcactagacagcttgttattccagaacatcataggcctctgctccctaagccttggcttcctgggagtccccctagttcttcttggctctctttctcttgaagattgtgtccaggtccctcttcccacagattacctacatatgccctccataggacaatggtgctcttagtacccatcacagctcagcccataataaatcccagtaaatgttgcttaggtagagaaataaatggctgaatgttggtgtatgtgtgtgcgcaagtgcacatgtgtgttcatacatgtgtgtgtgtgtgtgtgtgtgtgtgagagagagagagagagagagagagagagagagagaaacacataaatgacatattgaacagccttatgagaggtccgtatggacagtgtcctttctgagtcacctgatggagccagcaccaccagggcccctagttgtcccttgggaatctctatttgccctcctctcctcagaaacatcacctccattcctagattgtatatgagggtcctgaactgaatcatgccttcggcctgtgtcaccatggcaactacctcttttggaccgagtaccggagcggcagcgtctaccgcttggaacggggcgtggcaggcgcaccgcccactgtgacccttctgcgcagcgagagaccgcctatctttgagatccgaatgtacgacgcgcagcagcagcaaggtgctcctttatgggctggggatggcgggtgggtagggtgggacccctggctttaatgtcaaagacttcccagaagcctctgttccccattcacttccattccctctctttcaacgcaaccttcctttcccgacttcctctttggtctcctcactttgtgtatttttcctttcctgaccctgcctccccatccttttcctgccctctcctgcagtgggtaccaacaaatgccgggtaaataacggaggctgcagcagcctgtgcctcgccacccccgggagccgccagtgtgcctgtgccgaggaccaggtgttggacacagatggtgtcacctgcttgggtatgaggggcctggcttgcacaagggtgggaaggtagctccagcagaagaatggcagagggcaggggagttctctgtgtttccagtagagattaaggaagcaaagagggggccctgagatgctgacaggaagcaagggatagggttcagagaaggctctggggctaaaggaggattgggggtggggtagttctgagggcacgaagatggggcaagtgaatgaggaacgagacagcgagtaagaaaggaactattcttaactcattttagctttggctatcattacagtaaaataacagtatttcagaacactataggctggaactactccttaacagcagcactcaggaggcagaggcaggtggatgtcagtgaacgtaaggccagaatggtctgcctggagaattccaggtcaacccgagctgcagaataagaccctgtcaaaaaaaaaaaaaaaaaaaaatcaaaagtaaaactggaaaaattctgtaaattagccgggtaaggtatacatgcctagagtccctgcactgtggaggctgaagcagggggattataagttccagtccagcatggatattctagctcaaaaccaaaaatttaaaaaggaaataaggagaaataaaaaccctgatccaaccagtgaacatgaatatgatgtggtaagtcacacgaggtactttcttccctaggtgggtagttctgttttatacacagccctcatccagtgtgtacatgaatctcctgcctctttcggctcttacccgccacagtattctctgttttatccttactatttatttattgtactgaggatcaacccagtgcctcatatacactagataatcactccaccaacgtgctacaccttcagttccttacattcatgattttattgattagtttttactttttggtgggtattttgcctgcgggtatgtctgtgttccatgtgtatgcagtgcccatagtgggtgggcaaaagggggtgccagattccatggaactaaagttacagagggtggtgagccaccatgtgggttctggggatggaatctgggtcctctggaaatgcagccagtgtgcctaactgcctctccatctctccaggccctaagatcatgatttaaatagccttgatctcctaaacataagaagggttctagggatgctggccttcaggtaaggccttaggtcaaattcccagcaccatacacacaattaaggttaaaataaaagtaggtactcgccgggcgtggtggcacacgcctttaatcccagcactcgggaggcagaggcaggcggatttctgagttcgagggcagcctggtctacagagtgagttccaggacagccagggctacacagaaaaaccctgtcttgaaaaatcaaaaaaaaaaaaaaaagtaggtactcattgtaacaatgtaacaattcattgtaacaatgaataaatgtgctgtgcagaaaaacatcctaccaggccctgatgccattttaggggggactcctccccaatatgtctgtgtgcatttatgtctacataaaagggcattgctgcatgcatgttcttctggcccctgcttccgttgctaagcagcgattttagtggccaaactgtaccgtttagtaaatgttccattgttgactcagctatttctctgctgatgtgtgttggtttttgggtttttttttttataaccacagccaacattcactaagcatacattatgtgtggttttaagaatttcccatgtagtagcttacttgtcctctaacacgtctctgtggggacagcatttttttatttacaagggttgaaactgaggtccaagttaacacaggcatcccgatatgaaagtctgaccccatttatttattaacccttttgtattgatcacatacttacactttctcatagctggaataaacttttttatcacagttctgggagtgaactgtatcagtagctggatgtggtggcctacacctttaatctcagcattcaataggaagaggtgcgtggatctttgtgagttccaggccaacctggtctacacagagagttccaagccagtcagggctatataatgaaatctgctctcaaaacagaaatacaaaagggagaaaaaagaaaaaaaaaaaaaaaaaggctcagtagagatcaatgtcctgttgagaacaagacagagggctgggagaagcagagggtgtgaaaggccagggcactggaactgtctttgtgaacactgacatcattaagaatagaggcaaggggctggagagatggctcggtagataagagcactgactgctctcccagtgatcctgagttcaattcccagcaaccacatggtggctcataaccatccttaatgggatctgatgccctcttctggtgtgtctgaagacagctatgtatattcatatacataaaaataaacagctgggtgtggcggcacacgcctttaattccagcacttgggaggcagaggcaggtgaatttctgagttcaaggccagcctggtctacaaagtgagttccaggacagccagggctatacagagaaaccctgtctcaaaatacaaaaaaaaaaaaaaaaattaacaaacaaacagagccaggactggttgtagagaaggtggcagtggaccaggagcagagcatccttagtcttgatgaagcagcctgagcaggtcagcactggtttctagaaaggaagggaaaaacagctaagaagcggctgtgcggaacaaggagcacacataccaccttcaaggccctgtggtccacggagtagaggagagagcgttggtgacccatgggaccctgcagaggttttagaaactgggtgagaaaagcgaatgcaaagctcaggtgactacaccaaaggtctgcttagatgctaaggcagacagtgatggagaggtaccactgcagctgggggtgggaagagtggagcatgcagagatctggggatctgtgtttacttaccaggtggagtcaatggctttgtgaaagaccaagtccaggacaggatcttgggggctcctgagatgacacctaggggccgttcagagtcagcagtggaccaagcacatctctgtgacctgtagaactattttactctcagaccacagggagatacagacattgccagggcagggtgtagtcccccttaccgtattgaaccgaataatctgctcacggagaaaacagtaaatcagaagagaagtacaggggttttagcgcctgtcccgtggcctgggtctgaccttacccctcacactcctgtggtgcccacagcgaacccatcctacgtgcccccaccccagtgccagccgggcgagtttgcctgtgccaacaaccgctgcatccaggagcgctggaagtgtgacggagacaacgactgtctggacaacagcgatgaggccccagcactgtgccgtgagtcactgttcccatcctgggtggccgggcagtgggaccctggatgtgtgccactgcccagtagtgggacactggatgtgcgcctgcacagggcagtgggactctgcatatgtgtccgtgagaacagagagtcggttctcactgacccctgacctctcccccaaaccccagatcaacacacctgtccctcggaccgattcaagtgtgagaacaaccggtgtatccccaaccgctggctctgtgatggggataatgattgtggcaacagcgaggacgaatccaatgccacgtgctcaggtgtggactcgggcacggtagtccaggagccaggcctgggaagacagaagagcccatgaacccagagcaaagggaaagggaccctgggcaggagatgggggtcttccattccctgccaggatggacagacccaacaggactgggtgtacaggggaacagattaactttagatggagatgaggaaaaaccacggatggagccttttcccaaaaaccccaaagatcccttgggatatggggtcaggcggcaccagtgtgattcgggacactagagaataacatctcaaacagaatggggggtgggggggtggtgcagaggacgatgggagaggagaggggctagatgatgaacttctgcacctgcccctcccccctagcccgcacctgtccacccaaccagttctcctgtgccagtggccgatgcattcctatctcatggacctgtgatctggatgatgactgtggggaccggtccgatgagtcagcctcatgcggtgaggggcacggcaggcaagaaagtctggccagctggcagaggggaggggcagatcacgggttggggctggaggtgtgtacctggtaggcttgagtaagttgtcactgtggccttgataagttctgtctgcagcaggggataatagcaccaccatcacattgggggggggggcgctcggggtttgtgatgatgcctagcaggggtaaatgagctatttccagcgagcccctctgccccatctgactctgctagaggctcctgcttgtggaagtgtccccttcaccacctgcttctcaatgtgagaacgtgtgactttgagggccccactcgactgtcctttctctttctctctgacagcctaccccacctgcttccccctgactcaatttacctgcaacaatggcagatgtattaacatcaactggcggtgtgacaacggtaagagctaagagcgtacctccctcctcttactgtaattcctaggaaagccagaagccaggcaggcctcagagaaggcaggcaagatcttagactcgagccggggttctctgtggtacactgaaaccctgagagatttactagctaggagaaacaggaaggagacagaaataccatggggcaccaaggtggacagaaggtccctgcggttgtatcacccctgccttagcagagcagagctgcccaccctctggcaggaaagttaagtgagggcagagcgacaaagcccagggcctagcctcttctccctatgccctctgcctcttggggtctttactgcatgccccaggctctgggtctcaggcttggaagcacacctggaggtcagccacggaccaggtgatgtcagccctgagccacagggaccacggtgtgtgtaagcacacatgcaagtggtggttgtgtgtgccgtttcggactctgtcctgtctggtgtgctgctgtgttgtgttgcgatgtgctgccccagggtctccagccctgcttcacatgtgaggatgggttgggtctgtaccatgtctccctcctccgtgccgtgtctcgagtgccaatggttgccctggcggtttctgtgtttcagagaaggattgtggggacggctctgacgaaaagacctgtcctgagcctgccggtcagtgcatagaggcacatgcaccatcaccccagagccccagatggcctcagccttcccagcaccctaggttccctggcccagagctgccagacacacacagacaaaagaggcagaggcaggagagaacttggagggtgttcagaggagagaggtgacagaggtggccccgaggaggctgagacctgggggaagaaagtcaaagccagttaaaagtgggcaggaacacactacactcagagagcactttgagagtgctctgtctttgagagtcctgtcagtatgtgcagagggaagttaccctagggcttaggagccaggatgtccacccagatacctacttcagaagaatagtcctctagcctctgggagcctgcaccctgcaccagtgtcttgcaatgcccaagctcagtgtgtggctgggtaaagatctttccagccagcagtctcgcctacaccccacacccctcatctttcaaaccatcaggaacctctccctagccccccaaagtaggcaatcctgtccccatatcctgctgcaaaggatgtccccacccccaactctctgagactcagggaagggcctcttggagcccacccactgcctcccccaccctgtgggccatggtgcatgctgcagtctatgcagtttctgtttgtcttttctgtctgttattttctcagtggggggtggggcgggctgctggtgggagtgagggggctaagcaggccaagctggggttacagaaaggctgttctgctgaacccatccttggctctccccctcttccctcgcccagacaatgactgtggggacaacagcgacgaagccggctgcagtcactcctgctccagtacccagttcaagtgcaacagtggcagatgcatccccgagcactggacgtgtgatggggacaatgattgtggggactacagcgacgagacacacgccaactgtaccaaccagggtgagcactctggactagcatccagcctgtccagccacccaccccactgttgtcgccatccaagaaccccgagatggctttgttaccaccctgagatctctgatgcttgccccttgtccttgaggaggctccagtcccccaggagaggaaggttgctggcgaatcattggcacgcactgttacgattgaaggcctggctgttgggtggccttagatttcagcttcagctctgcagcttgttatctgagtggcctcggacaagttacctcatctctgtgggcctcttgagttttctcagcaattagcactgacatggtggtggttatcaggacacaggatgtttctgggagctgtggattgacagggagtcaggcatggcggctcacaccaataatcccaccaccgagaggctgaggcaggaggatcgatcactgacagatagtaggtcagcctggcctagggtagaaggccctgtctcagaaagaaagaagaaagagtaccacggacagtacccagtgcccatggggcctcttgggagaggctgagtttcccagagggcacaggtcctctctgagggcgctggtgtcttagctctgcctcgtcactgccgagaaaaaagaggaccagtataagttgggtctggctttaagaaaagacagaaatgcctttttttttccccctgtgaaatgtactgtattctgacactggcatatcagtttgctaacgtttctgtagcatagtgccacaagcgagggacgtagatgacagaaccgtgctccacacagcatgtgaggtagaaaagcaaactgtcctgaattcaaggctggctcctccccagcctgtgaaggaaaacacatccttgtgtcttctgagacctctggtcttcctttgttctggacacactaccctgcccctgccttcatcttcatgtggcttcttccctaaatgtgtctgtccctgggtccacttttttctttttctttttcttttttttaagatttatttatttgttttatgtatatgagaacactgtagctgtacagatggttgtgagccttcatgtggttgttgggaattgaatttttagaacctctgctcactccagtcaactccactcgctcagttcctgcttgctccggcccaaagatttatttattatttttcataagtacactgtagctctcttcagatgcaccagaagagggcatcacatctcatttctggcggttgtgagccaccatatggttgctgggatttgaactcaggatcttcagcagagcagtcagtgtcttacctgttgagccatctcgccagccccctacattttttataggaacattaatactattaattagtgattttaatgtacagagacatatttgccaaacaaggtggcatgcggagttgagcatctttttaggaatcgcacttcagttcatgacaactgatagtttacttatgggtcaaaatatttctgcaagccgtacatggcccatgagcctccagctaggagtccccgcgtcagaattagcatcgtcctgagtgccatgggccactctacgcattcagctgagaggcagtgacaagagggtcacaggaagctcagtcttcaggaccatctctgaaaaggactagggggtttaagaaaggattccttcctagatgggtgaagcaatgcaggccttgcccaacaagccaagtagatctggcttcctctgcatctgggcttcctctgcatctgagtattaggtggagatgggaggggtgggacctggcttgtggacagtgattggcagtgatagttaacctgtggttctgagctggcatgacccagtaccttgaggaggaagtgggcttgcaggtgatttcagtacctgtataggaaagtgtaaggcttcctatgggggtagtgggaggctggttagatggcagatgcctcgtgcagggacaaggaaatggggctactccgaaagcagctgcttccaatagcataatgacagttgggcagaggcttgacctgggaggcactttggaagatgggtggtacatttggaaaacaaccccagaaggaaattaccttacgctgaacttcaggcccccccccccagggaaggaagtcaggttataggcagctgctgagagttgagacatggacacaccctgccaccccagttacccgatcatcaatgctcacactggggggggtggcatttccactatgccactggcctacaggattaggtgagatacaggaagatcccaatgggtcagtgatcttgtgccccgacactgccctcaggcttcacaagctctctgcacacgtgaaaaaggtgctgagacctctgggcccttcacccatctctgatccatgttctgccttctgccccttccctcccaactttgcctctgctgtcccatctggaatcttcccacaggatgctcctctgttggctgtgcagctgcacgtatcttagtggctcactcttcaattcatattcccgctgaggaggtttctgctcaggggcctgctgaggccgtcttgcctgacgtgtcatttcatcaggctggcactgttaaactcctgccattgcctgcaatcatagcctaggtccacccccctccactagactctaagctatgttgaagaaaggatttggtctttgaggcacgtgggagggacggtgtatacagagagtgtgcagggagtgagggaaacacagttaggttgatgtatttgagttctgccctgacagatggaatatgtagctagttactctcataagcttagaggaggggcgttagataagagggtcacccgggtccttgaagatacaacatctgagtctctcgatgagttagagctttctggctatcggcaggctcatgggacacccagggcatccttacttggctcagcatctaggctaagcagaggtagtggcagagatctgtccagggtgcctctccctcctgatgcacaccccaccccccgcccttgtcctccagctacaagacctcctggtggctgccactcggatgagttccagtgccgcctagatggcctgtgcatccccctgaggtggcgctgcgacggggacaccgactgcatggattccagcgatgagaagagctgtgagggcgtgacccatgtttgtgacccgaatgtcaagtttggctgcaaggactccggtgagagggggcagagcagggcggggagcttcatgagtaggaggaggccatcttgaggatgtaacagtggcttggtgttatgtagaggaaagggcaagaaagagccagagtctgtatgaaagaccccgggaacccaaaccctggccagaatcgagcaccggcaccttctgcaggttctgcaccttcttcgttagctgtgtgggtttgacagaaaaggtttcaaggtttacagtgggctcctaagcacttcagtgaagacattcttagctgggtctgggcagggcacagtgagttccactctccaggcctggttcctcattctgtccccatcctggtccctcagcccggtgcatcagcaaggcgtgggtgtgtgatggcgacagcgactgtgaagataactccgacgaggagaactgtgaggccctggcctgcaggccaccctcccatccctgcgccaacaacacctctgtctgcctgcctcctgacaagctgtgcgacggcaaggatgactgtggagacggctcggatgagggcgagctctgtggtgaggcgcccatgcagggcctggggttgcccagcagtggggagaggggaggtcttgtccagggtaggactataggaaatgatctggggcagaggaggcactgacctaggacttgccttggccctgcctgaggtgacaactcctgtaacaattactttacaaagtggcccaggtagacagccactgtctgccaccaactgaggaagaagaagcacagagcccttaaataaactaatccagggccatcccactctgaaggcagggcagggagggagccgttaagactcctgacctgggtcagacaccctcagtcagaccactgaaaagggaggccaggctgggggtgaggcacagggttgaggcatgatttgagctgacttctggaggagggaatttaactgggttcccggaaatgggcaacgtgtgcagaatgagtgaggagggtcgaggagatctgagcaaaccacaccgtcccagaacaaacaagtcatctgacttctgggaaagaggagtgaagggtacagccatctgaggctggcccagaaattgccaccgtggggcgtgttgggaaggtcagggcattcccctctgcaccctgccctgtgtcacacgtgaatcgggagggatcaaagaaagggccttgacctgagtatcctcccaaagaggaggcaaaatgcccaggtcccagccatcgacgtgagggcatcgagagcacacaggggtaaggaaaaaggatgatggtcctgggtgtcaggttctagtgtcccaatcctgatcctaagagagactgggaaggagacagaggctcagcagggctgagctgtggttagggctccggggctcagaacaggataaaaaaaaatgtgaagacctggcagggccatgtcctgcttcctcccagatcttgaccctatctctttcctgtcccccagaccagtgttctctgaataatggtggctgtagtcacaactgctcggtggcccctggtgaaggcatcgtgtgctcttgccctctgggcatggagctgggctctgacaaccacacctgccagatccagagctactgtgccaagcacctcaaatgcagccagaagtgtgaccagaacaagttcagtgtgaagtgctcctgctacgagggctgggtcttggagcctgacggggaaagctgccgcagtctgggtaagacgcagtggggtcaaggtgagccagccaagcaggcctggtcacgcgcctgagctacagtgggctgaaggccagggctagcagggacgctgtatgtatatcccaggacagggtggcacagtgagtggctctaagcccttcgctgacctgaacacttgcctccctccagatcccttcaaaccgttcatcatcttctccaaccgccacgagatcaggcgcattgaccttcacaagggggactacagcgtcctagtgcctggcctgcgcaacactattgccctggacttccacctcagccagagtgccctctactggaccgacgtggtagaggacaagatctaccgtgggaaactcctggacaacggaggtgactctttgggcctgggagagttgccaggattgtacacagatggcacttgggtactcagggtcacgggcccagattcaggtggccccggagctgaggcttcggctgcccatcccccgtgtgccccccctcccccagttaattgggttggattttgctgtgggtctcagagcctgatgccccgtaattatcgtaagcattgctgctgcctgataattaacaaaatgatcaccctttctttggaacggcctgaagcctggttccccagtcttggaattttgggcttagaaggaaaatgccatgtagggatggaccacctctgtctcggggtagcctgagctacacaggctcagtattaagcatctattgcgctggatacagcagtgatcaagacagatagttttaagttgtgtgtcagggagggtccctgagcagaggcaagcaagagacatgttttaatagaggagtttgtgttgtttattataaaagaaacttggaaacatctcaaatgtccgtcctcaggagaatagttacgtaaactgagctgtcgtcacatgacagtttctaaaataataagacacacggacatattagtgtagagtgtcttcaggacattcaatgggtagtttctagcacgttccatcatccttatagtatgtccaaacatgttcccagaagcttccatcagccctgacctccttgcccaggttaccccacctcagaacagtacatactcaaagtggctgacctcaccccctcctccaagagccccctttcccacctacctcccaggaggaaagaggcctgggagaggagagtgggagccaggcccttcagctctctgggcagaggtgtcagggtgaaggtggatcattgagggaccctgagatccatgccttcgccaagccccggcccaggagtctctaaccacctgcaaccttctcttcctagccctgaccagctttgaggtggtgattcagtatggcttggccacaccagagggcctggctgtagattggattgcaggcaacatctactgggtggagagcaacctggaccagatcgaagtggccaagctggacggaaccctccgaaccactctgctggcgggtgacattgagcacccgagggccatcgctctggaccctcgggatgggtaaggactctgccccacccccaccccctacccacccccgctccgtagctctgtgttcagcctggccagggacacctgtcttcttggtactgttgactcccccagcttatctgttgtgtgaccaccccatctttggccctcctcccttcctccctccctccctaggattctgttttggacagactgggatgccagcctgccacgaatcgaggctgcatccatgagtggggctggccgccgaaccatccaccgggagacaggctctgggggctggcccaacgggctcaccgtggattacctggagaagcgcatcctctggattgatgctaggtcagcagcatccgggcaggggagggacaggaccagcatgaagaaagatgaagccaagaggaggatggggggaggggaactgacagatgagaaggagcagggttgtaacctgcagtcatccatctaccctccgctcttctcataccccgtgtcctctgctgagggctctgcctgcccagggcaaagagaaggtgccttttcctaactcaccctggagctccaaacgccaactgtagccctgggaaggaaatctagaagattcccttggggagggcataaggctaggatcccaacccatgcaaccttgctttctctcttcagtcccaggcaggacttgggaaggggagttccctggtgtgttgagttgtgaggatgagggaaggtgggcacctggcagggcaccttgctgagacccccactgacccctccattacaccctcaggtcagatgccatctattcagcccggtatgacggctccggccacatggaggtgcttcggggacacgagttcctgtcacacccatttgccgtgacactgtacggtggggaggtgtactggaccgactggcgaacaaatacactggctaaggccaacaagtggactggccacaacgtcaccgtggtacagaggaccaacacccagcccttcgacctgcaggtgtatcacccttcccggcagcccatgggtaaggggccttcaggcgactgaagaggagccaccagcccttggatgggcgtgggggaggtgctgggataatggggtgtgaggaggggatgagacctgggtgagaagggccagggagggatcaacacatcccaggatgctcttgcttcctctctctgggccagctccaaacccatgtgaggccaatggcggccggggcccctgttcccatctgtgcctcatcaactacaaccggaccgtctcctgcgcctgtccccacctcatgaagctgcacaaggacaacaccacctgctatggtaggaagccatctcctcctctaacagttacgggtaaactgaggctgaaggagaggtccctgctgttaagcaaaggaatgactggaaggaggggctctgaaaacttgctagcgctggaggaaagagccacaactgccaagatctgacacagtctcttcacagttctcaacctgtgggtctcgacccctttgggggtatcaagtgaccctttcacaggggtcacataccagatatcttactattcataagtatagcaaaactacagttatgaagtagcaatgaaaataattttatggctggaggctacagcatgaggaagggtcacagcgttaggaaggctgaggaccatcatcgtagcaaaaggccaacagcacgcagggggattcaggggagacacctaacctaggtaggtgagaaacttgaaggcgagggactgccttcaatgactttcctgcgtcccacagagtttaagaagttcctgctgtacgcacgtcagatggagatccggggcgtggacctggatgccccgtactacaattatatcatctccttcacggtgcctgatatcgacaatgtcacggtgctggactatgatgcccgagagcagcgagtttactggtctgatgtgcggactcaagccatcaaaagggcatttatcaacggcactggcgtggagaccgttgtctctgcaggttctggccctgccctccaccccaaggctcataccagtcacatcccctgtggtcctgatactccttctccaaatcttatctctagcctacttcttgaccctcactccccaggtagcacactctcctcagcctataccctgcaaataccaaccacggactccctatttgtgcccccagacttgcccaacgcccacgggctggctgtggactgggtctcccgaaatctgttttggacaagttacgacaccaacaagaagcagattaacgtggcccggctggacggctccttcaagaatgcggtggtgcagggcctggagcagccccacggcctggtcgtccacccgcttcgtgggtcagtctgcagcccagggttggggagcacctgtgtgaggaggggaggggaggacccttacccaattcttggttcctttcccagcaagctctactggactgatggggacaacatcagcatggccaacatggatgggagcaaccacactctgctcttcagtggccagaagggccctgtgggtatgcacttgcccttcttgctcctgcaggcatctagctccattaggagatgctcctagtgtctctctggtgccttaggcctcttccagcttccagcttggtgcctactctcactataccttgtcccagagccacaaggttcagggagggctccatggctctgacacccactcttcttccagggttggccattgacttccctgagagcaaactctactggatcagctctgggaaccacacaatcaaccgttgcaatctggatgggagcgagctggaggtcatcgacaccatgcggagccagctgggcaaggccactgccctggccatcatgggtgagggctcgggtggaaggagggatggaaggagagcaggctaggcacagctgaacaggtgatgggggagatcctgaaggccactttccaccccctgcaagcctaatgacttctgcaagagagctgggggggctagagagatggctcagtggttgagagcactgactgctcttccagaggtcctgagttcaattcccagcaaccacatggtggctcacaaccatctgcaattagatccgatgacctcttctggagtgtctgaagacagcaacagtgtacttacatataataaataaatcttaatttaaaaaaaaaatctatatttaaaagaaaaagaggactaggaaagagccttcccaagagtcttattccctcctgttgccccaggggacaagctgtggtgggcagatcaggtgtcagagaagatgggcacgtgcaacaaagccgatggctctgggtccgtggtgctgcggaacagtaccacgttggttatgcacatgaaggtgtatgacgagagcatccagctaggtatgcagtgggcgcacaatgtggtgtgtggagggggtctgcggcgggagggatgaggggtggcagagagactgcagggctgtgaccatgagcagcctccagaacggggggggggtggtgagggcatagagggagggctttttaccttacccccactcgtgtgaaatgtagactcagtctggccagaaggtccagggatctaagaagacatgagacctaagaattgggttgggtgtgaccctgacaggtccagggtgaatccagtgactgttgtcctctctgagcagcccaagcctgtcccccaccaaggctcaccctttcttttcactcctgtgtcctcccgcagagcatgagggcaccaacccctgcagtgtcaacaacggagactgttcccagctctgcctgccaacatcagagacgactcgctcctgtatgtgtacagccggttacagcctccggagcggacagcaggcctgtgagggtcagttcccggcatttcctctctgtccagccttgaccccttctaccctattgctacattatgcgtttgagaaagatggtgttcatcgtgtgttaccaggaggcttctgggctaaatgcttatccagtgcccctttctgggtactgcggacaaaagctggagccagaaagtggggccagcatagtgagaagccggaccacaaagcgctagtgactgttcaggacctgcagtaggttttggtgagatagacaccggcggctgacagaggcaggccagcttggcagaagaggcgtgccctgtgctgtgccctgggtttatagagtgggtagaatctgatgcttggtaccttgaagagagaagttggtggtacaatagggtgtgcttaacatgccctgagccctgacttaaatcccagctatgtgtgcacgccttggagacagacactcatgctacataagaggcaagaaatatagctgagaagtcaagttccagggccgctgagccctgtcgagggcagcgtgggaagactgtgataaggctttgagctagggtggggacctgcgggttctcagccaggagtgcctagaaagtggtgtttggagattaacccaggggcagaaggcttgcagaatggaggagggaggaaccaaggcagtcagaccagttaggagagtattaggagtgtgtgcgtgaggaggcaggcccgaggcctggctactcaactggcttgcaaggaagggatgagacatggaggcacttcccaagagcctgctggtttacaagcttgcccttggacagcacttttccccaaagtgctctgccagaaacctcctgctttgatgtgggtgggtgttacagaaaggaaccctgggccgagcaacatgtaaacattgtgtttttactgtttggctcctcagaaccctgagtacactgagcatattttgggagacttttagtgtctgcacgtggtggtggtggtggtggtggtcgtctcttcttcttcttcttcttcttcttcttcttcttcttcttcttcttcttcttcttcttctttttctccttctccttctccttctcctttctccttctccttctccttcttcttctcctcctcccccctcctcctcttcctctttttcctcttcttccttctcctcttcctcctcttctttcacagagtttaagcaaccaaggcttaatggagggattcactggggcacacattgtattcaagggatgggagtcagggaggattctgggatgcatagagagcagtgccttctcaaaaacaggaaaactggaaagaagactgacccaggggcaagcaggatgttgagaactttatgttgggaaaggatttggaactgagcagaggcagggcaatgagaaagttaaggtcagaccaagtgccaaactgggaatctagattttggagtcttgctgctctggttgtctgctgcgacctcccctgaggcccttggaaggaagactggggcagggtgctgagaaagaaatgtaagtctctttctgccctcttgtggtgaatagtggttctgcaggtggtctcccagagctggggctctcagaagccagttaggttgccatctcctgtccaaggtccgggcctcacacatggtgtgagcgtttagaggttcaggagatgggtagaagaaactgccaaaggggaagctgagaaaagcagtttgagggtgacaggaacctagctttgtcagcaaggctcatgcttaaagtgtttttgtgttgcaggtgtgggctcttttctcctgtactctgtacatgagggaattcgggggattccactagatcccaatgacaagtcggatgccctggtcccagtgtccggaacttcactggctgtcggaatcgacttccatgccggtgagctattgtcccggggattagtcagcatgccccagtagtttatgggagtgacacattaaagtcctagaagggctgcctgtactgactgtagcagctgcctcactccttcctgctgcctccccacttccaagaaagcacccggcacccacagcccccattcggtgctatcctgaccctcctcgtgatttgaccctttgccttgcctctgcattgaggggcattctcatgtctgcccctctgcttccagaaaatgacactatttattgggtggatatgggcctaagcaccatcagcagggccaagcgtgaccagacatggcgagaggatgtggtgaccaacggtattggccgtgtggagggcatcgcggtggactggatcgcaggtgaaatgaatggtagaaggaaaataggctttgggggaaaggcacaggccatggggacgtaaagtctgaaggtatgggcagaagccaatgggagctacagggaagatttggatggaaggggaccaggtacaaggctccctaccaatctccctgaaccccaccgactgactccctcctcaggcaacatatactggacggaccagggcttcgatgtcatcgaggttgcccggctcaatggctcttttcgttatgtggtcatttcccagggtctggacaagcctcgggccatcactgtccacccagagaaggggtaaggagctaggcaagctggcttagatctcttgaccacagtatagtctgacaaggcccagcttctaagtgggatggactctcacccccacttccatccctacccacaggtacttgttctggaccgagtggggtcattacccacgtattgagcggtctcgccttgatggcacagagagagtggtgttggttaatgtcagcatcagctggcccaatggcatctcagtagactatcaggtacggatacaccctggagctgatgaaggcgataaccctagttctgagcctttccctatcagtttccctgtggtaaccatcagggttagacgtggaccagggagggtggtggcagcctttaacccatttgtcaccgagaatagtaatctgccctaagacgatggagggtggtcatgctgaagtagagtatgagaaagctgggtgtggtagcatatgcttaacactcaagaggctgagacaggaggattacttcaagtttgaggccatcttggactattcagtaagatcttacctcaaaaatttaagataaatacatagatagatagatacatagatactgatagatagatagatagatagatagatagatagatagatagatagatagatacatgatagatacataatagatatatggtagatgtataaataggtagatgatagattgatagatgacaaatagataggtgatagataaatagatacatatatagatgcatagatgatagatagatagatagatagatagatagatagatagatagattttagataataaacataggtgtaggtaaatagatatatacatagatacatagagatacatagatatacatagatacatagataagaagctaacatgatatttgcctaacatgcttggtcctgggactagtctctaatgctgcaaatgagggcagtaacaataaataaattaaaaagtatagagtgagggtgtgtggtccacacagtaagtgtggttacacatggagccgatccctactggaaagcaggagttagccccaaggtgagctgggtacatctgtccacagggcggcaagctctactggtgtgatgctcggatggacaagatcgagcgcatcgacctggaaacgggcgagaaccgggaggtggtcctgtccagcaataacatggatatgttctccgtgtccgtgtttgaggacttcatctactggagtgacaggtgaggggggctgggtcctgcttctcccatgggtttctcctttctggctttttagtgacataccctacacacggctttcccttctccagaactcacgccaatggctccatcaagcgcggctgcaaagacaatgctacagactccgtgcctctgaggacaggcattggtgttcagcttaaagacatcaaggtcttcaacagggacaggcagaagggtaaggctgggctctgggccaggccagaaaggtgaacaaggacagctgaaccttggaggaagagggacaaggcaggaaatcagtcagagcctccagggcactttccagtgattcacaagagctgggggcagggagttaggactgagcgggatagatcaagatattagataccatagctaagcagggatcagctgaaatttccaactgatccgaggacagagagaccaaagagcctctctttatgctatacaccatactaccttctgatgctctaccttccgatgttctaccctccgatgctctctgcccccaggtaccaatgtgtgcgcggtagccaacggcgggtgccagcagctctgcttgtatcggggtggcggacagcgagcctgtgcctgtgcccacgggatgctggcagaagacggggcctcatgccgagagtacgctggctacctgctctactcagagcggaccatcctcaagagcatccacctgtcggatgagcgtaacctcaacgcaccggtgcagccctttgaagaccccgagcacatgaaaaatgtcatcgccctggcctttgactaccgagcaggcacctccccggggacccctaaccgcatcttcttcagtgacatccactttgggaacatccagcagatcaatgacgatggctcgggcaggaccaccatcgtggaaagtaagccaagcccgagtcctcccaataaacagtggggcgatgggggactgtcagtgtgtggacacacaggcaccaaccaaacccacatgctgggtgggccccaaggcagggtttcccatatcagaaatacattataattcataacaacagcagcaaaattacagttaggaagtagcaacgggaaaaatgtacagttagggtcaccacagcgcgaggaactaactgtattagaggattgaggcaccaggaaggttgaggaccactgacctacggggctggcaggatccactgccattgtggtaacctgcacattgtcctttacatggagccagaaggaggcctcttccttccttgcactgatttcattccacaccaagatatgcaagcacaggcagcagacacgggcccaggtgcaactctccctgagtgggagtcagcagatccagcgagcttcttaccctgaactcaggagtcagggtctcaggggtgtgcacatgaaagctgagcctggcagccagtggccctgccagagctgtgaaagccacagagctgtcaccagaaagagtctcagcactcagcactgccttttaccacttcaggttttccctttgctgctgctgttgctgctgccgctgctgccgcttcctcctcctcctcctcctcctcctcctccctccttccttcctcctcctcttcctccttctcctcctcctcctccacctcctccctccttccttcttcctcctcctccctccttccttcctcctcctcttcttcttctcctctttcttctccttctcctccttgttcttcttctcctcctcctcctttctccctcttgtttttcttctcctcctcctcatcttcctcttcctcctcctcctcctcctctctccagccccacttcttcccggagcggaaggcttaagatttatttattttatgtatatgagtacaatgtcactctcttcagacacaccaaaagagggcatcaggtctcattctggatggctatgagccaccatgtgatttctggggattgaactcaggacctctggatgagcagtcagtgctcttaaccgctgagccatctcatccccacccccttcttctttacttctttacttctttttttttttttaagatttatttatttattatacataagtacactgtagctgtcttcagacactccagaagagggtgtcagatctcattacggatggttgtgagccaccatgtagttgctgggaattgaactcaggaccttcagaatagcagtcagttatcttaacctctgagccatctctccagccccactcctttacttttttaagaaacattttgtagccacacataaccttgatttgaacttctgatcctcctgcctgcacagcactggggtcatctgggattataggtgtgcgccactaccataccctttttttttatgttgtggtaggacttgaacccagagctttgtgcatgctaggtaggtgagcactgtgttacccaaggtctattcccattcctcctttgttcctctcttcatccaggaggtccattcagaccagccaggtgctgactaggtactgcatagaaaagaatagacctgtccctctgtccttctgtctcctggcacactttctctacgacatcctgtctgtgtctaaaaatggagcgtctgagggctggtggagctcgtgctcagcatgtgcaggacgttgggcccagccccagcacctaaactggatactctcaatctcagctccatcaggagagactgggagccagcccctcctatcacgctctctgttgtccgtcctacagtgtgctccgcctctggcagtcacatagacacgccccagggagccccggagcctccgctggctgctgctcacagcactgttcagctctgtctttttagttacatctgctttataaaacattccagctcagcccagcgtgatggcgcacgccttcaatcccagcacttgggaggcagaggcaggtgtatttctaagtttgaggccagcctggtctacagagtgagttcaggacagccagggccacacagagaaaccctgtctcgaccaccccatgctccccctccccccaaaaaattccagttcaaggcctctgcaagcaggaagctttccagtctggccccagaggaatagtagaattcagttagccggaatctcccccatacatgaataaacagaactccacttctgaagagtgtgaccacacataggccgggagtggggggtgggcaagagaagaggaaggaaggtgccacggatcatgacgcaggtggtgtgacgtggctctgtgaggggccctggggccctggcaagtctgaccaaagagccctcggaggaactcccggttcccacaattccaggggagccagtcatgcccttagcacctaccaggctgcccctctgcttctgctggttggcccttctcaacccacagctgttcctgtctcttcacagatgtgggctctgtggaaggcctggcctatcaccgtggctgggacacactgtactggacaagctacaccacatccaccatcacccgccacaccgtggaccagactcgcccaggggccttcgagagggagacagtcatcaccatgtccggagacgaccacccgagagcctttgtgctggatgagtgccagaagtgagctgctgggcctggggggtgggagctatgtcatacgggaacagaaaggggacaggcagggcccaccatttctggcctcagtgagatgcatcacctctcagggcgctgcttaatacaagtgtcagaaatgaagggaggttgagggccgtgggagatgcctctggctttgtgactggcattcatcacacagtaccgtgggactcaaagcttcagcgaaggctcactgaccttgaggatatgggctgggcctgttcaaaccccttgctgagcagaggtcttattacagtgaccaagaggcattgtgaaggcagttgtgagcacaaggccccaaagtgagaaaagcaagaaaaggtcaaacaggacagcaacgggactgcccaccatttgggcaaggctagcctgagcaggcagggagtctggtctacctgtcctgcctaccctgtctttcttcattttgatgtgcaggttactagtgagtcacaccctctgcatagcagtcctggctcacgtctgagcgacctgccctccccagttcagctggaatcagaatgctttctatcagcctcactaggaaactaaagcaatgccacagccttggtgacctcacctgtctgggctggtcctggggcctgtccttcctgggcctagagcctctggggaggggctgtcatgatatttttctgccattctaaaagaggcatcctcggtttcaaccaagtccctcctggctgagcccaggaaagtgctctctctttctctctctctctctagagccccagagccagtggcttcaaaaaaacccaagtacacagagaatggactggttggcagagggtggaggatttcatgactgccaaagacctgccctgtggaagtctgggagaatgtcatcagggaggcagctcaggggtgactagagggctgagattgtcttaggttaggggagagagctggaaggagccagtatgtcaggatagtggttcagccagccagccatactcctcctgatcctcactgaagcattagtgtccttggaaatcagatagttggacaggtagaacgtccactgtatttctagttgctgaccctctgccccaaggaagcctcccctcccccaccccaccatcccacaaagcagctttgccaaactcttaactcagggtacatcccatgtaagtcaatttggtgctccgctgtgagtgtggtctaggctggacttgagagtgtggaaatcactgtaaagccaggctgcacaagccaggaaacagcactcgggccaggcaaggtggtccatgactataatctcagcactggggaggtggatgtaggaacggtgggagttgaggtcattaagctatgtaactagttgaagggtagcctgggatacaacaggccctatctgaagaagggagagagagagagagaaagcatgctacagctgctgccccaggacaggctgaatgggtcgccacctccatccataaagagtcctgtgtgtggtgtgatgcattggggaagcagagcaggcagatctcttgagttcaggggtagcctggtctactgagacagtgccaagacagtcagagctacaggaaactcggtctcataaacaacaacaggccgatcctgtccctgaggaatgggtctccagggcctcaaagagggaggcaagcgttacgctgtggttgagctggaatgtagctcatctggcagacggttagcctggcacacgtatggcagcatgttcccgtaatcctagcacttggaaagcggaggcaggaggatcaggaggtaaagaacctcaagcccaggctggtgatcctagagagagaagagaacgaagggggtaaacagacaagttacaagttcaagttcaaacagacaagttacaagttcatcagtgaggtcagagaagggaggggctgaggcacggtggccaggtctattctgaaactgtttctgttttctttgctgcatctcaaaggaacatgtgcaaagggttcaccaccccaggtcaagtgaatgaatcaagctgtccaagggcgaccctgctgccgctgtgctgtgcttgatcctccccaccccacaccccaggcccttagcaccactccacaaacagtggggcatggcttggccttaagttcacatgtccttatgttgtgaagaaaactttttttgttttttttttttaagattgatttattatgtatacagtgttctgcctgcatgtatgcatgcaggccagaagagggcaccagatctcattgtagatggctatgagacaccatgtggttgctgggaattgaactcagggcccttggaagagcagccaatgctcttaacctctgagtcatctcttcagccccagaaaactatttttgagggtacaatccatatgtgcccaaggaaatagtcaatacttagcaagagtttcctgggtagtttgttaaagagccagcttcgatacagagaaagcagttagcagtaaatacatggaaaactctcattgagatgaatacacagtacttagtttttacaacctctgcagcaatattatcccccactaaataatagaaaaataggtcagtcagagtggtcgggcaagttgcctaaagtaggcaacctactactccccccccccccccccccagcctacctggctggaaagtggtggagccaggacttggggctgggagctgactcgcttggccacacagcctccagtctcagcaaatgcagatggtcccttcccatactgcagtacgtgactgtgggcacacacagtcagatctagccacatagtgcagtaactcagtgccttggctgggctagtctcaggcaccgaggctatgttggctttcgtggctctcgggttgtgaggctcatcctgggttctagttgactccttaggttcctgatccctttgcccgtttcccatcagcctgatgttctggaccaattggaacgagctccatccaagcatcatgcgggcagccctatccggagccaacgtcctgaccctcattgagaaggacatccgcacgcccaatgggttggccatcgaccaccgggcggagaagctgtacttctcggatgccaccttggacaagatcgagcgctgcgagtacgacggctcccaccgctatgtgagtgtaagggtgggtgggtgggtnnnnnnnnnnnnnnnnnnnncaccagaccagggagacccagggacacggtgagaggtcccattcgagtccttaactcagggcagagcaccagccagggagacccaggacacggtgagaggtcccattcgagtccttaactgtgggtagcctttccttcccagacggtctgtgacttcccgcggccctcttgcctcccctctctgtgctgttaagaccgatgaggggctcgaatgcagagacgctggtgcttctgtctcatcaggtgatcctaaagtcggagcccgtccacccctttgggttggcggtgtacggagagcacattttctggactgactgggtgcggcgggctgtgcagcgagccaacaagtatgtgggcagcgacatgaagctgcttcgggtggacattccccagcaacccatgggcatcatcgccgtggccaacgacaccaacagctgtgagtggggctaccacccgcagtgctctcctgatctctgcctgcacacatgtgcacacgacagtcttgtctctcctgttccctgtgactgcacacatgtgcacatgacagtcttgtctctcctgatctctgtgactgcataatacatatatgatagtcttgtctctcccaggatttcttctgtacagacaaatacctttacatacctttggcacccagaaactcctaaggccccaacatttctcaaacccaactccctcaagacacctgtgtacatacatggacttgatatactcaggtccatctcatgcaaaactgcatgcgctcacgcacacgcacacacacatgcacacatgcacatgcattcgtactgttcatgaccctaggctcgtccccatcccaggagatcctatcactcagcctaataattccatctacccagagccacctacaccctaaaccttaccttatacccacataccaggtgtagcctatcatcccctcccccagcctgcacatagacatacatacctacacctggccctctcttgtgtgtgtgtgtgtgtgtgtgtgtgtgtgtgcagtgtccacatgccaccccatgcgaggttctccccgctgttgtgaacccccatggctgctggggtcgtgcagagctctggaatgttaggtgggcaatttgggagtgtacagggccagggaaccctcttcagctttcggtccccccactcccacccctgctcaggtgaactctccccctgccgtatcaacaatggaggctgccaggatctgtgtctgctcacccaccaaggccacgtcaactgttcctgtcgagggggccggatcctccaggaggacttcacctgccggggtgaggaagcaagttggagctgggacaggggctgctgtggggtgtcagcacaagagacccttattccagactccagcccaggctacaaggctggactcaggctaggtcgcaactcatgacaccttctccctccgcagctgtgaactcttcttgtcgggcacaagatgagtttgagtgtgccaatggggaatgtatcagcttcagcctcacctgtgatggcgtctcccactgcaaggacaagtccgatgagaagccctcctactgcagtaagggccctgctccagcccctcccccagtcccctgtgccatgtgacccagctccatagcctcagctcatgaagagcagagcttggaccttaggaagggacggtcattggtggggaggggggaaagaagccccttcctatgcctgctgtgaccacgcacaccctcccctcacagactcacgccgctgcaagaagactttccgccagtgtaacaatggccgctgtgtatccaacatgctgtggtgcaatggggtggatgactgtggggatggctctgatgagataccttgcaacagtgagtagattgctacatcccagcctcacccccagtcccctgccacacccctgccttacccctgcctcaccacagccatctgcctcatcactgcctcctgcctcacccctgcctcatcccagcttcaccctagcctcctgccttacccctgcttcactcctgccctcacccctggtttttagtctcagcctgtaccccatcctcactctggctgagcatttgtccccaggcactctgaggacaggcgagaactctgtcctgggcctttctggccctgcagagggacactggcctgatggtactggtgggccctgttctagagactgcctgtggtgtgggtgagttccgctgccgggatgggtcctgcatcgggaactccagtcgctgcaaccagtttgtggattgtgaggatgcctcggatgagatgaattgcagtgagtaacagcctgctcatgactgacagctggcccatgactgatggcctactcatgactgacagtctgctcatgactgacagttggcccatgactgacagcctgcccatgattgacagttggcacatgactgacagcctgcccatgactgacagctggcccatgactgacagcctgctcctgcctactttcctgtccctcctgcctcaggctgttctgccttatttcctctcagcccccctggccccaaatagtagcctctatcctctctgaccttgctttttctccctccatagaggtagtgagtcagtgggcagcaggcaccaaatctgaaaccataagtctaacatggggccagcaattgctcccatagtgtgtcttagaaggagctaggtgtgacccctcacccaccctcaccaccccttctattccatcttccacattggcccctaggtggcgccctgcccttcctcttctctcgtgaccccactgacccaccctccctccaccaggtaccacagactgcagcagctatttccgcctgggcgtgaaaggtgtcctcttccagccgtgcgagcggacatccctgtgctacgcacctagctgggtgtgtgatggcgccaacgactgtggagactacagcgatgaacgtgactgtccaggttggccagcggaagctcgccgggtgaacgggagacccggggctggcagtgtcttcatggctggcagagtcttcacatctcccttctacccccaggtgtgaagcgccctaggtgcccgctcaattactttgcctgccccagcgggcgctgtatccccatgagctggacgtgtgacaaggaggatgactgtgagaacggcgaggacgagacccactgcagtgagtgccctgggaccctacccagctcccacctcacagtccttatggaaagcgccctacacggggagacacctgggttccactgtgtctcatcctctcagactccagaatagagtcacttcttcagtttgtgatgagtcgctcacctgccctgcctttccttgtcttcttattactttctcctctattccagacaagttctgctcagaggcacagttcgagtgccagaaccaccggtgtatctccaagcagtggctgtgtgacggtagcgatgattgcggggatggctccgatgaggcagctcactgtggtaagcagtggcctgaatccggttcagggcggtcagtgtcctaccccctaaagaagggtccatataccagtgggccatgttatcacggctgcctgctctgccctgtcccctcctgagtctctctgtgtctccttgcccctcatgcagaaggcaagacatgtggcccctcctccttctcctgtcccggcacccacgtgtgtgtccctgagcgctggctctgtgatggcgacaaggactgtaccgatggcgcggatgagagtgtcactgctggctgccgtgagtgggagaggccgtgaggaatgggtgggcatcaagcctcgcagccttgctttgcaaacactggcaaatgaggtcaagggtaggaagaacttcagtgggagccgtgcgtttaaggagatcacagatccagacccctcccattctgcccattgctaccactcatgttgcaggaaacttaggattgggggtgggggagtgactatcaacagctagtaagtagggcagggcaggagtagggcaggcctgaggagggactctgcctccatccccagtgtacaacagcacctgtgatgaccgtgagttcatgtgccagaaccgcttgtgtattcccaagcatttcgtgtgcgaccatgaccgtgactgtgctgatggctctgatgaatcccctgagtgtggtgagtcccgtgactggaggagtagccctgcctagccgtgctggaggtccagcctcatcatcccctcccccaccacagagtacccaacctgcggccccaatgaattccgctgtgccaatgggcgttgtctgagctcccgtcagtgggaatgtgatggggagaatgactgtcacgaccacagcgatgaggctcccaagaacccacactgcaccagcccaggtcagcctctaggtggagccctttctccttcctgtgaccccactgacctgttcccaccaccctccatgttggcctctagatggctccctgccccttcctcctcctcttctgtgatcccactgaccagttcccgccaccctccacagagcacaaatgcaatgcctcatcacagttcctgtgcagcagcgggcgctgcgtggctgaggcgttgctctgcaacggccaggacgactgtggggacggttcagacgaacgcgggtgccatgtcaacgagtgtctcagccgcaagctcagtggctgcagtcaggactgcgaggacctcaagataggctttaaggtactcaggggatccgaccagagccctttgttcctccccctcatccctccatcgagtacttattgagaacccactctgccagcagtatactaggctctgaggacatagcagggcagacagaagtccctcttcagttagagcctcagagccagtgggctgtgttcacgggtgagaagagagtgggttgtcaagtagatatgttgctctggagctcaagctaaaggccaggcctggaggaagaattatcaccccagagaggctatttaaacccccgaggaagtgaatagagatgataaaaggccttagccagcactaagctacatcgagggactaggaggctagggaagccaccaagacagaatgacagccacatgaggaaaactcggagggacagggtgcacagattgcagtctgtgtgtcacttgcctcccccagccctcctgagggcctctaggcgtcgttggttcccagaagcatagactccagccgcttcctcagctgcacatcccttaccccccacagtgccgctgtcgcccgggcttccggctaaaggacgatggcaggacctgtgccgacctggatgagtgcagcaccaccttcccctgcagccagctctgcatcaacacccacggaagttacaagtgtctgtgtgtggagggctatgcaccccgtggcggtgacccccacagctgcaaagctgtgaccggtgagacgggcacttggagggtgagatgtatttcaggcagctgtgggattgggcagcaggtggcaggtagggagagggcttgatacaatgtagctggagatagcctggggtaccagggctgctggagatagcctgggggactagaggtgctggagatagcctgggggaccagaggtgctggagatagcctgggggaccagggctgctggagatagcctggggtaccagagctgccagaatatacctaagcttggagctgagccgagaccctcctcctacagatgaggagccatttctcatctttgccaaccggtactacctgcggaagctcaacctggacggctccaactacacactgcttaagcaggtgccaaaaccaagccttctttacacccgttgttgactgcccgggcccagtatggcctccccagttcttcccaccgccaggccatggttgtctccttctccctctccctccagccacatcctgactccagacatccttccccagatacacatgtgcccctgcggcagctgacttccctgtccccatcccaaacccagggcctgaacaatgcggtcgccttggactttgactaccgagagcagatgatctactggacggacgtgaccacccagggcagcatgattcgcaggatgcacctcaacggcagcaacgtgcaggtgaaaacagaaggctgccccgtgtcggctgacaggcacaccagggccccgctgacgagcctcacaccctccccatagtcctttgctgtaaaagagtctccccttctctcacacctgtcaacactgcttcgccctgctcctccctgagccacagaaacgttctgctcgcttcaccttcccctcctctcaactcaaaagtatgcaagcacaggagactcctcctgccttcccttgagttctgtgtgctctaggcgtgtgtgggtggccccagagaccccctgcttggagctcctggtgatagccacttacggtcaggagagtggagaagccatgccccggagactgagggtgccaccagctcctccttccctgtgttccttacaggttctgcaccggacgggccttagtaacccagatgggctggctgtggactgggtgggtggcaacctgtactggtgtgacaagggcagagataccattgaggtgtccaagcttaacggggcctatcggacagtgctggtcagctctggcctccgggagcccagagctctggtagtggatgtacagaatgggtgagtggtgggcagaggggttgggggagccctagaaaacacccaagcccggacaacctgcaggctcctggtgggaacagtctctagactcttaggattcactgctccccacctgccaggtacctgtactggacagactggggtgaccactcactgatcggccggattggcatggatggatctggccgcagcatcatcgtggacactaagatcacatggcccaatggcctgaccgtggactacgtcacggaacgcatctactgggctgacgcccgtgaggactacattgagttcgccagcctggatggctccaaccgtcacgttggtccgtatgctagagaggctgcccaaggccagcagacctggggggcagggatctaaagggtttagggtggcaagaaggcaaagtgtgcagaaaccacaacccagaggtcttggggtttcaataccctggcacttctctgggatgggcccagactccaggcctcaatccagctccttagaggaacaagggctatcccctgtgcagctcaggataatggcctgaggggtgggcacatgaggacttcctgaagaacacctgtgcttcacacttcctgagagaagctgtggcctactccagagcagtggtatggctgctggacagctatcgctgttgagccttaggaagtcgtagaagcatcaggacctgggattcattcccatctcagggttgtgatggggtttaaggaagacaagtaggcacagaacctagcctgtactcggtgcccactactgctgtgtctcccatagtgctgagccaagacatcccacacatctttgcgctgaccctatttgaagactacgtctactggacagactgggaaacgaagtccatcaaccgggcccacaagaccacgggtgccaacaaaacactcctcatcagcaccctgcaccggcccatggacttacatgtattccacgccctgcgccagccagatggtaatcgagcagaaaaaggggggagtggcaagcctagtccaagcatgaaaggcctgttctcagccagggtcaggttccctccccggcactgactgagcgttcctgctgggtcccggacttacagaggctataggtcccctagcagcttcagtctgccctgggctcaatgtggggtctctgacagccaggccctaaagtagtagagagcccagagattagtgagtgtggaccaagagcatcagaggaaaccctgaaagcagacatattcagggtaggatagagatgtaccaaggaggccagacatcctttagaaggctggaaaccattcccggcaggacccaccctcacagtcagagaagccagtgggcagccatgacccttcaacctctttctcctggcagtgcccaatcacccctgcaaagtcaacaatggtggctgcagcaacctgtgcctgctgtcccctgggggtggtcataaatgcgcctgccccaccaacttctatctgggtggcgatggccgtacctgtgtgtccaactgcacagcaagccaggtgaagttcctcctaagatgcccatgctgcaacaccccaatcccctgaccccacactcctgtttcccggcacccactaatgcctgcacctctggcatgccgacacccgcacacttcctgcctacctcttgtgtcctcacggcaatccttgtacactgccaccttataaacacctctaatactgatctcaggaggacctagagtcctcgccttcccatgctctccctgtacagacacccccttgtctggctttcctaggtccattgtagccctgctttctgtccagctctgccaccccacaaactcccactatgtccctgaaacgtttccaccccgtgaaagaaagccttctgagttcctcataccctttccaacccctcttgcccacctgtcctccagtttgtgtgcaaaaatgacaagtgcatccccttctggtggaagtgtgacacggaggacgactgtggggatcactcagacgagcctccagactgtcgtgagtgtcctcgacgcccccaagggatggagacctcagtggcctatttgctccctgctctttcttttttagtgtgtgcgtgcatgcatgtgtgtatatctatgtgtgtgtgtgtctgtgtgcatgtgtgtgcctgcatttgtgtgtgtgcctatgtgtctgtgtctgtgtgtgtgtctgtgtacatgtgtgtacctgcatgtgtgtgtgcatgtatgtgcttttgtggatgtgcctacgtgtgcatgtgtgtgtgcacgtatgtctgtgtgaatgtgtgtctgtgtgtatgtgtatatctgtgtgtgcatgtgtatgtgtgtgccgtgtgtgcccatgtgagtgcgtgtctgtgtgtgcctgcatgtatgtgtgtgtgtgtgtgtgtgtgtgtgtgcctgagtgcctgcatgtgtgcagtgtgcatttgccagtgcaggcatgcacatgctgtggtgaaatgtatgacagtccggggaaaactctcagaaattggctttctctttcctcactgggttctgaggatcaggcttaggtggcaacaccatcttgctgaacccatctcctactcctaacactgagtctcctttctcggcagccgagttcaagtgccgcccaggccagttccagtgctccaccggcatctgcaccaaccctgccttcatctgtgatggggacaatgactgccaagacaatagtgacgaggccaattgcggtaaggagctgcctagataccagccattccttccgcagcacttgggggttcagagagtgaggacgtgccagcctgcagcagctttctctctaggctacatttctgggcttaggaccgcagtccacccatcctctacaagggacagggaggcacctgcctgcccgccctgagttccctccttctccctctccctctccttctccctctcccagacattcacgtctgcttgcccagccaattcaagtgcaccaacaccaaccgctgcattcctggcatcttccgttgcaatgggcaggacaactgcggggacggcgaggatgagcgggattgccgtatgtgccgggttctgggaagtgggtgggggacgtagctggcacacaccgttgttgcccactgcttcccatagaggcgctgagttagctctattagcgggggacatcagtcacattggacatttcctggtttgctcgtaaaaacactgtgctcggtatggacagtctgcagatccaggctggggataatctattccttcctgactgagaccagggccaggctttctggggagcgcgtgggggaccaaagctgtgaggagataaagggtaaggtcctcgttctctgttccatcttgcagctgaggtgacctgcgcccccaaccagttccagtgctccatcaccaagcgctgcatccctcgcgtctgggtctgtgacagggataatgactgtgtggacggcagtgatgagcctgccaactgtagtgagttgtccgtcgcccctgggccatccttcctcacggcctctgtggctccattacccaggcagacagacccctccctcggctgccgtacccttgcccagtggctctctggtggggacgactcctcctcacccatgccgatgccttgcagcccaaatgacctgtggagtggatgagttccgctgcaaggattctggccgctgcatccccgcgcgctggaagtgtgacggagaagatgactgtggggatggttcagatgagcccaaggaagagtgtggtaagcccagccatcttgagaggatgggtgtttggggttctgggtagaaagaagttcagtggttgacctctctgggcggagcctcgacgtgacccagcgtggggctcttgtggaccccatagagctgacacgggaaggaagcttcccctgcagtgcccaccacctctgaatcctgctcctctccctctctgcccctcagaagagaactgtgcagaatctctaccctcctgttcacctgtcccacccccccaaatcagctgccttccccaaacactttgctggccttccccagaacctcctgtagataccacacggcaattatcactgcctgagccccagagcaatctctttcggggggcaataaccaccttctctctgccgccggtctcacttgtctaccctagactctaacatctgccgcccactccacccctgaccgccccaatatctgcctccacatcttgcctcccccagatgagcgcacctgtgagccataccagttccgctgcaaaaacaaccgctgtgtcccaggccgttggcaatgtgactacgacaacgactgcggagataactcggacgaggagagctgcagtatgtcctacgccttaccctgccccatcatttcctttcccaggccttggcatctccctcctcagcacctcaccccttctaacccccaccccgcgcaagagggtggcctccaagggcaaggggtcaggcacccctcagccgcgctctaccctactctatgtccttgtacttgagcttgtgacatttcatctcatctcatgtttctctccattttcacactgtcctcttggggttgcagaggtaggtgtctctggtgtacccctgttcctgccagctctgcctctgcctggagccccgcccatccctgtgctgtgcttttctgcccaccgtccttaactggcctcttccccagacctggcgcttgtctcggtggtcttgttctcccctccctcccctaagtgatctgtcctaaggacaggaccagggacccgtgccctctcccatgtgtctgtacctaataggataagtgtgagtaccctcctgacccagccagtctcgtgaggacagccagttaaacactgtccgccattggttgagtgtctcaatcattacaccagtcggctgtggcctcttcacagacggacgtagggatgagccttgtgcttgggagttagtatttctgagggctggagatgccctgtgcccaccctgctgggacctgtctctcctcagcacctcggccctgctctgagagtgagttttcctgtgccaatggccgctgcatcgctgggcgctggaagtgtgatggggaccatgactgtgccgacggctcagacgaggtgaggagagctcgaggaaaggggtggtctcggaagaattagggcaggaccccaagggtctgattgggctgctggtccccatgcccacagaaagactgcaccccccgctgtgatatggaccagttccagtgcaagagtggccactgcatccccctgcgctggcgctgtgacgcggatgctgactgtatggacggcagtgacgaggaagcctgtggcactgggggtgagtgagccccttcatcctggtgcctccaccctccctgccttccccagcccactgtgtggcccagtttaatcttttaattcagccatttgttggtactgcaacaaacccttattaagcatatactgcaagccaggcatagacctagtgttggagcagtagacaagactcaggctcactccgtgtgcattttatgcaggttttaccctgttgtactaattcttttcatcttcactgggggtttctaccctcctttaatcactcagttcccagataaaagacacaaaacttttatatttatagcaagccaataacataccagagctaggcagatatccaccctctaagctatttagaatctacttccccatcaataaccctgagatacaacttgccatgttccatctgagcagctcttaactccaattggtgagccctcttggacatgttttcatgactcacctaccccatggcatcttctccctctcctggtggtccctgcctcagacccccagcctgggaattgaaaccccacctatttctcttttgtccagctataggctgtaggcatctttattcaccaatcagggataacttgagggacaaggttacattagcatcacttgggtccctgtgaaaatctcctgctccctgggggcaaccaggaccagtatttagcaatatgatacatagtgatacaatacaatacaatacaaagtgatacagtacagtacaatgtaacagatttaacatcagcggtgctctaaccttgctaaggaggctagctaggtagagatcatgcagacgcctgtagtccaggtccacccatgccttttccacctcccacccagttgcctgtgttaagaggccagttcctactcatcttccttccctggggcaggcggtgagtcaggggctgctctagccaaacatgcctgggctcagccactggaggggtcagtggacacctgtcagaagagaagcaggggtctcacctgcaaggcagccttctggttctgccccatgggctgatggtagcaaccaaagctaagtctccaaactgccgcacatctgtgcctgccacagactatactagactcgggtgtcccacctcacctactcaaggagaacatcctaaacccctgtcaacactgccccaagtagcctctcctccccctaaataccagaggaagcacattgcccctctgcccactgggcagaaaatgaagacgactgagtttgattcagtgacagtttctgtgatgacccccgggcctcagtcccacccacggtgcaagtgacagacagcatcctgcagccgcagttgcattcattcttacccctctgttcaccctgcacccagtgaggacctgcccattggatgagtttcaatgtaacaacaccttgtgcaagccgctggcctggaagtgtgatggagaggacgactgtggggacaactcagatgagaaccccgaggaatgcggtgagatgtagggaggcggggggctggagagatggcttggaggttggaggttaagcgcactggccgctcttccaaagatcctgagttcaattcccagcaactgcatggtggctcatgacaatctggaatgggatctggtgccctcttctggtgtatctgaagacagcaacagtgtactcatacaaataaattagatagatttaagattaggggtcatccacagcaaggatgctggagacctggcttctatactccccagtggccagctcttccctaccacttgcccccaacactgattgtggctctgtctcctggcttctacagcccggttcatctgccctcccaaccggcctttccgctgcaagaatgaccgagtctgcctgtggattgggcgccagtgtgatggcgtggacaactgtggagatgggactgacgaggaggactgtggtgagctgagggcaatgagccggggctgaggggacctgcatctggggagcagactgctataaggctttcaatctggcaagagtggagcccttgggaaaggtatgggtggcctcctggagccctgagtctgcaaggtcagcacacacaccctcagcttggcgagcagccaggacacacctgtgttcatgaagtctctgtggatgtacgggtagtgtgctctgtatccagagcctaaagcctctcccctccccagagccccccacggcccagaacccccactgcaaagacaagaaggagttcctgtgccgaaaccagcgctgtctatcatcctccctgcgctgtaacatgttcgatgactgcggcgatggctccgatgaagaagattgcagcatcggtaggaccagacctgagagcagagggtgggtgggcaccagggggtgtggctcaggggaaaaccagagggcagggctcaggggaaaaccagggggccgggctcaggggaaggactccaccatctgtcctccacagaccccaagctgaccagctgtgccaccaatgccagcatgtgtggggacgaagctcgttgtgtgcgcactgagaaagctgcctactgtgcctgccgctcgggcttccatactgtgccgggccagcccggatgccagggtaggagagccggatgggagatggggcaggaaccccagctcctagactcccccatgacgcccagtgtaacccccagacatcaacgagtgcctgcgctttggtacctgctctcagctctgcaacaacaccaagggaggccacctctgcagctgtgcccgcaacttcatgaagacacacaacacctgcaaagctgaaggtgctagaggccggaagggccagaagggcctgaaggggcagggccagaaggaagggtggaagggcctgaaggggcagggccagaaggaagggtgggcagggtcgggccacaccagctataaaatggagctggcctggagtggaacattcccaatggcacttcgttgctcagacttggatgcccagactcaaggtacaccgggatgccatcccgagcaaagcaaagcacaggaaaggtagaaggtaccgcctggctttctggggaagttctatgagagcaacactcctgtgtggcacacagtgtcccctcccctctcctagattgagagtatagtccgactcacagtcacatgcacccacctgcatgttccctccatgccctgacacagcactgcacctttcatatgtcctcacaccgtacatgtacatggtatgcatatacacactcccatgtatacatacatttctcatgccttgcacatatcctccacatctctgtaccgcttcagcacttatcagagtctgtagcagacctacatgctaaccagagaccacaagatagaattcttggaactatcaggaagcaggtaagagaagaacagatttctgaagggtctggtcagtctggatcagcttggggcacaggttagagcccttggatctgccattggctccacccacaccggaaacatccccttctgtctaaaacaaatggtctggttagatcggaggctactgtagtgtgacagggtcttggtcaaatgtgtcccagggatggaactcgggccctgggttctcacctctacctttcaagcccatctgataggtggtctctctcactccggcaggctccgagtaccaggtgctatacatcgcggatgacaacgagatccgcagcttgttcccgggccacccccactcagcctacgagcagacattccagggcgatgagagtgtccgcatagatgccatggatgtccatgtcaaggccggccgtgtctactggactaactggcacacgggcacaatctcctacaggagcctgccccctgccgcccctcctaccacttccaaccgccaccggaggcagatcgaccggggtgtcacccacctcaatgtaagcatccagcctgtcagagatggggtggaagagctccgcaggacagagtgtaggggctgagagggcagaaaactagaagacaggagtggtcaggtcagcctgctaggcacagctaacagccagagcaataagtagtatttggggctggagagattgctcagtggttaggaacaataactgctcttccaaaggtcctgagttcaatttccagcaaccacgtggtggctcacaaccatctgcaatgggatacgatgccctctggcactcagcagcatagcctactctgatacctctgagtcagtactggccaacttgcttaatgcgtgggctttactttattgacaaaatgaataatagctctcctgggcttaagtagagttcagaggtggaatgtgtgaaaccctaggcttgatcctcagcaacaatgaagatataataatacctagtcttctaagcttctttatagatctggctgcttgggtttttttgttttgttttttttgttgttgttgttgttttgttttgttttgtgctaaatttgaactaaagacttcatggatgctagccaactgctttagcaatgaactacactcccagcttcagactgctttttttttgtttttttttttaatacattgagtgtgtgtgtgtgtgtgtgtgtgtgtgtgtgtgtgtgtgtgtgaatcacatgtacataccacggcacacatgtagaagtcagaggacaacttgaagtttgttctttgttcctaccaggagtcccagggattggaacttaggtcctcaagcttggcagcaagcacctttacccactgagccacttcactgcccccaccactttttaaaagtgagaattaactagaaaaccatgaaaatgtgcctggcatggtggcgcatgcctgtaactccagctgtattcatagcagaggaaggaagagcaagagaaaagggtcagtctaggctacacagtgagttccagatcagcctgggctatgagagagacctattcaaaagcaaaagaacctagaaactgtggtcacgtcagtgtggggtgacagacaagaacaggtgggcagaccaaggagaatgggggtgacaatcagggagacagaagatggcagtcgctgaacatatgaccccacttagatttcagggctgaagatgccgaggggtatcgctatcgactgggtggccgggaatgtgtactggaccgattccggccgagacgtgattgaggtggcgcaaatgaagggcgagaaccgcaagacgctcatctcgggcatgattgatgagccccatgccatcgtggtggaccctctgagggggtgggcacgggtcctgggggggaggtatctgggctggtgtccctcaagacaggtggtaggctcgacatccacaggcagggggcagagacctcaggctgctaggcttctccagtcctggccctcctaaagcctctgtcggggactcccagttgaatagctttactggcagccaagatctgggaccccctgcaggcatagccctgcccattcagatgctattggcttagcacattgtagttagagcagatgatgctagcatgggtcggcagctgtctcctggggctcattgaaggggacagggtgtttcctcacaatacccaggagcgtccacaccaggccaggtgccctctcttccatctcactctgtctccttggccctgggatccaacccactctcatttctcccttcccagcaccatgtactggtcagactgggggaaccaccccaagattgaaacagcagcgatggatggcacccttcgggagactctcgtgcaagacaacattcagtggcctacaggtccctggggcaggggtagggtgtggaaggggcagactctgatcatggctgcttcagaagtcacccctgcgtgcagtggggcgggcaatctccagcagatcaggccgagggccatgggagtgcttcccggatgggcggctgggagagatcctatgagccgggtaggatacatgccgtggataccagacagagtcagctctgttctctgcgcccagcctggcgtgacagaagctgatctctgacagacagcattctctcaccccagggctggctgtggactatcacaatgaacggctctactgggcagatgccaagctttcggtcatcggcagcatccggctcaacggcactgaccccattgtggctgctgacagcaaacgaggtgagggtgctggcaggcttggttcccatcatggtccccaacatcatcatcaggcttctcactgagctcaaggatgtctcttcagaagcctggcacccagccagcccgtgagcctgcgcctacctgaccattttattcactctaccaacaagtatcaagttgtgtggggtcagcagggtaaatgaagggagagagagctaaagtcccccatggccccagaaatcttgggggtgatgagacaatttgccagtggcagggatagttctagatatgttaggtctgagacgcctacactgacaggtgtcttaaagactgggtccagggcccaggcgcctgtagtgacttaacctggctgtccctgcaccccaggcctaagtcaccccttcagcatcgatgtgtttgaagactacatctacggagtcacttacatcaataatcgtgtcttcaagatccacaagtttggacacagccccttgatcaacctaactgggggcctgagccatgcctctgatgtagtcctttaccatcaacacaagcagcctgaaggtgcatcagagggaaaacccggggtgtggcagggtgggtcagtgataaggagggtgccgggcagtggtggcgcatgcctttaatcccagcacttggaaggcagaggcaggcagatttctgagtttgaggccagcctggtctacagagtgagttccaaggcagacagggctacacagagaaaccatgtctctggaaaaaaaaaaaaaaaaaaggaaaatgttctaagtccacactgctcaacatcgaccccttccaacacccacagtgaccaacccctgtgaccgcaagaaatgtgaatggctgtgtctgctgagccccagcgggcctgtctgcacctgtcccaatggaaagaggctggataatggcacctgtgtgcctgtgccctctccaacaccccctccagatggtatgcatgcccttttcctgggtacctgaggatcccttacctatagcctctggctccccttacccttgacccccttccccttcccatgctctgatgagctcttactgcagcccctaggcctggaacctgcactctgcagtgcttcaatggtggtagttgtttcctcaacgctcggaggcagcccaagtgccgttgccagccccgttacacaggcgataagtgtgagctggatcagtgctgggaatactgtcacaacggaggcacctgtgcggcttccccatctggtatgcccccaaccagggatggtcctctcccatcatcctcacctggccccttctatcgcctccagcatccacttcaaccccatctgttcgtcaaggtgcctaggatccctgctataggcccaggtggtccccagtgccatggtcccactcacagatcctctcccaccaggcatgcccacgtgccgctgtcccactggcttcacgggccccaaatgcaccgcacaggtgtgtgcaggctactgctctaacaacagcacctgcaccgtcaaccagggcaaccagccccagtgccgatgtctacctggcttcctgggcgaccgttgccagtaccgtgagtattcacctcaaccccagggaaggaagaggggagccagaaagaacccaaaggagcaggttgagaggatggaagacgtacgcagatgagccaagcccaggctgtgggtgctgcctctcatgttggcgcatctgcctaagcctccaggcattcaacacaaggaatgcttagggtcatcctagtgttctggggtctgtgacagggcattaggaggctcaggagtgggtgggagttattcataagtcctggaccctgcataaggtacttcctctccactcccaaccacagggcagtgctctggcttctgtgagaactttggcacctgtcagatggctgctgatggctcccgacaatgtcgctgcaccgtctactttgagggaccaaggtgtgaggtgaacaagtgtagtcgctgtctccaaggcgcctgtgtggtcaataagcagaccggagatgtcacatgcaagtgagtggggggtcttgcctccacattctgctctgtcttctggccccgccccatcctgcccctcctgggcccgccccctctccgggcccttccggccccgcccctatcttgcccctcctggcccggttcctgttctagcatcccagatacccttctgcaagccccagctccagattttgattcctttccacagctgcactgatggccgggtagcccccagttgtctgacctgcatcgatcactgtagcaatggtggctcctgcaccatgaacagcaagatgatgcctgagtgccagtgagttggccccgccccatcaaatctgagcaaaggaacaatatgacctatgacctcctagttcctgcagctaaaatggtcgtggaggtgatgcccacccactgagttttgctttcttgcctgcaggtgcccgccccatatgacaggaccccggtgcgaggagcaggttgttagtcagcaacagcctgggcgtaagtggtggggagggcagggctgccacgacatagagcaagaagagccttacacctcccatctccctaggcttcagactcagtttcccgacttctctctccagatatggcctccatcctgatccctctgctgctgcttctcctgctgcttctggtggctggcgtggtgttctggtataagcggcgagtccgagggtgagccactgggagtctgagaaattctggctgttattttacaatccgataaccttaccaacatcacggttccctgactcctgcctctccccagggctaagggcttccagcaccagcggatgaccaatggggccatgaatgtggaaattggaaaccctacctacaagatgtatgaaggtggagagcccgatgatgtcgggggcctactggatgctgattttgcccttgaccctgacaaggtatgccagaggccatcgaaggggcttctggaacaggatcaaaggccggaggggtggggttggggtgatcaaggcaaccagaggtgttacacagaagtgggagctggggtattctaatcatatgaacctttttttttcccagcctaccaacttcaccaacccagtgtatgccacgctctacatggggggccacggcagccgccattccctggccagcacggacgagaagcgagaactgctgggccggggacctgaagacgagataggagatcccttggcatagggccctgccccgacggatgtccccagaaagccccctgccacatgagtctttcaatgaaccccctccccagccggcccttctccggccctgccgggtgtacaaatgtaaaaatgaaggaattactttttatatgtgagcgagcaagcgagcaagcacagtattatctctttgcatttccttcctgcctgctcctcagtatcccccccatgctgccttgagggggcggggagggctttgtggctcaaaggtatgaaggagtccacatgttccctaccgagcatacccctggaagctggcggcacggcctccccaccacgcctgtgcaagacactcaacggggctccgtgtcccagctttcctttccttggctctctggggttagttcaggggaggtggagtcctctgctgaccctgtctggaagatttggctctagctgaggaaggagtcttttagttgagggaagtcaccccaaaccccagctcccactttcaggggcacctctcagatggccatgctcagtatcccttccagacaggccctcccctctctagcgccccctctgtggctcctagggctgaacacattctttggtaactgtcccccaagcctcccatccccctgagggccaggaagagtcggggcacaccaaggaagggcaagcgggcagccccattttggggacgtgaacgttttaataatttttgctgaattcctttacaactaaataacacagatattgttataaataaaattgtaaaaaaggaaaaaaaaaagaaaagaaaagaaaagaaacccactgtgtctgcatgctaatgtgagaatttgggagctggggctgtgcttgcctgttccagccaccagagggagcattgctgcatgctggaggctggcctgagaatcctaaggtccacgtctccagccccactccatcctcctgtcttgctatggcagggaagagctgttttgctcagtgtatgaccttgagccttatgatgtgactggtaggatctggtgtcacccggccccagtgcattgactcagacatgtgcttcactgttctcctgccctacactggccccacagtgagatgccaccctagaaaaaagcacactgggtaatgaaggcctttaggaaggtctgctccatgctccttttgaaatgttgacatctcactctatgacctatgagtaaaaccctggctgttgggccagcagaatggctgggtgggcaaaacacttgactttgcaagcctggtagcctgcgtttgctcttggaacccatgtaagagtgggcaagaccaccgggcagtggtggcgaacgcctttaatccctgcacttaggaggcagaggcaggcggatttctgagttccaggacagccagagctacacagagaaaccctgtctcgaaaaacaacaacaacaacagcaaaaaaaaaaaaaaaaaaaaaaaaaaaaatgggcaggaccagctccgtaaaattattctctgacctccatatgtacgctttggcaaacacagaatttttttttttaattaaatacctgcattaggggatgagatagaggggaggagagccagcaaggctcagtttgcccatcagcttccgacatatgcctctctctcaacaaacattgcagacattccaggagttgaccaggaaaggacttacactatcttagttgttccagatctccttgaacctctttcaaaggggaatgaaccccttgcggaagactatgcagctttacactgtccaggactgggggagggttagaaccctgctcttctaacagcagcaaacaatgcctcccaaaggagctgtccagcttttcatctctgaccctcccagggtatttctcctttgaatcctcccctcggggaagcttatgggtagatgaacatccaaagacaagaccctccttttctatcatcaattttatctccaacctcatccctgaagcccggctatgagatcttccttgctcctccagactccttatgactctgggatgagcgatcctgctgggaataaaatgggggtgggggtgggggttgggggggggtcattgttgatccttaaatgttgacttgtggctctttctggccaccaggtggcgtctacactgctgtaacactgcttatcctaaagctccccacactaattatgcacctgctgccgaggaccctagcccagcctctcacttccttccctggggctattttgcgctgacccttctaccctctgtcagccatcttccttccctcccccagagtctgctcattccccaccaccagtaatcccaccctctccaccccttccttctgccagcctgcatctgtagccccccccccccccggagccactgattctctgcctgtcacctcaagatctcgggtagaacaagacaggcccccaactgctgctttagaaagcctaccccttcgttagcaccctccctctctggccaggaccagaagggtgcactatcttcaaccaagccaaatgcaagggagtctcaaaaaccaaaaaggacactgactgattcagatcagattgaaaagcagatattcttagatggaaagagtcagggacagaggcaaagacccagagataagtactgtgcacatgtgtgtatgtgtgcatgcacttgtaatctctgagagaattggacggcctgagattagctaaaacgatggtgatggggagggtcaggtctcctacagatagatactttggccgtgggcttctaggcacccaggatgtgtgaccaccctttgccttcacccagaactaaagcagctcctttgcttagggtcagccctggccagccatttggccttgtccctgacactttgtctcatcctgcctttattcgttcagccctgactgcaccccaaatcgctgctccctggtttttgtctccttgagtgtcaccaagtacacccctgtcctttccctgaccctcttttcagtgtctgtcacttcctgtgtgtctgttattttcatatccctaggcttgtctttcagattgcctgtgtgtgtgtgtgtgtgtgtgtgtgtgtgtgtgtgtgtgtgtccctgtaggtatttgcctctgtcaaggcaagaggtactttgggtacctagctgtttctgtatatcactgtatgctactgtgtgtataaatcatgtgtgtccgtctctgtgtgcttatgtgcctctgtgtatgctggtctgtatgtgaagtggcctcactgctacagtgtagcagggtactattacagtggggtaagcctggagacacaccttgggatgtgtgtctgtctcttcatctctttgcatggtcctatctcttgctgtctaggtgttggtcatactacctactcagcctcagacacagcgcatagcaacagctgacagctgaagactccctgggtaggggagagagagaaagaccagtgggaggaggaaacacgaagaaacagccctgaggatgagaacagagaccgtgctggagctggggacagagagagacaaggacagagatagacagggaaggggacgggatgagaagagctgagagtggaagatgggattgtgggagagaaagcacagggctcgtaccaagaggggcagaaggcactgaggacttcctgcctagcaccaaacaagggtgctctggatcaggccagggtcaacagtgcggatcaggggctaacttaaaagagccggtttagccaaggggtccgggggccgcagaggtgccgcggggcggggacagggcggcgggcgccgtttgtcagccctattgacagacgtgatggggtttccgtccgtgatcaatgattctcatctccaggccgaatgagccgcggggcgcccatccatccccgtcagcgccgcgctcagtgctagtcgcccgaggccccgcccgccctcacctcggtccctgtccggatcactgccctagacctacctctgccaggattatagaaacaccccccacccatccacctcgggcatcacaggacagggtcctgctgcgttccctagcctgtgtatgggaactcatgctccgcgacgaccccttcccgctcacagttcagggcctagagtcccacgccctattgtagccctcatctgccccaagacctggcgtctttggggtgctgctccccaaaccccttgcccctctccagcttcacacctgagccaggggtgtgtccagggtgtgtcacggtgaaagtcaccttccttgcccccagctgggcgggagggggcgcgcggggcgcggccgggnnnnnnnnnnnnnnnnnnnnnnnnnnnnnnnnnnnnnnnnnnnnnnnnnnnnnnnnnnnncagacccaactttctcccccgcccgcgccccgcccccagcgccttgctccgctccgcgctcagtccgcgggccgagccgcccgctcccgctgctcgcgccgccgccctctgcccggcgtccctcaccctgagcccagtcctgccggactcgggacccgccctgcccgacccgctcgaccgctcgggaagatgcggctgctcccggaatggctcctcttgctctttggtccttggctccttaggaaggtaagggtggcagagccaaggtgcggggtccgggacacgaagaacactgcatgccagggggctccgcgcgtccgccccgcccccagcactaagcgtcccaactttgtgcgtcgtgggggacgtggacagacagactgcccgctttaggactggcatgcacccagcaagttggctgagggttagaagaaggtgcagggtggaggcccggctccagtcggattcaggcgcgacggggggaggggacgaagcgcgacccgcgagtgcgccagacagagaaggagtgcgagacagacagacaagccagcgggtgttagcctagccttctttccgcacctacctcgcttgcctccctctgtctgtctgtctgtccttccacctctcaccctccaccttcccattcctcttctccttgtcacaatgccaggtaagctctgcgatccgagcatacattatccaggcacacgcgcttacacggacccacaccagcagggctgaacttggctacaatcttccatcccatttcccgcggagacaccatctcccctgcataacctcacagacacacccccctctcacgcctggtggttgttgtctgggaggggagtctctccttacatctccttcctgcccccacccttctcactgtctcttttcctggggtttctgggtgaagacccaaaggctaaaagggcccagagctcatcctgcccgactcttgccttgagatcttcagcccatatgggctcacagtgcggacatggagtgtatgggttaaaaccagcccttgtatgcatgtgtccagggaatccaggcactgggacccaaggtgaatgtctatgttggcatgccatggtggagacattgtctttgcatggttgattgtgcctgcttcaaagcactgccatctatttgtgccctgaagtgtgacccacaagggtagtttagactctgcccccaacttcctttctcaactatgacctacccagtttaagggcaaccagttggctccacaagccctcactcttggacctcaatccccagtctttaagagaaaccagtaattctcctccaaaacgcttggaccccaggcctggtgtggtgtcctcataacaacaatagggtagacactgccccagtgagccagttagtagagcccttggattctcccaagcctatctgcctagtgaccttgagagaacggaaactgggcaataaataaataaataaataagaaagaatgaacgaatggatggatggatggatggatggatggatggatggaaaaaaaagaaagaaaagaaaatagccccctagtgtgaaaaatgctgcctttggcaagagctttctttgaacctgaggcctggtttgtacccagggagactgcaggagaaggtccagccccaaacaaaccacagtatgtgaaggcctggggtcacagaggaaggaaggatacattgccctgatccttccctccacccccaccagccttctccactctcttcgcatcaaattaactcccctgtggacagatctggtttaatttcctttgccccctgaagaggaaggaaacatctggtagagccttgagggagagtaagcatgaggatgataggagagatgggaatctgtcttcctgtgagaaggctgcagctgtggggtggctatgtcggaatcagcagggaagtgcctatctggcatttggtccagcctgtggacatgtgagggtctatgtttatgtttggtttctgaatacctgttactttgcatagggtcatgtaaggaaatctgttctccaatggacttaggagaaaaacagtggggcgtgtgcacatgcacagaacccccacccccggggtctctgatgtatttgcatgctggaacacatctgtttttttgcctgtgaatctgggtctgggagtgtgctcatagcttcaagtgccagcaatcacggattgtgagcctcagaagggctcacctgattgtgaacgcatacgtgcactcctgagtgtgcctgcgtccagggatatcttgatgccagaattgggagtgagcatgagataaagctgacactgggttgagcttttgatgggcacagctcttgagatggctcttggggaaatcttgaccatcgatgctgcccgccctgccttcccgaggacttctctgcttcttcctctactttccagctcctgagactcctcacacgttctggttcccctggtttccattgcatctagggctctgacttctggactgaactggctgctcaggatctttccaatacaatcttcaacctcctttccctccgtatctctgtcttccttgccccttgccaaagcagctgcctactgggaaaaacagcaggcgatcaatagtcactaatcactaatcactaattactaattagctgggggagggcaggggcgggggtcctgtgggacttttcagctctatcctgcctcagggaaggattacagctacacctctctctctctctctctctctctctctctctctctctctctctctctctctctctctctctctcggtctagaccagccacaacccttgtgccaaccaccacctcctacctccttaccctcctcaagccccctaactaatctctggctgggccacttaggcacgcacagcctgggcttggtcccagcgctgctggctgggatttgggggtaatcaggggcggcagctgggccagggatactggaggatggagtctaaagtgacagcccccttgggccagagcttgcagctaaacctcacatcctgaatgggaggggcgccactggaaaggagaatttccagggggtcatggttgggctgggtgaggagctagatagagctctagaaggaggcgatggtgaagatgtttgataagaaagcagacagcaggtaaagaggagtcactggggtcagggacccatggtcagagagtggcaagataaaccttgataagccagcaggtaggtgaagggacccttggaggggtcactaaggattaattggcaaggcgctagggaacttcgaatagggagaaccctgtaaccaaggataggcgtgggcaaggggacaaggttaacagagaaagggtcaggttgtgatgagaggttttctggttcaagctcaaaggggctcccaagatgtacagtagaaaaagcgaaccgggatagggagctgggagtgcggccttgagcactggaaattggcgagtctccccttctcccctgcccgcccctcctccacctctaccccgcccactccccctacggctcaggcttcgggaaattacatccccgctccgcggctcccccccccccccaccgcgccctggagccggcgcctttataggcacatttattgcaataataaagtgaggcgcggggcggggggcggggggcagccattcccggggggaccgcgccggctctaggaagcaaggaaataaaataaaataaaataaaatcaaaattcagataacggtgagccttgcgcagcaggccgcgggcaggcgagagggtggggctgcggaggagagggcgattggcccaaggacagagcccacctcaccagcaggccctcacccctgctctgtagaagaggtctttgcctccacttgcctgaccccctcccaaacttgatgttgaagctggccttctgccttttcctgtctcctccaaatacctgtcctcaagctcctgtctgtttccatactgcctgtcactttcctggttcccgagatttcccatgccagccccccccccccagtggctccccctaccctatctcctgggtctctatccatcagcatcctgttttcttcttaaaagccatcttccttcctccctttctgctttattccatcctgcccccatgactgtctccccaaaccatcttcaatgccagccagtctccagagtccatttgtcattgaccatgactgccccacttcagctcccagcctccatcttctggtcccctgaccagaggccttctaggtctctgcctaatacctggtcatcatttccaatctctccactcttgtccccaggtctatccttgtgggagcctcatcctcatatcctatgctcctacccaaccctagccccagaccatctctgccctaatgctcacctcagcccgtcctgtcttgtccacccacaccctgacatacacgccagctttattcccagctcccagccagacgtcaccccaccctgacctgactgcagagatgactctcaannnnnnnnnnnnnnnnnnnnnnnnnnnnnnnnnnnnnnnnnnnnnnnnnnnnnnnnnnnnnnnnnnnnnnnnnnnnnnnnnnnnnnnnnnnnnnnnnnnnnnnnnnnnnnnnnnnnnnnnnnnnnnnnnnnnnnnnnnnnnnnnnnnnnnnnnnnnnnnnnnnnnnnnnnnnnnnnnnnnnnnnnnnnnnnnnnnnnnnnnnnnnnnnnnnnnnnnnnnnnnnnnnnnnnnnnnnnnnnnnnnnnnnnnnnnnnnnnnnnnnnnnnnnnnnnnnnnnnnnnnnnnnnnnnnnnnnnnnnnnnnnnnnnnnnnnnnnnnnnnnnnnnnnnnnnnnnnnnnnnnnnnnnnnnnnnnnnnnnnnnnnnnnnnnnnnnnnnnnnnnnnnnnnnnnnnnnnnnnnnnnnnnnnnnnnnnnnnnnnnnnnnnnnnnnnnnnnnnnnnnnnnnnnnnnnnnnnnnnnnnnnnnnnnnnnnnnnnnnnnnnnnnnnnnnnnnnnnnnnnnnnnnnnnnnnnnnnnnnnnnnnnnnnnnnnnnnnnnnnnnnnnnnnnnnnnnnnnnnnnnnnnnnnnnnnnnnnnnnnnnnnnnnnnnnnnnnnnnnnnnnnnnnnnnnnnnnnnnnnnnnnnnnnnnnnnnnnnnnnnnnnnnnnnnnnnnnnnnnnnnnnnnnnnnnnnnnnnnnnnnnnnnnnnnnnnnnnnnnnnnnnnnnnnnnnnnnnnnnnnnnnnnnnnnnnnnnnnnnnnnnnnnnnnnnnnnnnnnnnnnnnnnnnnnnnnnnnnnnnnnnnnnnnnnnnnnnnnnnnnnnnnnnnnnnnnnnnnnagggagagtgagcgtgagcgatcaaggaagccagaggaggattttattttattttattccgtgttcccatttctcggctcgtttccttccagactctcacccctcccggtccgagcttcccacccccaaggtcgcttcagctgcctctctccccaactcttcccttttatcttagctcactccagcagtgggtgggggctgtgggtaccaaagcccagggatttgccaggatcacagaagcagagacagcaatttgtctgggatcagaggtggggggacatcctggcacctctctctgccctgtcaaacctcactccctacccccaccccacccccaatctcttcctctgaagagactgagcctaccagccctgagcaggtccctcccgggattgggtgcagggcagaaagtactaggatgtcctaggaagtagtagcttggagacatttgatgtcctagcattgagcgcttgggggcagggggtggggggtggaccagctggaaataggactttactggggtttggtccagagtgggagggggagagacccaccctttggctttccctgaagcctcacccaatcctacctctaacaccccccagggggttcagttccacctccccagcttcttccctgcccccatctccatcctaagcctctgtccctggccctactcaggtacaccctctgggcgtaagatgccagctcaagcttgtctgcgtgagtcaatcactctctgccacctccaccgccctcacctggggtgggaggagggctggataggagaagaaatgaggggggcaataaatatgtatgacgagcggatggcggcagcattaataacccgggatagcagcatcgcggggacggagaccagccagtagagattctagcccagctcggccattcctgtcctctgtggacacagtgtatatatagacttgggtgtgtgcaaacggaggggtcacctgtacttcagaatcctttacccgtctatcctcagcctgcaagtcgctggtaggaaaatacatgccgtgtgtgtgtgtgtgtgt

SEQ ID NO: 471 - DNA, 14838 bp, Mus musculus
cgagctccaggccagtgcactgaggaggcggaaacgggggagcccctagtgctccatcaggcccctaccaaggcacccccatcgggtccacgccccccaccccccaccccgcctcctcccaattgtgcatttttgcagccggaggcggctccgagatggggctgtgagcttcgccctgggagggggagaggagcgaggagtaaagcaggggtgaagggttcgaatttgggggcagggggcgcacccgcgtcagcaggcccttcccagggggctcggaactgtaccatttcacctatgcccctggttcgctttgcttaaggaaaggataagaatagaagagtcggggagaggaagataaagggggaccccccaattggggggggggcgaggacaagaagtaacaggaccagagggtgggggctgctgtttgcatcggcccacaccatgctgaccccgccgttgctgctgctgctgccgctgctttcagctctggtctccggggccactatggatgcccctaaaacttgcagccctaagcagtttgcctgcagagaccaaatcacctgtatctcaaagggctggcggtgtgacggtgaaagagattgccccgacggctctgatgaagcccctgagatctgtccacagagtaaagcccagagatgcccgccaaatgagcacagttgtctggggactgagctatgtgtccccatgtctcgtctctgcaacgggatccaggactgcatggatggctcagacgagggtgctcactgccgagagctccgagccaactgttctcgaatgggttgtcaacaccattgtgtacctacacccagtgggcccacgtgctactgtaacagcagcttccagctgcaggcagatggcaagacgtgcaaagattttgacgagtgttccgtgtatggcacctgcagccagctttgcaccaacacagatggctccttcacatgtggctgtgttgaaggctacctgctgcaaccggacaaccgctcctgcaaggccaagaatgagccagtagatcggccgccagtgctactgattgccaactctcagaacatcctagctacgtacctgagtggggcccaagtgtctaccatcacacccaccagcacccgacaaaccacggccatggacttcagttatgccaatgagactgtatgctgggtgcacgttggggacagtgctgcccagacacagctcaagtgtgcccggatgcctggcctgaagggctttgtggatgagcataccatcaacatctccctcagcctgcaccacgtggagcagatggcaatcgactggctgacgggaaacttctactttgtcgacgacattgacgacaggatctttgtctgtaaccgaaacggggacacctgtgtcactctgctggacctggaactctacaaccccaaaggcatcgccttggaccccgccatggggaaggtgttcttcactgactacgggcagatcccaaaggtggagcgctgtgacatggatggacagaaccgcaccaagctggtggatagcaagatcgtgtttccacacggcatcaccctggacctggtcagccgcctcgtctactgggcggacgcctacctagactacatcgaggtggtagactacgaagggaagggtcggcagaccatcatccaaggcatcctgatcgagcacctgtacggcctgaccgtgtttgagaactatctctacgccaccaactcggacaatgccaacacgcagcagaagacgagcgtgatccgagtgaaccggttcaacagtactgagtaccaggtcgtcacccgtgtggacaagggtggtgccctgcatatctaccaccagcgacgccagccccgagtgcggagtcacgcctgtgagaatgaccagtacgggaagccaggtggctgctccgacatctgcctcctggccaacagtcacaaggcaaggacctgcaggtgcaggtctggcttcagcctgggaagtgatgggaagtcttgtaagaaacctgaacatgagctgttcctcgtgtatggcaagggccgaccaggcatcattagaggcatggacatgggggccaaggtcccagatgagcacatgatccccatcgagaaccttatgaatccacgcgctctggacttccacgccgagaccggcttcatctactttgctgacaccaccagctacctcattggccgccagaaaattgatggcacggagagagagactatcctgaaggatggcatccacaatgtggagggcgtagccgtggactggatgggagacaatctttactggactgatgatggccccaagaagaccattagtgtggccaggctggagaaagccgctcagacccggaagactctaattgagggcaagatgacacaccccagggccattgtagtggatccactcaatgggtggatgtactggacagactgggaggaggaccccaaggacagtcggcgagggcggctcgagagggcttggatggacggctcacaccgagatatctttgtcacctccaagacagtgctttggcccaatgggctaagcctggatatcccagccggacgcctctactgggtggatgccttctatgaccgaattgagaccatactgctcaatggcacagaccggaagattgtatatgagggtcctgaactgaatcatgccttcggcctgtgtcaccatggcaactacctcttttggaccgagtaccggagcggcagcgtctaccgcttggaacggggcgtggcaggcgcaccgcccactgtgacccttctgcgcagcgagagaccgcctatctttgagatccgaatgtacgacgcgcagcagcagcaagtgggtaccaacaaatgccgggtaaataacggaggctgcagcagcctgtgcctcgccacccccgggagccgccagtgtgcctgtgccgaggaccaggtgttggacacagatggtgtcacctgcttggcgaacccatcctacgtgcccccaccccagtgccagccgggcgagtttgcctgtgccaacaaccgctgcatccaggagcgctggaagtgtgacggagacaacgactgtctggacaacagcgatgaggccccagcactgtgccatcaacacacctgtccctcggaccgattcaagtgtgagaacaaccggtgtatccccaaccgctggctctgtgatggggataatgattgtggcaacagcgaggacgaatccaatgccacgtgctcagcccgcacctgtccacccaaccagttctcctgtgccagtggccgatgcattcctatctcatggacctgtgatctggatgatgactgtggggaccggtccgatgagtcagcctcatgcgcctaccccacctgcttccccctgactcaatttacctgcaacaatggcagatgtattaacatcaactggcggtgtgacaacgacaatgactgtggggacaacagcgacgaagccggctgcagtcactcctgctccagtacccagttcaagtgcaacagtggcagatgcatccccgagcactggacgtgtgatggggacaatgattgtggggactacagcgacgagacacacgccaactgtaccaaccaggctacaagacctcctggtggctgccactcggatgagttccagtgccgcctagatggcctgtgcatccccctgaggtggcgctgcgacggggacaccgactgcatggattccagcgatgagaagagctgtgagggcgtgacccatgtttgtgacccgaatgtcaagtttggctgcaaggactccgcccggtgcatcagcaaggcgtgggtgtgtgatggcgacagcgactgtgaagataactccgacgaggagaactgtgaggccctggcctgcaggccaccctcccatccctgcgccaacaacacctctgtctgcctgcctcctgacaagctgtgcgacggcaaggatgactgtggagacggctcggatgagggcgagctctgtgaccagtgttctctgaataatggtggctgtagtcacaactgctcggtggcccctggtgaaggcatcgtgtgctcttgccctctgggcatggagctgggctctgacaaccacacctgccagatccagagctactgtgccaagcacctcaaatgcagccagaagtgtgaccagaacaagttcagtgtgaagtgctcctgctacgagggctgggtcttggagcctgacggggaaagctgccgcagtctggatcccttcaaaccgttcatcatcttctccaaccgccacgagatcaggcgcattgaccttcacaagggggactacagcgtcctagtgcctggcctgcgcaacactattgccctggacttccacctcagccagagtgccctctactggaccgacgtggtagaggacaagatctaccgtgggaaactcctggacaacggagccctgaccagctttgaggtggtgattcagtatggcttggccacaccagagggcctggctgtagattggattgcaggcaacatctactgggtggagagcaacctggaccagatcgaagtggccaagctggacggaaccctccgaaccactctgctggcgggtgacattgagcacccgagggccatcgctctggaccctcgggatgggattctgttttggacagactgggatgccagcctgccacgaatcgaggctgcatccatgagtggggctggccgccgaaccatccaccgggagacaggctctgggggctggcccaacgggctcaccgtggattacctggagaagcgcatcctctggattgatgctaggtcagatgccatctattcagcccggtatgacggctccggccacatggaggtgcttcggggacacgagttcctgtcacacccatttgccgtgacactgtacggtggggaggtgtactggaccgactggcgaacaaatacactggctaaggccaacaagtggactggccacaacgtcaccgtggtacagaggaccaacacccagcccttcgacctgcaggtgtatcacccttcccggcagcccatggctccaaacccatgtgaggccaatggcggccggggcccctgttcccatctgtgcctcatcaactacaaccggaccgtctcctgcgcctgtccccacctcatgaagctgcacaaggacaacaccacctgctatgagtttaagaagttcctgctgtacgcacgtcagatggagatccggggcgtggacctggatgccccgtactacaattatatcatctccttcacggtgcctgatatcgacaatgtcacggtgctggactatgatgcccgagagcagcgagtttactggtctgatgtgcggactcaagccatcaaaagggcatttatcaacggcactggcgtggagaccgttgtctctgcagacttgcccaacgcccacgggctggctgtggactgggtctcccgaaatctgttttggacaagttacgacaccaacaagaagcagattaacgtggcccggctggacggctccttcaagaatgcggtggtgcagggcctggagcagccccacggcctggtcgtccacccgcttcgtggcaagctctactggactgatggggacaacatcagcatggccaacatggatgggagcaaccacactctgctcttcagtggccagaagggccctgtggggttggccattgacttccctgagagcaaactctactggatcagctctgggaaccacacaatcaaccgttgcaatctggatgggagcgagctggaggtcatcgacaccatgcggagccagctgggcaaggccactgccctggccatcatgggggacaagctgtggtgggcagatcaggtgtcagagaagatgggcacgtgcaacaaagccgatggctctgggtccgtggtgctgcggaacagtaccacgttggttatgcacatgaaggtgtatgacgagagcatccagctagagcatgagggcaccaacccctgcagtgtcaacaacggagactgttcccagctctgcctgccaacatcagagacgactcgctcctgtatgtgtacagccggttacagcctccggagcggacagcaggcctgtgagggtgtgggctcttttctcctgtactctgtacatgagggaattcgggggattccactagatcccaatgacaagtcggatgccctggtcccagtgtccggaacttcactggctgtcggaatcgacttccatgccgaaaatgacactatttattgggtggatatgggcctaagcaccatcagcagggccaagcgtgaccagacatggcgagaggatgtggtgaccaacggtattggccgtgtggagggcatcgcggtggactggatcgcaggcaacatatactggacggaccagggcttcgatgtcatcgaggttgcccggctcaatggctcttttcgttatgtggtcatttcccagggtctggacaagcctcgggccatcactgtccacccagagaaggggtacttgttctggaccgagtggggtcattacccacgtattgagcggtctcgccttgatggcacagagagagtggtgttggttaatgtcagcatcagctggcccaatggcatctcagtagactatcagggcggcaagctctactggtgtgatgctcggatggacaagatcgagcgcatcgacctggaaacgggcgagaaccgggaggtggtcctgtccagcaataacatggatatgttctccgtgtccgtgtttgaggacttcatctactggagtgacagaactcacgccaatggctccatcaagcgcggctgcaaagacaatgctacagactccgtgcctctgaggacaggcattggtgttcagcttaaagacatcaaggtcttcaacagggacaggcagaagggtaccaatgtgtgcgcggtagccaacggcgggtgccagcagctctgcttgtatcggggtggcggacagcgagcctgtgcctgtgcccacgggatgctggcagaagacggggcctcatgccgagagtacgctggctacctgctctactcagagcggaccatcctcaagagcatccacctgtcggatgagcgtaacctcaacgcaccggtgcagccctttgaagaccccgagcacatgaaaaatgtcatcgccctggcctttgactaccgagcaggcacctccccggggacccctaaccgcatcttcttcagtgacatccactttgggaacatccagcagatcaatgacgatggctcgggcaggaccaccatcgtggaaaatgtgggctctgtggaaggcctggcctatcaccgtggctgggacacactgtactggacaagctacaccacatccaccatcacccgccacaccgtggaccagactcgcccaggggccttcgagagggagacagtcatcaccatgtccggagacgaccacccgagagcctttgtgctggatgagtgccagaacctgatgttctggaccaattggaacgagctccatccaagcatcatgcgggcagccctatccggagccaacgtcctgaccctcattgagaaggacatccgcacgcccaatgggttggccatcgaccaccgggcggagaagctgtacttctcggatgccaccttggacaagatcgagcgctgcgagtacgacggctcccaccgctatgtgatcctaaagtcggagcccgtccacccctttgggttggcggtgtacggagagcacattttctggactgactgggtgcggcgggctgtgcagcgagccaacaagtatgtgggcagcgacatgaagctgcttcgggtggacattccccagcaacccatgggcatcatcgccgtggccaacgacaccaacagctgtgaactctccccctgccgtatcaacaatggaggctgccaggatctgtgtctgctcacccaccaaggccacgtcaactgttcctgtcgagggggccggatcctccaggaggacttcacctgccgggctgtgaactcttcttgtcgggcacaagatgagtttgagtgtgccaatggggaatgtatcagcttcagcctcacctgtgatggcgtctcccactgcaaggacaagtccgatgagaagccctcctactgcaactcacgccgctgcaagaagactttccgccagtgtaacaatggccgctgtgtatccaacatgctgtggtgcaatggggtggatgactgtggggatggctctgatgagataccttgcaacaagactgcctgtggtgtgggtgagttccgctgccgggatgggtcctgcatcgggaactccagtcgctgcaaccagtttgtggattgtgaggatgcctcggatgagatgaattgcagtaccacagactgcagcagctatttccgcctgggcgtgaaaggtgtcctcttccagccgtgcgagcggacatccctgtgctacgcacctagctgggtgtgtgatggcgccaacgactgtggagactacagcgatgaacgtgactgtccaggtgtgaagcgccctaggtgcccgctcaattactttgcctgccccagcgggcgctgtatccccatgagctggacgtgtgacaaggaggatgactgtgagaacggcgaggacgagacccactgcaacaagttctgctcagaggcacagttcgagtgccagaaccaccggtgtatctccaagcagtggctgtgtgacggtagcgatgattgcggggatggctccgatgaggcagctcactgtgaaggcaagacatgtggcccctcctccttctcctgtcccggcacccacgtgtgtgtccctgagcgctggctctgtgatggcgacaaggactgtaccgatggcgcggatgagagtgtcactgctggctgcctgtacaacagcacctgtgatgaccgtgagttcatgtgccagaaccgcttgtgtattcccaagcatttcgtgtgcgaccatgaccgtgactgtgctgatggctctgatgaatcccctgagtgtgagtacccaacctgcggccccaatgaattccgctgtgccaatgggcgttgtctgagctcccgtcagtgggaatgtgatggggagaatgactgtcacgaccacagcgatgaggctcccaagaacccacactgcaccagcccagagcacaaatgcaatgcctcatcacagttcctgtgcagcagcgggcgctgcgtggctgaggcgttgctctgcaacggccaggacgactgtggggacggttcagacgaacgcgggtgccatgtcaacgagtgtctcagccgcaagctcagtggctgcagtcaggactgcgaggacctcaagataggctttaagtgccgctgtcgcccgggcttccggctaaaggacgatggcaggacctgtgccgacctggatgagtgcagcaccaccttcccctgcagccagctctgcatcaacacccacggaagttacaagtgtctgtgtgtggagggctatgcaccccgtggcggtgacccccacagctgcaaagctgtgaccgatgaggagccatttctcatctttgccaaccggtactacctgcggaagctcaacctggacggctccaactacacactgcttaagcagggcctgaacaatgcggtcgccttggactttgactaccgagagcagatgatctactggacggacgtgaccacccagggcagcatgattcgcaggatgcacctcaacggcagcaacgtgcaggttctgcaccggacgggccttagtaacccagatgggctggctgtggactgggtgggtggcaacctgtactggtgtgacaagggcagagataccattgaggtgtccaagcttaacggggcctatcggacagtgctggtcagctctggcctccgggagcccagagctctggtagtggatgtacagaatgggtacctgtactggacagactggggtgaccactcactgatcggccggattggcatggatggatctggccgcagcatcatcgtggacactaagatcacatggcccaatggcctgaccgtggactacgtcacggaacgcatctactgggctgacgcccgtgaggactacattgagttcgccagcctggatggctccaaccgtcacgttgtgctgagccaagacatcccacacatctttgcgctgaccctatttgaagactacgtctactggacagactgggaaacgaagtccatcaaccgggcccacaagaccacgggtgccaacaaaacactcctcatcagcaccctgcaccggcccatggacttacatgtattccacgccctgcgccagccagatgtgcccaatcacccctgcaaagtcaacaatggtggctgcagcaacctgtgcctgctgtcccctgggggtggtcataaatgcgcctgccccaccaacttctatctgggtggcgatggccgtacctgtgtgtccaactgcacagcaagccagtttgtgtgcaaaaatgacaagtgcatccccttctggtggaagtgtgacacggaggacgactgtggggatcactcagacgagcctccagactgtcccgagttcaagtgccgcccaggccagttccagtgctccaccggcatctgcaccaaccctgccttcatctgtgatggggacaatgactgccaagacaatagtgacgaggccaattgcgacattcacgtctgcttgcccagccaattcaagtgcaccaacaccaaccgctgcattcctggcatcttccgttgcaatgggcaggacaactgcggggacggcgaggatgagcgggattgccctgaggtgacctgcgcccccaaccagttccagtgctccatcaccaagcgctgcatccctcgcgtctgggtctgtgacagggataatgactgtgtggacggcagtgatgagcctgccaactgtacccaaatgacctgtggagtggatgagttccgctgcaaggattctggccgctgcatccccgcgcgctggaagtgtgacggagaagatgactgtggggatggttcagatgagcccaaggaagagtgtgatgagcgcacctgtgagccataccagttccgctgcaaaaacaaccgctgtgtcccaggccgttggcaatgtgactacgacaacgactgcggagataactcggacgaggagagctgcacacctcggccctgctctgagagtgagttttcctgtgccaatggccgctgcatcgctgggcgctggaagtgtgatggggaccatgactgtgccgacggctcagacgagaaagactgcaccccccgctgtgatatggaccagttccagtgcaagagtggccactgcatccccctgcgctggcgctgtgacgcggatgctgactgtatggacggcagtgacgaggaagcctgtggcactggggtgaggacctgcccattggatgagtttcaatgtaacaacaccttgtgcaagccgctggcctggaagtgtgatggagaggacgactgtggggacaactcagatgagaaccccgaggaatgcgcccggttcatctgccctcccaaccggcctttccgctgcaagaatgaccgagtctgcctgtggattgggcgccagtgtgatggcgtggacaactgtggagatgggactgacgaggaggactgtgagccccccacggcccagaacccccactgcaaagacaagaaggagttcctgtgccgaaaccagcgctgtctatcatcctccctgcgctgtaacatgttcgatgactgcggcgatggctccgatgaagaagattgcagcatcgaccccaagctgaccagctgtgccaccaatgccagcatgtgtggggacgaagctcgttgtgtgcgcactgagaaagctgcctactgtgcctgccgctcgggcttccatactgtgccgggccagcccggatgccaggacatcaacgagtgcctgcgctttggtacctgctctcagctctgcaacaacaccaagggaggccacctctgcagctgtgcccgcaacttcatgaagacacacaacacctgcaaagctgaaggctccgagtaccaggtgctatacatcgcggatgacaacgagatccgcagcttgttcccgggccacccccactcagcctacgagcagacattccagggcgatgagagtgtccgcatagatgccatggatgtccatgtcaaggccggccgtgtctactggactaactggcacacgggcacaatctcctacaggagcctgccccctgccgcccctcctaccacttccaaccgccaccggaggcagatcgaccggggtgtcacccacctcaatatttcagggctgaagatgccgaggggtatcgctatcgactgggtggccgggaatgtgtactggaccgattccggccgagacgtgattgaggtggcgcaaatgaagggcgagaaccgcaagacgctcatctcgggcatgattgatgagccccatgccatcgtggtggaccctctgaggggcaccatgtactggtcagactgggggaaccaccccaagattgaaacagcagcgatggatggcacccttcgggagactctcgtgcaagacaacattcagtggcctacagggctggctgtggactatcacaatgaacggctctactgggcagatgccaagctttcggtcatcggcagcatccggctcaacggcactgaccccattgtggctgctgacagcaaacgaggcctaagtcaccccttcagcatcgatgtgtttgaagactacatctacggagtcacttacatcaataatcgtgtcttcaagatccacaagtttggacacagccccttgatcaacctaactgggggcctgagccatgcctctgatgtagtcctttaccatcaacacaagcagcctgaagtgaccaacccctgtgaccgcaagaaatgtgaatggctgtgtctgctgagccccagcgggcctgtctgcacctgtcccaatggaaagaggctggataatggcacctgtgtgcctgtgccctctccaacaccccctccagatgcccctaggcctggaacctgcactctgcagtgcttcaatggtggtagttgtttcctcaacgctcggaggcagcccaagtgccgttgccagccccgttacacaggcgataagtgtgagctggatcagtgctgggaatactgtcacaacggaggcacctgtgcggcttccccatctggcatgcccacgtgccgctgtcccactggcttcacgggccccaaatgcaccgcacaggtgtgtgcaggctactgctctaacaacagcacctgcaccgtcaaccagggcaaccagccccagtgccgatgtctacctggcttcctgggcgaccgttgccagtaccggcagtgctctggcttctgtgagaactttggcacctgtcagatggctgctgatggctcccgacaatgtcgctgcaccgtctactttgagggaccaaggtgtgaggtgaacaagtgtagtcgctgtctccaaggcgcctgtgtggtcaataagcagaccggagatgtcacatgcaactgcactgatggccgggtagcccccagttgtctgacctgcatcgatcactgtagcaatggtggctcctgcaccatgaacagcaagatgatgcctgagtgccagtgcccgccccatatgacaggaccccggtgcgaggagcaggttgttagtcagcaacagcctgggcatatggcctccatcctgatccctctgctgctgcttctcctgctgcttctggtggctggcgtggtgttctggtataagcggcgagtccgaggggctaagggcttccagcaccagcggatgaccaatggggccatgaatgtggaaattggaaaccctacctacaagatgtatgaaggtggagagcccgatgatgtcgggggcctactggatgctgattttgcccttgaccctgacaagcctaccaacttcaccaacccagtgtatgccacgctctacatggggggccacggcagccgccattccctggccagcacggacgagaagcgagaactgctgggccggggacctgaagacgagataggagatcccttggcatagggccctgccccgacggatgtccccagaaagccccctgccacatgagtctttcaatgaaccccctccccagccggcccttctccggccctgccgggtgtacaaatgtaaaaatgaaggaattactttttatatgtgagcgagcaagcgagcaagcacagtattatctctttgcatttccttcctgcctgctcctcagtatcccccccatgctgccttgagggggcggggagggctttgtggctcaaaggtatgaaggagtccacatgttccctaccgagcatacccctggaagctggcggcacggcctccccaccacgcctgtgcaagacactcaacggggctccgtgtcccagctttcctttccttggctctctggggttagttcaggggaggtggagtcctctgctgaccctgtctggaagatttggctctagctgaggaaggagtcttttagttgagggaagtcaccccaaaccccagctcccactttcaggggcacctctcagatggccatgctcagtatcccttccagacaggccctcccctctctagcgccccctctgtggctcctagggctgaacacattctttggtaactgtcccccaagcctcccatccccctgagggccaggaagagtcggggcacaccaaggaagggcaagcgggcagccccattttggggacgtgaacgttttaataatttttgctgaattcctttacaactaaataacacagatattgttataaataaaattgt

SEQ ID NO: 472 - protein, 4523 aa, Mus musculus
MLTPPLLLLLPLLSALVSGATMDAPKTCSPKQFACRDQITCISKGWRCDGERDCPDGSDEAPEICPQSKAQRCPPNEHSCLGTELCVPMSRLCNGIQDCMDGSDEGAHCRELRANCSRMGCQHHCVPTPSGPTCYCNSSFQLQADGKTCKDFDECSVYGTCSQLCTNTDGSFTCGCVEGYLLQPDNRSCKAKNEPVDRPPVLLIANSQNILATYLSGAQVSTITPTSTRQTTAMDFSYANETVCWVHVGDSAAQTQLKCARMPGLKGFVDEHTINISLSLHHVEQMAIDWLTGNFYFVDDIDDRIFVCNRNGDTCVTLLDLELYNPKGIALDPAMGKVFFTDYGQIPKVERCDMDGQNRTKLVDSKIVFPHGITLDLVSRLVYWADAYLDYIEVVDYEGKGRQTIIQGILIEHLYGLTVFENYLYATNSDNANTQQKTSVIRVNRFNSTEYQVVTRVDKGGALHIYHQRRQPRVRSHACENDQYGKPGGCSDICLLANSHKARTCRCRSGFSLGSDGKSCKKPEHELFLVYGKGRPGIIRGMDMGAKVPDEHMIPIENLMNPRALDFHAETGFIYFADTTSYLIGRQKIDGTERETILKDGIHNVEGVAVDWMGDNLYWTDDGPKKTISVARLEKAAQTRKTLIEGKMTHPRAIVVDPLNGWMYWTDWEEDPKDSRRGRLERAWMDGSHRDIFVTSKTVLWPNGLSLDIPAGRLYWVDAFYDRIETILLNGTDRKIVYEGPELNHAFGLCHHGNYLFWTEYRSGSVYRLERGVAGAPPTVTLLRSPPIFEIRMYDAQQQQVGTNKCRVNNGGCSSLCLATPGSRQCACAEDQVLDTDGVTCLANPSYVPPPQCQPGEFACANNRCIQERWKCDGDNDCLDNSDEAPALCHQHTCPSDRFKCENNRCIPNRWLCDGDNDCGNSEDESNATCSARTCPPNQFSCASGRCIPISWTCDLDDDCGDRSDESASCAYPTCFPLTQFTCNNGRCININWRCDNDNDCGDNSDEAGCSHSCSSTQFKCNSGRCIPEHWTCDGDNDCGDYSDETHANCTNQAWPGGCHSDEFQCRLDGLCIPLRWRCDGDTDCMDSSDEKSCEGVTHVCDPNVKFGCKDSARCISKAWVCDGDSDCEDNSDEENCEACRPPSHPCANNTSVCLPPDKLCDGKDDCGDGSDEGELCDQCSLNNGGCSHNCSVAPGEGIVCSCPLGMELGSDNHTCQIQSYCAKHLKCSQKCDQNKFSVKCSCYEGWVLEPDGESCRSLDPFKPFIIFSNRHEIRRIDLHKGDYSVLVPGLRNTIALDFHLSQSALYWTDVVEDKIYRGKLLDNGALTSFEVVIQYGLATPEGLAVDWIAGNIYWVESNLDQIEVAKLDGTLRTTLLAGDIEHPRAIALDPRDGILFWTDWDASLPRIEAASMSGAGRRTIHRETGSGGWPNGLTVDYLEKRILWIDARSDAIYSARYDGSGHMEVLRGHEFLSHPFAVTLYGGEVYWTDWRTNTLAKANKWTGHNVTVVQRTNTQPFDLQVYHPSRQPMAPNPCEANGGRGPCSHLCLINYNRTVSCACPHLMKLHKDNTTCYEFKKFLLYARQMEIRGVDLDAPYYNYIISFTVPDIDNVTVLDYDAREQRVYWSDVRTQAIKRAFINGTGVETVVSADLPNAHGLAVDWVSRNLFWTSYDTNKKQINVARLDGSFKNAVVQGLEQPHGLVVHPLRGKLYWTDGDNISMANMDGSNHTLLFSGQKGPVGLAIDFPESKLYWISSGNHTINRCNLDGSELEVIDTMRSQLGKATAIMGDKLWWADQVSEKMGTCNKADGSGSVVLRNSTTLVMHMKVYDESIQLEHEGTNPCSVNNGDCSQLCLPTSETTRSCMCTAGYSLRSGQQACEGVGSFLKVHEGIRGIPLDPNDKSDALVPVSGTSLAVGIDFHAENDTIYWVDMGLSTISRAKRDQTWREDVVTNGIGRVEGIAVDWIAGNIYWTDQGFDVIEVARLNGSFRYVVISQGLDKPRAITVHPEKGYLFWTEWGHYPRIERSRLDGTERVVLVNVSISWPNGISVDYQGGKLYWCDARMDKIERIDLETGENREVVLSSNNMDMFSVSVFEDFIYWSDRTHANGSIKRGCKDNATDSVPLRTGIGVQLKDIKVFNRDRQKGTNVCAVANGGCQQLCLYRGGGQRACACAHGMLAEDGASCREYAGYLKERTILKSIHLSDERNLNAPVQPFEDPEHMKNVIAFDYRAGTSPGTPNRIFFSDIHFGNIQQINDDGSGRTTIVENVGSVEGLAYHRGWDTLYWTSYTTSTITRHTVDQWGAFERETVITMSGDDHPRAFVLDECQNLMFWTNWNELHPSIMRAALSGANVLTLIEKDIRTPNGLAIDHRAEKLYFSDATLDKIERCEYDGSHRYVILKSEPVHPFGLAVYGEHIFWTDWVRRAVQRANKYVGSDMKLLRVDIPQQPMGIIAVANDTNSCELSPCRINNGGCQDLCLLTHQGHVNCSCRGGRILQEDFTCRAVNSSCRAQDEFECANGECISFSLTCDGVSHCKDKSDEKPSYCNSRRCKKTFRQCNNGRCVSNMLWCNGVDDCGDGSDEIPCNKTACGVGEFRCRDGSCIGNSSRCNQFVDCEDASDEMNCSTTDCSSYFRLGVKGVLFQPCERTSLCYAPSWVCDGANDCGDYSDERDCPGVKRPRCPLNYFACPSGRCIPMSWTCDKEDDCENGEDETHCNKFCSEAQFECQNHRCISKQWLCDGSDDCGDGSDEAAHCEGKTCGPSSFSCPGTHVCVPERWLCDGDKDCTDGADESVTAGCLYNSTCDDREFMCQNRLCIPKHFVCDHDRDCADGSDESPECEYPTCGPNEFRCANGRCLSSRQWECDGENDCHDHSDEAPKNPHCTSPEHKCNASSQFLCSSGRCVAEALLCNGQDDCGDGSDERGCHVNECLSRKLSGCSQDCEDLKIGFKCRCRPGFRLKDDGRTCADLDECSTTFPCSQLCINTHGSYKCLCVEGYAPRGGDPHSCKAVTDEEPFLIFANRYYLRKLNLDGSNYTLLKQQNAVDFDYREQMIYWTDVTTQGSMIRRMHLNGSNVQVLHRTGLSNPDGLAVDWVGGNLYWCDKGRDTIEVSKLNGAYRTVLVSSGLREPRALVVDVQNGYLYWTDWGDHSLIGRIGMDGSGRSIIVDTKITWPNGLTVDYVTERIYWADAREDYIEFASLDGSNRHVVLSQDIPHIFALTLFEDYVYWTDWETKSINRAHKTTGANKTLLISTLHRPMDLHVFHALRQPDVPNHPCKVNNGGCSNLCLLSPGGGHKCACPTNFYLGGDGRTCVSNCTASQFVCKNDKCIPFWWKCDTEDDCGDHSDEPPDCPEFKCRPGQFQCSTGICTNPAFICDGDNDCQDNSDEANCDIHVCLPSQFKCTNTNRCIPGIFRCNGQDNCGDGEDERDCPEVTCAPNQFQCSITKRCIPRVWVCDRDNDCVDGSDEPANCTQMTCGVDEFRCKDSGRCIPARWKCDGEDDCGDGSDEPKEECDERTCEPYQFRCKNNRCVPGRWQCDYDNDCGDNSDEESCTPRPCSESEFSCANGRCIAGRWKCDGDHDCADGSDEKDCTPRCDMDQFQCKSGHCIPLRWRCDADADCMDGSDEEACGTGVRTCPLDEFQCNNTLCKPLAWKCDGEDDCGDNSDENPEECARFICPPNRPFRCKNDRVCLWIGRQCDGVDNCGDGTDEEDCEPPTAQNPHCKDKKEFLCRNQRCLSSSLRCNMFDDCGDGSDEEDCSIDPKLTSCATNASMCGDEARCVRTEKAAYCACRSGFHTVPGQPGCQDINECLRFGTCSQLCNNTKGGHLCSCARNFMKTHNTCKAEGSEYQVLYIADDNEIRSLFPGHPHSAYEQTFQGDESVRIDAMDVHVKAGRVYWTNWHTGTISYRSLPPAAPPTTSNRHRRQIDRGVTHLNISGLKMPRGIAIDWVAGNVYWTDSGRDVIEVAQMKGENRKTLISGMIDEPHAIVVDPLRGTMYWSDWGNHPKIETAAMDGTLRETLVQDNIQWPTGLAVDYHNERLYWADAKLSVIGSIRLNGTDPIVAADSKRGLSHPFSIDVFEDYIYGVTYINNRVFKIHKFGHSPLINLTGGLSHASDVVLYHQHKQPEVTNPCDRKKCEWLCLLSPSGPVCTCPNGKRLDNGTCVPVPSPTPPPDAPRPGTCTLQCFNGGSCFLNARRQPKCRCQPRYTGDKCELDQCWEYCHNGGTCADSGMPTCRCPTGFTGPKCTAQVCAGYCSNNSTCTVNQGNQPQCRCLPGFLGDRCQYRQCSGFCENFGTCQMAADGSRQCRCTVYFEGPRCEVNKCSRCLQGACVVNKQTGDVTCNCTDGRVAPSCLTCIDHCSNGGSCTMNSKMMPECQCPPHMTGPRCEEQVVSQQQPGHMASILIPLLLLLLLLLVAGVVFWYKRRVRGAKGFQHQRMTNGAMNVEIGNPTYKMYEGGEPDDVGGLLDADFALDPDKPTNFTNPVYATLYMGGHGSRHSLASTDEKRELLGRGPEDEIGDPLA

SEQ ID NO: 473 - DNA, 105223 bp, Homo sapiens
  misc_feature (1)...(105223): n = A,T,C or G
ctttaattgggtcttccattacttgctgctaaatgcatccctaactaagaccatggtgaagctatatcgccacaggaaatggagactccagggtgggctgcctgcccatcctcccactaccacccgccctatacacttgagagaataagcgatacctcattaaaggaggaatgttctcaaggaaggatcaggttccagacaagccaagaggggccaggataatgtgagccaggggtggccccaggcttcaagcaaggagatgggtggagagcagtataacagtgttaggaggaggaaggactggacttagtggagaaggatggatgccaatcaaggcctgccaaggatgacaggatgtgagcaatggtggagtcagctgatctcaaggcttcaaatggagccctcaggctgtcagaggcttactgtggccaaccgacctttacttcacagaaggacaagttagccatcctggtgaatgggcaaagtcaagcagctctggatggagtcagctgtggtcaggattgtgcctctgcaaggaaatctcagttctctaattactgtcttgcctctctcccttcccctgtgcagccaagcatcttgggaaaattattcatattcagtcttctcttccttacttcctcattacactgccagctggctgctgcccccaccagtcatgaaactgtcctggcccatgtcacatacaccctcctaggggccttgaatgatggcacattcctgtctttctcttgctgggcctttcagcagtactcaacactgttagccattcttgagtaagttctcccccaactacttttcatgattcctttcttggtcttcggcctacctctctgcgtcctccctctcagtctcctgtcttcacgggacactctttctgtgtgatctcatccacatctgaggctccacagcctgggcaaggctatgtagtatggtgattaaaaccttggccgctggcagaccacctgtgttcaaatctctgccctaccaggtggttgctttgtaatacccaaacttctatcaagatgtggatcattaccctcaccccaacccacaggggaagccactgttctgatttttttttttaagtagagtaatataggatgtagttttatgtctggcttattttacgcaacatgttttgaggttcatccatgttgctgcatgtatccatagttctttcatttttcttgctgagtagtgtcccatggtggatctataccacagtttgtttatcctttttcaaatgaaggatacctgagctatagccagcttttggctactgtgaagaaaactgctatgaatattctgtgttcaagtctgtgtgtgaacatatgctttcatttctcttggataaataactaggaatagaattgctgagtcacagggtaggtgtatgtgtagttttataagaaactgctacatattgttccaaattgatagtacattttacattcccactaatgatgtatgagagttccagttgctctgtattcccactaacatttggtattgtcagttttttaaagtttaatcattttggtgagtattgagaggtatcacactatggatataatttccttttttttttttttttttttgagacggagtcttgctctgtcacccaggctggagtgcagtggcacgatctcggctcaccgcaagctccacctcctgggttcatgccattcttctgcctcagcctcccgagtagctgggaccacaggcgcccgccaccacgcccagctaattttttgtatttttagtagagacagggtttcaccatgttagccaggatggtctagatctcttgaccttgtgatcctcctgcctcgtcctcccaaagtgctgggattacaggcgtgagccaccgtgcctggcataatttgcattttcttaataactaaagatgttgagttcttttctttttcttttttctttttatttttgagacagggtctcactctgttgcccaggctggagcacagtggcacaatcactgctcactgcagcctcaaccttctaggctcaagcaatcctcctgcctcagccttttgagtagctaggactgcaggaatgcacctccatatctagatcatttttaaattttatttatttatttattttgagatggagtcttgctcttgttgcccaggctggagtgcaatggcacaatctcagctcactgcaacctctgcctcctgggttcaagtgattctcctgcctcaacctcccaagtagctgggattacaggtgcccaccaccatgctcagctaatttttgtatttttagtagagacagggtatggccacattggccaggctggtcttgaactcctgacctcgtgatccgcccgcctcggccttccaaggtgctgggattacaggcgtgagtcaccacgcccggactttttgtagagatgaggtctcgatatattgcctaggctggtctgaaactgctgacctcaagcgatcctcccaccttggcctcccaaagtgctgggattacaggcgtgcaccactgcacctagcctcgagtacctttcatatgcttattgtccattcattgggttgtcattttattactatgttataggaatttttaatatatctcgcattcctctgtcccttctcagatcaatgttttgtctatctatttggcttacttccacattttcataataatgtcttttttttttgagtcagggtctcactgtcactcaggctggagtgcagtggcacaatcaactcactgcagcctctaactcctgggctcaagcaatcctctcttctcagcctctggagtagctgggactacaggtgcacaccatcacactcggctaattttttaaattttttgtagtgacagagtctagctttgttggccaggctggtctcaaactcctggcctcaagcagttcttctatgtcagcctcccaaagtgctgggattactccataatgatgtcttctgacgagcaaaagttttctattttgatgtttcacttatcaagaaatttatgttattgctttctatagcttaagaaggggttgctttcctccaaattatgaagatattctgtgtttttgtctaaaagctttatgattttagcatttgtggtttaggtctataatcaatctttttttttagacggagtctcgctctgtcacccaggctggagtgcagtggcgcgatctcggctcactccaccctccacctcctgggttcaagcaattctcctgcctcagcctcttgagtagctgggattacaggtgcccaccaccacacccagctaatttttgtatttttatttttttaattaattaatttttttgacacagagtctcgctgtcactcaggctggagtgcagtggtgtgatctcagctcactgcaacctccgcctctcaggttcaagcgattatcctgcctcagcctcctgagtagctaggattacaggcatgcaccaccatgcccagctaatttttgtatttttagtagagacagtgttttgccatgttggccaggctggtcttgaactgagctcagatgatccacccgccttgtcctcccaaagtgctgagattacaggtgtgagccaccatgcctggcctgttaattgtgtatttttagtagaaacagagtttcaccatgttgggcaggctggtcttgaactcctgacctctggtgattcaactgcttcagcctcccaaagtgctgggattacaggtgtgagccactgggcccagcctataatcaatcttgaattaatttttgcatatggtgtgaggtaggggtcaaggttcatttatttctcccatatagatatgaagttgttccataactatttattgaacagacattcctttctccactggctggctttgacatctttgccaaaatcaaatgacctttacagtgggatcagccagttggtgcaatacgaagtcccgcctctcatcccctcacagaaacacagatttaacaatttactgatcaaaatacctttatgagaagtacagaatccggttgagaagtgtggtaccccagacaagtagagagctgagaaaagctgcactgagatggatcctacattcctgggtctgggagtgggcctttcccagagataccatcctccagcagtaagagacctccaatagtcgggtctcagacaggttccagctaagagtaaaatcccagatcaatggtgaaaaggagtttaagaatggatgctgaagccaggcatggtggcatgtgtctgtagtcccagctacttgggaagttgacaggggaaaatagtttaagcccaggaggttgaggctgcagtgagctatgatcataccactgcactccagactgggcaacagagcaaaactctgtctcaaaaagaaaaacgaagcctgtgcctagtcaacattgaagcaagaatgcagaagttgcacagggtgagatagggatgagcagggtggaggggtggtaaacacaaaggaattgcaataagaaatcaaacaactatctgattttttaaaattatgttgagatatttggggaaaatgatagatgcatagaaaactaatcaaacgaaaaataattccaagataaaagtatataaaagtaacattataaaataataaacgcatatagaatttttattaaaaaatcaaatgattgtgagtctatttctggttctctattctgctccatggatctgtttgtcaattctcatgctagcaccacatagtcttgattactgtcacttacaagtcttgaaatcaagtagcataaatcctccagcattgattcatttatttttctttttgagacagggttgcactctgttacccaggctggagtgcagtggcatgatcatgcagtgatcaggttcactgcagcctcaacctcctgagctcaagcaatcctcccaccttagtctcctgagtagctgggcctacagatgcatgccaccacagcactgggatttttaaaaactctccaggtgattctaatgtgagccaaattttctagactcagatttctctgtcactatcttcaggcctatacagttaactggttagtatactagatcctacttctttattgtttctgaatcctcttcctctccagctccatcactcatgcattaaggacttcaccaatttctcaactggctctacactacttctagaaaaaaaattctaagtccttactgtggctaaaatcacgctttgtgattaggctttctgatacttcatccaacactctcccctcaaagtaccttaaacttcagctatgataccatatttgatgttcttcacatgttttaaacttctcatgcctccaatgcctttcctgccatccagcctaaaacaccctttccttttgttattggttgtcattttcttcctctcattcaacatttagcctggcatcatctgctgctctctgtcttgaccaccttgtctggaagaggtatccttcccatgttcccatgcccttctgcacatgccttcatcacaggtgttaaggaactgactgtattgtcattgtctgtctcttgttgagcacccagctaacctgaaagcttcttgaaggctgagactgtgtgtttccgtctcttatccctagtgcctagcaatgtacttgcttatacgaggtacctaatatttttattaagtgaatgaaatctgggcttggatctgcaccattatttgggacagattctttaatctctcagaacattctattttcttatacacactggaaataacacccatgacaaaaggtagacttaagtgagctgatactgtaaataaagtccactgcgtgggcctgggacatggtatgcgctcaataaatactggtccttttccctctctccgcctgccatcagacctttccgggatacccttcctacgcacacttccttaactgaccactaggtggtgctagcctctggcttgacattcagttccagagctacccaattaacgccccagcccaggccctgctatactcagaaaaggcgggtattttgtaatttgctgagcgacccgaaaaaagagatgccctttacccacactagcttctttgccctcatcaccattccaggtatcaatcatgaatttcagagaattcctccatgattccctactattatggttataatctcaacccaaggatttgaagatgcctcttaagaacagatgtggggaggaagagaaggcactgaggcagagaggattaaacaatgaatgctataagagaaatagagggaagaagatgcttgaagtcacatcctgttccaggaaaggcaactctagtcctaacattcctttcaccaatcaagagcctctcacgctgggtggaaacgaagaagaaaaagacatggtccctgccctcaaggagtatatagtctagtggtggatacagagcccacaaaataaagtgctaaactctggatactgaagctttcctgaatacaagtttggaacaggagagataggcagagcgagaataacaggagggcttttctgaggagggtagaggagcaggggaactgtatcattaatggctcagatagaaatatgcattctcagcagggtgaggtggctcacacctgtaatcacagcactttgggaggccaaggtgcatggatcacctgaggtcaggagtttaagaccagcctggccaacatggagaaatcccatctctactaaaaacacaaaaatgagccaggcatggtggtgggtgcctgtaatctcaactattcgggaggctgaggcaggagaatcgcttgaacctgggaggtggaggttgcagtgagctgagatcacaccactgcactccagcctgggcaacaagagtgcaactccatctcaaaaaaaaaaaagaaagaaagaaagaaagaaagacataaatatgcattctctcaccttacagacataccctcagcagttcacctgctggaaataacccaagtgcccaacaatcccaacaaactgtggaacatccaagcaaggagattccaagtagccaagatcaaagggtgagctaaatgcgttcatacggtatggaaagggatcaagctaagttaattgaaaaaaaggcaagttacagaacactatatatcatatgagtttctttatagttttaaaggatattcacttatatttgtatgttactgttttatttatttatttatttgagacagggtctccctctgttgctcaggctggagtgcagtggcacgatctcggctcaccacaacctccacctcctgggttcaagcgattctcgtgcctcagcctccccagtagctgggattacaggtatgcgtcacgatacgtggctcatttttgtatttttagtagatatggggttccgccatgttggccagtgtggtctcgaactcctgaaaagtgatcctcccaccttcgtctcccaaagtgttgggattacaggcatgagccaccacgcctggcctgtatgttactgttttaaaaactctcctggccgggcacggtggctcacgcctgtaatcccagcactttgggaggctgaggaggccagatcacgtggtcagaagttcgagaccagcctagccaacatcgtgaaaccccatctctaccaaaaatacaaaaaaaattagctgggtatagtggcgtgtgcctgtaatcccagctacttgggaggtcaaggcagaagaatcgccgaacccgggaggcagaggttgtagtgagccgagattaggccactgcactccaacctgggcaacggggcaagactccgtcttgggcgggggggaaacctctgctggtaggggagacctgaagaactgttagtagaagttactctgagggtgcagctgaaaaatgggggtgtggagagcatcaagtttccttttactttttaccttcctgtactttttttaaccactaggtattatcttttctttctttcttttttttttaacaatataaagttaataaaaatacacattcacattcaggagacagcaggggatgggaggttgcaagtgagaagtgcatgctgactgaggccaggttttggaaagccatgactgaagaggagttcacatttgactggtctatagacacccactagaggttccccagcaaggaagagacaccgggaaagcagtttttggaagattcacctgacagatgggtagggggagggaggaaagccccttcaagccctcaggctacatgtggttgctccagataccgttttcctctcaaagctgtcaagctgtctaaagtctgtttcgacctgatttcacttggatcccaatactgggaggggccctgggaggaacctcgtaggcatttggtgagtccgcatagtgcgtctcacattgtgttgggccatgggagctggataaaaggagaaataagaccccgttcctgcctggagcaactctctggcagtggaaatggaggaaatctgagatatacttcagaggaaaaaaatgacaagcctggagcacaggctggcaagattggatataggaaggaaaggcccccttgagttggcataaagtctgaggtttctagcccaggagactaaaggcaggtggccaccgcgctgagcaaagccggctggaagaagctaaaggttgagctcactgtcattaggaggcaagtccttcgtgctgctcctgtttctgccaaggacagactggagtggggacttttccgtaactagaacgtaaaagggggaacagtccctcctctccagcgtcaatttttggcagccgacgtcgtctgccccgctccttgaactctgacatgcagacacctagaaagtcagacactaaggtaacagccataaaacgccgcccagaagggggcagtgaccaaaagcacgttcactggcccctgggaaccgcctggcgcctgccttctgcaaagtatcattcccgtgtgggctgagcctggggacaaaggtccggcgctcagcagacacctccttggaacccgaggcctggaaacgaaggtccagagtccctcatcttattccaaatcctggcgctcggaatctaaaaccctaacttgatggcaagccagtcagaaggtattaaaaaaaaaaaaaaaaaaaaaaacagaaaaataaatgagccccgacttcttgggcgaaagggggtggcctttcctcaaccccacccgctggtgactcacctccctccaaaccagggcctgcccctcccgcgcctagggctgggcgagcagggcgggcgggtactaaggtgggctccatccccgagccccacgcgggcggacaagctccggcgtgtcccctcgggtgtccctgtttactccgagcccgggagcgaggtgggggcgggtcctcgcggtccctccccaaccccgccccctccttcgcaggccccaatcccagtccggtcttccaaagtctccaaatcaaagctcagcctttccctgcaccttccccgcggactggcggtccctgtccccaccccgggcagaggaggcaccttcagggttcccctagaaaatcgagcctcggcccagaccactgagtcccggacgcccccggagggagcctgaaatcctagagtatgacactgagtttcaaaggggagccgctcagctctccgcccactgcccaatcccaccctcgaccccttctgctctctggagcaccagggaggagggcccagccaggggagagggcgccccaggccccaaactagccagcgagtccccgggaccctcactcttggaccgctttccagaactccgaaccctgtcgcgggtccgcgtcgccctcccccgggcagcgcgtcaaatcggcgcatgcgcactcactggattgccgcgtagctctttctccccccacccaccaaccttttttctttccccgccccttccctccctccctcctcaacccgtcccctccctctcccccatcagcccccccctcggcacttcagtccggggaacagcggtgcgagctccaggcccatgcactgaggaggcggaaacaaggggagcccccagagctccatcaagccccctccaaaggctcccctacccggtccacgccccccaccccccctccccgcctcctcccaattgtgcatttttgcagccggaggcggctccgagatggggctgtgagcttcgcccggggagggggaaagagcagcgaggagtgaagcgggggggtggggtgaagggtttggatttcggggcagggggcgcacccccgtcagcaggccctccccaaggggctcggaactctacctcttcacccacgcccctggtgcgctttgccgaaggaaagaataagaacagagaaggaggagggggaaaggaggaaaagggggaccccccaactggggggggtgaaggagagaagtagcaggaccagaggggaaggggctgctgcttgcatcagcccacaccatgctgaccccgccgttgctcctgctgctgcccctgctctcagctctggtcgcggcggctatcgacggtgagtgagattccgcgtcccccttggacccctgggggcaccctctccccagcccccactcctgcatacggatggggaagggagacgcgggagggggtgccttttgttatcccagtccagctgacacagcagcggcccgactgggggcggggatggggtccgatttgggggatgggggccctgggcaaatgatgcttccggggccccccagcacaaacaaagaccagaggcctgggtagagagaagagggctccccatttttctgatcctggggaggagaggccttcttttcctatctctgttcggggagggcctccgcctcccctacatcctcacaaccccccaccccccatctgaattgtgaaggaatccggatttgcaatgttcggctgcaaaagggggtgggggtggggggggtggcttttgcactggcctctgtagctcgaaaggggagccaggccaggggtaccctgccgggcagagggcaggcaggcccgggaaggctgtgggtggggagagggagggccccctgcttgggcgtggaatcgaccccagagccccggctggaggcctgggtgctgaagtaggctcttccccctctcagggcctctgtcagtagcctggggtagggctgtgttggggggcagagagggggagctcgccatactatgtgactttgaattttccttcttaattcctgggagctttgagatgaaaaaacgtcagatgtcatcactggggaaggggactggagaatggcctggaatgctggggtaggagggtgggggaggctgccttcttcctgacttctggcttcatcacagtttggattggaaggagagttggaggttggatggggattatggctgtgcccccacactcctttagtaaatctgtttattccctgcacccctccaagcccaaaaccccatacacacacactttgtatattgcagagttaggcttaggctagaactgcatccttttggggaaatggggtgcctctcttccctttttttgtcagctgtttttttctcctacttgtgagtcactggttcaagtcttgcccaagctttaagcattaagctggggtcatggggttgggctgggctaggtccctgatttgagaaggggtgggatctcatcccctcctgtcatcttagccctctcatccaaagacaaaactgggctggataccatcatacaccccctcctctgtcttgccagattgggattgggaaagtttttctctgaaaccagattatctccctccctctccctaacttgcttcaattgggggaggagacttacagggtcaggaagcagctgtgtccccaaaaaacatatttagtgtccctcagttgtgccatcttggggactctctaccccccacccccaccccaccaattagctgccccggaggaggagaggggcttttcctgaatatcctccagatgccgcacagccggcttctgcctataactcctgtcattatcatgtgtttttctcttgttctcagccctgtgaggtgagaagggaaatcgaggcagggagattggggttgcagccgcttctgggaggaatagaaaaaaaatttgagagagagagagacccatcaggagccccttgaaggagggtggctagagttaggcagaagcaagagggtttctgtggagagcagggaaggtcaggaagggaccccagatagcatcactcccagggctctaaaggagttctatttgccacaccaagttagtggaagagagagactggacatgttctccttaactatctccctaccctttcttaaaatgttcacccacgccccctctgtatctccagctcagatcaaactatccaaagccccaggagaggacccctccccaaacacacaccaatatttctgccttgggagtgggaatataaataatcagctccaccccactcttgggtacagggtggtgagaaaggggaattgcatagaaatgtaagttcaactctatccagaggcagcctaggggatcccttatccctaacccctgccctcttgcctcagggtccatcaacattgaactttcttgtttactttccagagaatggagatgacccagctcacctgacttagtatgttaccttcctcctgctatcacagccttgctgctttctctccagggcagcaatcctaggggctttcccacctcttctgctttctcttctatgcctgaaactgcctctggggtcccctgccctttggggagtaacgtcactccccactagcgacaaaattgagtgtacctgctgctggagaggttgcagaaagatggggtggagaatgggactattgagggccctgctgagattggggaacattttctagtggggagggcacccccagacaaatacagctcacagaataaggctgacttcctccctccctttttcctgaccttcctccacacacccccttgagccggcatattaccagttactagagtaggtacagtggaagtgagttatgaagctggggtgttagcttcctggatccctgagagaaagttctaaactcctttctccctgatcagactcacatcctaaacgtctccctttgcctcgttgtcttttaaagcaagaatgtgtaagaaattcattttggggttggagggatattttgatgtttagggctgcttcactagacatctttttcttctgatcttgttctctctcctctcttcattttctcaaccacccttccaccactgagcctcccaaaggatgacagcccaggtcctggccagagtcagttcctgtccagatgcccccattcttcaaaaccccttccttaccttttgggaagcccttccttactcaagtctatctctctttcctcctgctgcagtgtgagcccttgcacatcagaacccccaagcctaggtttattcccgcccagtactctcttctcagggtcctcctcactcctcagactctttacctttcaggtcctccagctctgcgtgtgggctcattgctcttggggcatctgggtgcagctgaatggtactgcaggaaggcccctgacttggtagtgctgggtatgagcgatagagaacctgcctccctcttctgtcccagatttcagcctggttagcaggatcctgcattgtttggagaaggaagcagttggctttggagtgtttccggtgcaatggcctcaggcaccaatataaaccctccctgggaaagaggtgaggggtatatgtggagagttgtccctcttgctcccctaggggagatgaaagcctctccctctcccaccaggccttagcttccctggctgaagagctccattttcctccctcctttctaccctcctgactccaggggtggtagtggtccctattctgggtctcccttgagtcaggcactgcctagggccgagactctgtctctccaagataggacagatcttgctcccaccctactctaggctcagcggggtagtcattctctgggttcatcccaggacaactgtgtcatccccttggcaatctctggactgagcccccttcctggcttttctggctgtctgtctgtctttctgtctgtctgtcattagtgtgcgctgtcttggctttttagaacctctctgtctctcaccctctcagttcatctcttactgccgaacctttgtgacattctctgccctgctttctgcgtctctgtcacttgtcttatttttctctgcctgtctccatttacccccatccaggcctcttggtatcccaaaagcttcttgggagcaagagtctctctgggctttcccactcaccccctggctccctcccctctgttttggctatttttcccccttcctggccagacccagtgtccagttcagcaccaaaagtttcctctccactttcctccgacttcctctttcttcttccccctccactaatttggggaatgggttttggagagaatgtttctggaagaaaggaacttgataccctttgtgggctaagagggagaaaggaggtatttcagaaggaaggagggaggttagacttctggcagaacttcctcctgaccaggagcctaagaactggagaaagatgtaaggagtgagtcaagaacttggagcttttactctggtgagcataagctgtgtgtgtggctggggtggggggagaaggagaggaggcttagaaatgcctggtgagtgatatggtgacctctggaggccttctgggggtctggcttttatttgtggggaaaggaaaagctggtgggggaggtcacgggtcaggctaatgtcctgctgcatcaatattgactcagaatggaagcggagacccttcccctcccctggctgtccaagccaccctgtctgtctgtctgtccaggccgcaaagcagaggcccagactcaggaatgacaaaaatgtgtctgagcctcaggaaagagccactgggcaacacccaaaatacaaaaaattcagtgaaaacctctcggtttgggtttgggaggcccttgctgccccacccccataaggtcgaaaattcagattcctgcaggctctgtccccgcgccgcccccccaccccaccccccgcaccttgagcatcctcctcccactctgttcccttagctatatcatgtggttccctttagagaacccccctctcacctagctcagaggggagcctatctctccttctgctgtgtccactcttaaaaagggccccaagagtccctgtcatgcttttgcagtccctgagtctccttgtcctttaagaagcacctctaaggtcttagctctcttccttgctctcgctccctcaagggggtatcaaaggatgggttcccctcctctggagaagactccttcagggttggacttcgctgtcaccctctctggccaggcattctcaccccacttccccacccccaaggtcccagaatgggacacagaatgacagccaagggtcaagcagggcagtggggtctgtgttgtgtctggacgcacacccaactctacacctcctgccctggctccagcttggtggccctggggaccgtggctgggctgggtgcctgggtttgggggggtggggcagggtgttggccaagttagcatggcagtcacattcatcttcaggcaaagccgagaacagacggcccctgtgtcctggtgttcttcctccaaactcgctctctctccttcctctctagatctctccttcttcttctcctgcctgtcttccccttcttctgtcccattcttgctcctctctgtctcccctatgcccttccctcctctctgaggagccctgaaggccaccccttaaaatcctctccccactgccagggccagagaacgacagcgttctccctgcaatttcccttccttgttttttgtttttgttttgttttgtttttgagacacagtctcactccatcacccagactgaaatgcaatggcgtgatctctgctcactgcgacctccgcctcctgctaatttttgtatttttagtagagacagggtttcaccatgttgcccaggctggtctcaaactcttgacctcaagtgatccgcccatctccgcctccacctcccaaagtgctggtactacagacgggagccactgcgcccatctggtttcctttctttctttcttttttttttcttttgagatggaatctcgctctgttgcccaggctggagtgcagtggcgcgatctcagttcactgcaagctccgcctcccctggttcacgccattctcctgcctcagcctcctgagtagctgggactacaggcgcctgccaccacgcccagctaatttttcatatttttagtagagacggggtttcaccgcgttagccaggatggtctcgatctcctgacatcatgatctgcctgcttcggcctcccaaagtactgggattacaggcatgagccaccatgcccggcctggtttcctttcttaacccggctgcatcccatgacctatgaggaaaccacctgctcagttaccagtcaccctgtgcctcagctcccccatgtgtgagaggggggccgcaagggcacccacctcacagggttatagtatctaagtgagttaatagtcaccgtatttccaatcagtggctggtggttagcaaggtgaaaaaggttagctcccatcggtcagggagacctccgggttctctcatgcgggccaggaggcggggaaggccttagttgcttttgaccttagggcaatgttgttctctcatctaaactgcaggccacaaaggtgggttttctgggtgctggattcagacacagaaggctctgctgaggggagtggggttggctttccctctaagcagattataagggtcctaccccgctcccaactcagctctctcccagctctgagtgaggcttcccttggctgtgtagactgtcccaaagtagtttatttgtttctttcttccctctccccctgaaggaaatcaaagacaggcctcagccttctcgctccagattcctgggcccttcaacaccagccctgacaggaagttctttcacgtatctctctgcaatccttgtgctggccaggccctcgggagatgtggccccctcccccggtgctgctgtgggataggggcctgggccctcctcttcctttcacttgtcccatcccccatcccctccctgcaagagcacatctggtttgtgaatctctctcattccagcttttggagtttgccagctgctgtttcctctgtggagttcaggccaaaaatgggggtgggggacagcgggggggactcagtgagggctaaaggagggggcaccatggctgggatgtggaatggaggggaggttaggtgaccacccggtgacctcaggccgtggctgtgcgctctgcccctgggaggagcagggcatggaccaagtcccaggtgggtggcacgggggtctgtttctgggctccaaacatctcatctgcctctgagtcccattccagcccccctcttccccctcagccggccacggctggtcaggggaagcggacggttctccggcatgctaactaggctggcgggctgtgtttcccgggaagacctcacagctggcccagtggggcaatgaactcagcattatccacctcctcaaggggcctttattccaggctcagggtgggggccaggggagggaggctgaagggggagcctggctaggccatccttgatgtgtttcctgaactcggtcattttggccaggggcctgagtgccgtctcccctgccagcggtgggggttaggagggaagacatctcagtgaggctcccatcagactccctccctcctaagagccccccccccccgccattttccttatacttctgtctctgccctgcatttgcattagttgggtacagctgtcttctcaggcgactctggctcctgcagggcagagggtcatctcaccctccttggcaccctgatgcctagtgcagtgcctggcatagagctggccttcagtgtgtgccagcagaatagaaatgtgatggcacagtctgaggaaaagccacgaaaggccaggagactgggagctcagccttgggtgggggagaaggggtgggtgactgttcctcctgtggaggatgtggtgatagaggttgggaggagtgggaattcggaggactggtgtggatttcactggttcagagcttggagtcagcttagctggttttgtcacttgccagctatttgaccctggccaagtcacctggctcaatttcttcatctgtgaaatggtggtattagttgtccctatttgtcatactgtggagggaattaaatatgatgatacatggaaaaaactgctttaccacagttcctggcacatactgagcccacaataagagttagttgtcagccgggtgcggtggctcacgcctgtaatcccagcactttgggaggctgagatggatgtatcagatgaggttgggagttcgagaccagcctgaccaacatggagaaaccccgtctctactaaaaatacaaaattagccatgcgtggtggcgcatgcctgtaatcccagctactctggaggctgaggcagaagaatcacttgaacccgggaggcaggggttgcagtgagccaagatcgtgccattgcactccagcctgggcaacaagagcaaaactctgtctcaaaaaaaaaaaaaaaacaacagagttagttgtcaccattcttaattcctccttgggggatgagggaagagaatggggtaggagtggaagaagcctgattggggtgggagggtagggccaagaggtcctgaatatagtagctaactagttggactggactgaaaccagttcctagagttcatttcagccatccccctgcctctgctccccaattctgatatcttgaaaatctttaggtgcttcttaactctaaggatgtctactgaaagtctccctgaggtctaaccaagggaggctgtgtctttagagaatggagaggacaaggcaggtggatcacctgaggtcaggagtttgagaccagcatggccaacatggtgaaaccccgtctctactaaaaatacaaaaactagctggacatggtgatgcatgtctgtagttccagccactggggaggccgaggcaggagaatcgcctgggcccaggaggtggaggttgcggtgagctgagattgtgccactgcactccagcctgggggacagagtgagaccttgtctcaaaaaaaaaaaaaatagggaatggaaatggaagcaaggctctctaccctgcccattcctgcccagccttgccctcctgtgcctctgctaataccatctccaactactactgtgtgtgccaagggcatccctccccactgctcccatctgggggcctagtgattaggggttgggaaggatggggtgatgggtcaggggaccaggagtgtcccagaaggcagggaagcagagaggttagataagaccagctcggggcctctagtagtaggagttagaggaagacaaagagaaaacatgtcaaggcctaaatgcaccccccttcaccatcactctgtcatcaaagccagggggtgctggtgtctgatgagagtaaccaagaatagcaaaggctttgaccctgactcccaggaacaggcagcctagaggacttggaggggtgcagtaaaatgtgcttctggatcctccccacccccaccgcagatacacagtgtctaggaactacccaaagccaccccctgacacccccaggcacatagaccatggctgagggtctgggccagatggagactgatgctagggaaggaagagcagtactaggggactttgggttcacagagttggcctccatccttcatttatatccccttttctttccttgccctagcccctaagacttgcagccccaagcagtttgcctgcagagatcaaataacctgtatctcaaagggctggcggtgcgacggtgagagggactgcccagacggatctgacgaggcccctgagatttgtaagtaccttttctggattcttctccccaaacccttaacttatccctcttcctttggcagatgtttgggaggaggacagctgatccctagcctgatgtggaccttgctcagtgattgtatttgtccatgacacagctaaaactgtcctttacaccccttcaaaatgcttggcatggtgcctgttgggcttagaaatggcacctcagatttctccctcaagtgctgcaccccaagacagtgttctctgggctgacagctttgctagaagatggcccggcctccctttccttccagctcttcccttattccacctctcagcctccctgacccttgatgattggccccaggtcttgtcggatcctcagatcttcctctgtcctttggctcccaggccagaggccactggcacttgctcagccccataccagaagccccacccctgtgctcttcccgctacccccgccttcccctgcccccagtaagtggtgtaatcggaggcagctgttttaactgggagaaaggtccccgcccagcttttgccctgccaagggaagtggagaacttgttggtgggaccccagagtcctgggtagctggcacagtcctggtggctccacctttagcctctcccctgcttggttaatctgggccagggtcaaagcgcccctgcattcctaggtccgtctctgttctctctcttgggctttatcctgctccagtcccatctggtgtcctgtccccacacccccacccgtaattatcaggggtaattttagggctggaaagggagccactagtgggctctgcctcacccctacactctgccctggagggtgggggccaggggtattcagcaagtatatctacggcatggtgcttcagcctggagtctcttcttgtctggtgccacctgcacccccacacttttgaccctgatgcttgggcgttagaagtaaagaaagccatgcagaagggtcagatctgcctctttttgttcattcttccttcaatttgctgtaaacctcaccttatatgcattaccactctgttcacactcataccccccggactcataacatcacacacagacccacctggcactgatgagcccacctcccacccaaaggcacaaacacattctcacagtaacacagagtcacactcaaatgtggatgcagaaacacactctatactcagagagatgtccccagacacacataccaacatagagacacacacacacaaacccagattgattcacatggaaactcactgaggccagatacaccagcatacagaaagacacacagatacactctcactacctaccgctgcatgctatacagccacaccatcagttgtgtaagcagactcccatccaggcacacatgggtcatagacactgtcactcacacaccgtgtccaggcttgggggccaatagacagtggtctctctatctcatccatcctcttgagcaacaaaggaagttgcagagatgatatgaccagttggccacaacctttttttttttctttttttgaaaggtgggatctcactatgttgccttggctgatctcaaactcctgacctcaagtgatcctcctgacacagcttcccagagttctgggactataggcgtgagccaccatgcctggccagaccacaacctttgattcttcccaaatccttctatcaggcttgttgctgtggggttggaagtctagaatagtgctgtccaatagaaatgtattgcaagccacatgtgctattttgaaattttcgagtagccacttaaaaaaggtaaaaatgaacagatgaaatgaatttgaatattttatccaatggatccaaaatattatcactttagtacagtgtattcatataaaacctttagagatcttttgcatttttctgacattaagtcatcaaaatccagtgtacattttatacttacagtttgaacttgccgcctttcaagtgcttgatagccacatgtgactgggctacgtattgggcagtgaaggtctagaagatttggcaccactcttggccctgggttctgcaacctgggagctatgggaaggagtttttctttatcattggagtttctctgccatggaccctgcttccctcagctcatcaaaacctttttttttgtttgtttgttttgagacagatctcgctctgtcgcccacgctggagtgcagtggtgcaatctcagctcactgcaacttctgcctcctgggttcaagcgattctcctgcctcagcctcccgagtagctgggactacaggtgcatgccaccatgcctggctaattttttgcatttttagtagagacggggtttcaccatgttggccaggctcatcttgaactcctgacctcaagtgatctgcccgcctcagcctcccaaagtgctaggattataggtgtgagccatcactcccggcatcatcaaaaccttttactgacctcagtcgtcatcaaaaaccaggctgtcttcagcctgtctcctgagcatagaatgttgaggcactggggtccatgggaatggggcatttggagggtggactctactgaaggcctagtttctacctccacctgtttgcctacaggtgtgtggctactgtggggaatattgtaaaagagttccaggtggaagagtctaactagccccgaggcctcctgagatctgaaaccccagttttatctcccctcatccccagtgaacagctgaccagagagccaccatagccagcttgttcatgcccacccttctgtctgccctcaggtccacagagtaaggcccagcgatgccagccaaacgagcataactgcctgggtactgagctgtgtgttcccatgtcccgcctctgcaatggggtccaggactgcatggacggctcagatgaggggccccactgccgaggtaaggacttttccactctctactctcccgtctggatgcagcatattatcagcccaccttccgaggactgtcctggcaccttcagtggggatgaggccttgtcctggtcccctgcctagatttaccttcagagagcagatgaaattgatgtgccccttgggcctggagcttggtcagacagccctgtgggcctcagccgtgggctgtagcctgggcacttccctctggctatgtgttcttggactagtcactacctctctccaggtggcagtttttcttctgtaagatgagagatcagtgttttcatacttttttaaaaatagtatgatcctttcttcaaaaggttttctgcatgaaacctgagtgtgaacacagggaggagcagaggtgctgtgactaaagcttagccatctagtttagtccacctgccgcccctacgggtgccctagaaggcatcccccaggagctgcagatctttgaggggccctaaatctgccttggtccctccctctctgacagtctagactgtctgaggtggttgataggaaagccatccaggccgaggtgggaacattaggatgacaagtcagactgcttccagcctgtggctcaggtcaccagctctacagtctttcccccaaagggccctgtgggccatggagagtccggtcacagcgtgagcatttaagagtcgtgtccggggaggcagagcctcaagcctgcgtgttagggaatagtggcttctcccttctcttttcttcggggtctgggcccggagcaagaggccagctttgagaggccatgagcgtagccctaggggaggggctgtgcttgggtgtgggggcagtgtcctgtgctgtgtgcctgagaaaacatctgtctgtgggaggagactcatctggatcctgttcactaggagcagggaggatggagcaaaggagtttgtggaagatttttctccctttctttggttgattttgcatgttttcatctgaagctcctgggacgggatgcagaatgcgggcctgggggctgacttaaatgaccacgcgcaccccttcctctcgtgtggtgtgtgttcaagcttacttccttttgagtacctttacagtctctaaaacaacagagaacttcaaaaacctcaggtctgaatttccttctctgatattacagaaatcggcctcctcattccctcaccctatatccagaaaagttactcttttctaggttttccagagcaaatgatattttccccctctgtggagaaaggctgggcaggcagcatgaatggctctcgggtggaagtggggaggagaaagaatcgctggggcctggccccccatcccaactcttcctggcaggcttagtgcctctaaacgtcttagcatcttgggcggctctctctcctaggtgggggtggagtgggaagccagggtgtgaggccgctggacaaaggggtctttgtggccaggctgcctggccccacgcaaggccattaactgggtcgctggtctgggggggcaactgctctcccacctctcccccctcctgtctcattcccttctgtctcccctgtggaagtgggtcagtggcaggagaaagattagaaaagaatccagaggggaccagttttgctcctccttcctgtcctctacctgggccttaggccttctctctgaggcctctagggctccggggatgggttagacaggtgcttccaggccagagctgggatcctgtggggacagacacgattccatgcccacttttcagccccagctgaagccaacattgtaatccccaggcagtgtagatgagaggcatatcaaagggataagactcaccatcccctcttcctgttgaccccaacaaagtgccagaacccctctccatggggacagaggtagcccagaacatccagaacagagacatgtgggttctaagccatcactggctgtgtgaccttgggcttgtcttatagcctctctgggcttcagtttcttcacttgtgaaatatggtagatgcttcctaaggcccttctgtctctgacactgcagcccttagaagtggtttctgaaggttgactgggtttaggggaaggttgtggcctgcgtggagctgccagatctggcggcctgaatatgtgtctctcctgcccccacacagagctccaaggcaactgctctcgcctgggctgccagcaccattgtgtccccacactcgatgggcccacctgctactgcaacagcagctttcagcttcaggcagatggcaagacctgcaaaggtatgtgagtgcatgtgcctgtgtgcatgtgtgtgtgccagtagccagttgaggtgggcagggaggggcagagaggggtagggggcctggctggaataagaaactagaaggaaggtgcaagagagggggtgccaccaccccagggcatgactgtgagccctaaccatttgcttccactagacttctaaaaattcaccttaaaattatagtttatatgtaaatttttctgttgtaaaaaattagagcattaacagataaaaccaaagtcccctttgacaaatccccctcaattccggtccccttcccatctccctggagttcaactctattatcagtttgctctctctctttcaggcccttttttgtgcatttgtctctgggtattcacagaaaatctaattggaagtactgctcaagagtactgcgtgctcttttttacataaacaatagtatactgtgtatattattttcaatgtttttcactcatcagtatgttccacaatttttttttctgtgttaatatgtaaagatctacatcattcttttagaaaccactatgacgtatgacttttaccacagtttacttggtcacctccctgttgatgagtgagatgttcccaatttttcactgctacaagcaatgcaaacttttctgttttaaatttgcctccctcgggtctttgtgcaaatgccaccttctcagtgaagccgtcccccgacccctctaaaactgcatccctgccatctgcattctctatccctgttctcttttcattgcactagcacctctaatgtatactttatttactttgtttcatatgttattatagtaactatatttcatttattatctgaatataagtttcatgaggacagcaatgtgggtctattttaaagttcactgatgcacccctggcacctgacccatagtagggactcaataaatcttccctgcgtggatgagtgatatgtacacgagtgtttctctagagtggattccaagactggacttgctgggtgttaaggtttgcacatttcatgctgtaatagattctgccgaactgtccttcaaggtagctgtaaggatggacatgttgatcatgtctgatgatcacccacttcgttgcccttgtcacactggaaatgaccacattcttgccctttcctcggcagattttgatgagtgctcagtgtacggcacctgcagccagctatgcaccaacacagacggctccttcatatgtggctgtgttgaaggatacctcctgcagccggataaccgctcctgcaaggccaagaacggtgggtggggttgcctctggccacagtgctaactaagccccctcaatgctgttccctggtgggtggtggcctgagaggtggtcctagagccctggctgcacggactcttctcttccccattcccagagccagtagaccggccccctgtgctgttgatagccaactcccagaacatcttggccacgtacctgagtggggcccaggtgtctaccatcacacctacgagcacgcggcagaccacagccatggacttcagctatgccaacgagaccgtatgctgggtgcatgttggggacagtgctgctcagacgcagctcaagtgtgcccgcatgcctggcctaaagggcttcgtggatgagcacaccatcaacatctccctcagtctgcaccgtgagtcacctgctctcagcttggagggctggggagggtaggggagacagggaaggtggaccctatcttgaacagaggccgggagttacacaggatggtcctgtctggggcaggagaagcaggaggctggatacaatggtgtgtgtttgaggcaggggcagagccaccggcacgctccctcccagctctctgagcaagtgtctggatggcccctgcatttctggccaagggctgagggggcagtgaatggtcaatctccagagaccagggactgtcccttctctgagaggggagtgttgactagactgcagagggactttccggtgcagtgggagccaaggctagggaaagaaggagcggaagcctgaggtgccctgttaggctgcagctgagggtaaaggagctggggcccagctgctctgtctccatgggccatcgtttccctcggggaccattgccaatggactctctgctgccatcgggggagggcagtactgaggttatttctctgtggctttgtggcagtgaatgaggctgggagaggagcgtgagccacatgagattttagaatatcctggatgcttccattcaggcttctccctaggctacacttttgctatcctagttgtggaagaaggggtgtcacagaaaggggcacgagcatagctgggtgtagacccactgccgggaacagccctgcccatctcagaggctgttacaccagcaaccttaaaagtcaacatctggcagcatcacatttccaaagaaatgcaccacagggctgagaggaagaatctggcctgtggttgatctgaccccctaagggagattaacttgatctgtaactgtttagtaaaccagaattcccatctctgccttggtttcctaatctgcataatgggtttgagcttgtctgtctagatcagattaactggagtgaaagccagtggtaaaggacagcacactttgaagttgaggattgtgaaccttgggcctctctagaagatcttcaagtttctttatttggttcttgtgatgaaaagaaagatcccaggaggttacaagggattcattctgggagagagaaaggcccctccccgggatggtggcgagcaggggttcctctgagagccctcactctccgtggcctcagcgtaaggttcacatttctgcctttggctcctccagagcatccctgatagcgtccttgggctgctgctgtccacagctcacctgtgatcagacatgtgtcctccttggggtgctgagctgggggctgtcaagcctggttggctgagctcttaacgagtgggcgactcagggaaccccatggctgatggggtgggattggtgctagaccctcttgtgcagctgccctccccctgttccttgtccactgacctactcaacaggcctgtctgggcagacagcttgtcagtttcctccccagccctgcatcttgccatacagtgggcttctgggtaggtggctatggggtgtcctggaggtaaccttctcaacttctactctggcctcatctccttatctgacttcctccccaggagaagctggtagccctcccttggcaaacagatttgccttgcctcccagtctgctaaactcactgggcctctcaggggcagagtccaggaggctagaagagtccaaggggaaatgcttgtggggtaaatgagtgggtttctctcatcccagcttctgtcccttcctccctgccctccccctgctccacgtccctgccgcctgaatgtctggctgtcaccctgaggatggttgttttgctctctcccacaaactaattatgggtcccaaactgaggacgtcagtgtctctcccctagcccctcccccagtttctgggtcatccccctccccaggagatgctgactggcctgccctggtgtgtagggtggctggtcccaggcactcacctgcacagtggctgctggcctgtaattagctccccaaggaggacgaagaagaaaggctgcagctttcccctgctttcactctgccctccagggcagccctccctgcaagccttccattctgtgctgtgactgtgacctctgttggacccctggggctgagcctcatgcagcaggggtgcacacagagggaggagtctgacaattgaggggtgttcgagccagcgaggccagcccgctggtgcaggcagaagggggagcctgccccagagaaaactctggaagcagaaatagaatagaaagaaggaaggaggccaggaaatgagcctggttcacatgtgtcctgggccatgtgagtcagacctgttgtggagtcctgagagcccccgagggcccccctgaggccctgcagtgtgtgaacattcctcttcaatgccccagggctgctgaccctcctgcctcaggcccagtgttatccccctggattgggtgggtcatctcttttcctcccacctgagattacctccccctcccctctgccgctggcccagtggtttggggaggtctatgaggctcgaattccaagaccagagaactccatggtgagagccggaagagaaggcaagacccttggccagtaccaagagcagccctggctttcactactgctttctcaaaggggctatgcattgatttgattttagatggtacctggacaagctttttttttttttttttaactgttatagttacgtttttatttgatatgcattaggaaactcctgtaactagcacatcaaatctgttacttcagcaattgtttagcatgcagcgaaataagaaaagtaagttaattgaaataactggtaataaacagtagcgcaagctgtacataagcatggtagacattttgaaagtgatacacaaaagactaaagttctgaaaattgaggcccagagggatcaacaggcctgatagtcccttagtcaggaaccaggcctgcgcactctcacccccacctctgaccagtctctcagctccagaggcctatggagcctgtaacccagctttgtccagcctcctgccaggctgcccctgggcaggcctggtggtgcagtctaccgaccccagcccagccctgcatttcctaagctgagctcctctgatctgtattcccttcaccttggaggatgccaccactgtagaaagaatgaggcagactgcaagattggggtcctgggaacatgggtgtgtatggtgaggggaggttctgaggttgtaaatagaggccttgaaggaaatcgggtttgctgaagtcactcaggagtttggactgtgtgtgaaaggatggtctgaaggggctctcagaggtctcagggttcccctccctgcaccatgctgcatggggaagaaggaggtggctggggagctcagcaaagggcccctaggctgcaggcagcaaggttgcgaaatgggtcccaggtccagctggccaacttcacttttcccttcctctccctttcttttatttatttatttttttagtgtgtgtgttttcgaaatcacaacaggaaatggggtagtgatttgtctagaggggaggcaaagaaggggcagacagcagtccctctgagtctaatgaactggctgctgctgctggaaggggtgctacctccccactgtgctgggcacccctggaccctctcagcctcccaccctgcctacaaagcacttccagacttcacatgtgaaagctaaccatgcccatccttggcctttctgacccatgggatgccaggctgtttggggaggggtgcctggacacacacagatacccacatactcacacagaacctcatccacgcccaagcatggtctagcaacacacacagattcccccacacaggcacatgcctgcccaccttccggtctgtgccattgagcagtatcgtctcgatgcggtcgtagaaggcatccacccagtagaggcgcccagccgggatgtccaggcttagcccattgggccaaagcactgtcttggaggtgacaaagatgtctcggtgtgagccatccatccacgccctctccagccgcccacgccgactgtccttggggtcctcctcccagtctgtccagtacatccacctgtgggcagcgactggtcagcatcacctgggnnnnnnnnnnnnnnnnnnnngggtgtaaaggacagttttagcaccccactctttggccttaggccccctgcatcctggcacttttgcttcccattcctgttctgagtttcctaatcatttaacagctcactcttgctcctcctctctcctggcccgggccagccctgtgtctcccggcccagatccagccctgtcctctcctcccccgctgtctccttgaaattgcctctccacccagactgctcccagcactccccttgctgttttcaagccaaaggaagtaacttaagcaagagagatgtgttttagagcccggcaaggatttctcaatagagggaagaccctaagatgggctgagtggaatccaggcatcatccctgggatctaggtcgaaatgcctcttggggacctaagccaggcaggggaaggtagcaggacataaccacaggctggaatcacaggcaggagcaggaagagagcccaggagaacgaggtgacacaacacggctaagctccagactggctggtggaaggaagagctgaagtcgggacccagcaggaaacaaggagcatgaggccacatcgtttagcagagcttctgccaggctcgccaggaggtctccttcccaccttcgaagtcctcagactctccgccatctctcccaggcccaggcgagatccctgagtaggattactagacagactgtcctctcccactgtcttggagtgtcccaaggccagagaggcaggatcctggcagtagaagagagggggaaaatgatgtcccagctctagaacaacagactcagtcttcaataaatatttgttcaatggatcaatacatgtgtgtcagacgcctgagacaaagacaaaaggcagcgctctccttacagtatttgcagtcaggtgaagaggccatgatcaaagaagctccagaggcctatggagcctgtaacaggaaaacttccttctttttttttttttttttttttgagatggagtctcactctgtcgcccaggctggagtgcagtgatgcaatcttggctcactgcaagctctgcctcccgggttcacgccattcttctgcctcaggctcccgagtagctaggactacaggtgcccgccaccacgcctggctaattttttgtgtttttagtagagacagagttttaccatgttagccaggatggtctcgatctcctggcctcatgatccacctgcttcagcctcccagagtgctgggattacaggcgtgagccactgagcctggccttgaaaacttccttctaatagggcaagcttccttctgggagcctgagccgagtcttgacgagtagtaggtgttagccccaaatggcccacctggagggcccacctagagtcaggaggccacagggctctggctggaggcacagagggcgacttggtggaaaaggtgggaaaggatgggttcagggaggggaggacatggtgggaaccgcagcccccatgtggggagtgtttatcatgcaccaggcctcatgctaagtgcagttagtgtaccatccagttttacaaatgaggaaacagagactcagaggcattaagtaacttgctcatagcctcagttggaaggtgacagaaccagaattcaaactcaggctgtcagtgtctagggcccagttggacccagggcagagcagaatgatatgaggagaggtggggaggttcctggaacaagggccagaatctagtgtgctccctggggatgtggatagaggtccagggacctctttggatgtgtatacactcttgggtgtgtagatgtgttgggtgacattttctcaggacataaaggcttcttccttccttccgatttccttattttagagcaggtgactagaatcctgcagctgaagctagagtctttttgggcatggggtgggtcccatgtgtttgggaaagcagccaccatgtatggaaatgcctcttgaacaatgggaatgatggagaagttgagaaaagctggagttgtagtgagtgcagatgctgagcagtgggatggggtgccaggacaccaggtctattctggggcctggaactgaaagtcctctgtgccataatgggcagctgtggtctctcgtctgactcctgcacctcttccctgcttcctagcctccctcttcatgctggaatcccctgcccctctgcccctagaccacccccaactccttccacaacacagcctccctctctcccctttggtttatttgagattctcctgtcctcaggattttcggcctttggccagagcctcttcagaaggtgcgctcaggtggttggcccttagaaggctgggcgacaaggggacggctcccctcagggttggtggagccagaatgctcaggatctctgggctgaagcccaggactccacctggaccccaattcataagacagagaggggtggcccagatactgcctatagggcagccctggaggcaaggttcctcctctccctttgagcccatctctctacactggccttggagtggtggccaagtgtatgtgtgtgtgtgtgattgtgcgtgcatttgtgtgtgcatacgtgcgtatgtgcgtgtgtgtgtggtggggcaggcagaggaatctgaactttaggagagagaaaaataatgtggtgcagggggttggataacaaaggatttttgcttgcaactaatagtctccagctgcaaaaataccaaaggggaggccaggcaggccgaggactccagttcttgccaactcctcaccggcctgctgagtggggccctgcctggcctttggggaggtggaagggagaccggccaagggtaaatatctgagagcagggatgatctctctgccttccttcccggaattgggagggaatccaggccacatcctgaggctgggggggctgattgtggagctgcacctgggatagcggcatcagatctctgcaggtttcttccttctctctcttgccaagagaagggtggatagggggagcaggggcagggtattgccagccctagggctgggcagtgactcagggaagcctcaggaagtcggagagaaggccggccgtagctgcgccagctggtgctgggaaaacagctttcactgatgaagttcatacacatgccagcagcccccagacccctgccgtgcccaccaagtaaagggcacgcagccctgtttgacttccagccaccctgctggctgccaggggatgcaggcaggtccctgctttgagacttcgatttcctttggaggcagcccagcagcattcatttgaatctgttttctctgtggttacagcgtgtggggcaaagaatttggttgccttacccctgcactaggccctcttcctacagggccttggcctcctcaagctactcttccccctctctccaatcttgtgaggatgggacagtactgggggcccagaggaaagagtggctgggcttggggatgcatgaatacttacgggggtaatacctcgtctctgtggccttgttctccaggcattgggatgggatttagcagagaggacctgaagaagaaactagtttgatgaagccctcagttggctccttcccttcctgtcctgtgactctgagtcagtgtcagggcccagccaagttccttgagagcggcgttcctgttctttttgcccccaccccaccctcacccactgttagggagcagcccctgaatccctgtggggaggagggggaattagggaggggtcaagcagaacagcaagtcattatacctgtagctgtgtgggggcagaagaatccctactgggttgagtatgggtaatggaggatgagtttcagcccaaagcaggtagcccaaagatttctttacttgttggggaaactgttggagatggagttccaggcaggggtcccagaaagtcactgccttaggagtttcccagtttgcaagaggcaccatctctgatggtggtagttgaagggggtagtgagtagatggaaggaagccagtggtcctggagaggaggagcccagaggaggccagcatgtgtccctgtccccagacttcctgcctccttgacttccggccacccttgccctgcctctctttcctttggctcttcttggcttcttccatctcctccagaaccatgcctgaaactgagtctaggcagctgggctccatctccttcccccactcccatcatccttaagccccatctctttctgagccatgcctcagtttgccctgaggattctttcatggccctcctcctagactctctctcctccagccctatgacttattccccacctcttctgaccctccccaggacatgaggacattgagcaataaggacattgcaggaacaggggactggggctgagtagaggaagtttggcccatgtcactggtgcccaaccttttgcccccatggatcttccctttggcatctctgtagagttcatattttgaaatacttttctcccaaactgggtttattagcgtgtaccctgcttttccactttaaaaatttatgccatatgtccagcttccagtcagtgcttctggttagcatgagataactagatttactgtagatggtagataaaagtccagtgaaaagcaaagatgtgtaatgttttggtagcctcagtgctcttatcccaagtaaaagcaaagttaaaaaaaaaaaaaaactggactgagctagtggacctgtgctctctaccttttggtgccccaagaagatggtcccttttcaaggatgggctagaattgggaagtctgtcagtcaaccagccagccagcatttacgcaagccctcctgtatatccactctgagctaagcatgggggtgttgggtgggagggcgtccagagaaggtgggcttccaggtgtgggttctcaccagcaaagggtgggcatctctgcaagagggcctaccccaccccatggctctttcattcgtactctccagacgtggaacagatggccatcgactggctgacaggcaacttctactttgtggatgacatcgatgataggatctttgtctgcaacagaaatggggacacatgtgtcacattgctagacctggaactctacaaccccaagggcattgccctggaccctgccatggggtgagagtggcaggcggggttctggccctggaaggtgggaggctgaggctacagtggtaaggagggtgcccaatgtccagaccccatttaacatgcatcttcccacaggaaggtgtttttcactgactatgggcagatcccaaaggtggaacgctgtgacatggatgggcagaaccgcaccaagctcgtcgacagcaagattgtgtttcctcatggcatcacgctggacctggtcagccgccttgtctactgggcagatgcctatctggactatattgaagtggtggactatgagggcaagggccgccagaccatcatccagggcatcctggtgagggagctactgtctgaggttttgtgggggaaccatgatccagggccttctggtgaggggggaagcctctgtaggggaaccgttctctgagtctcctggtaaagagcgtggatgccccaggcctctagtgggagtggggtgggcttgaatactgcagagaaaggacaagatacgggttccactgtgatgggaacagtcattttagaaacaccacttctgtttacttcctgtttctcatttgacccttataataacccctagctgatgaacagggaggtggttcagttccctttcagcagatgaaaaagcaggatcaaagaggttaggtgatttgcctgtgtttacaaagccgggtgatagcactggaacttgttctagaagccttgctggctcagaggtggcatctccattgtgggataattagtgtgagcaaccagcccagtttgcctaggactgtcccagttttagccctgaaagtctggtaagccagcaaacccttacctttgtcttaggcaaactaggacagttggccaccgcagataagctatgtgggtagtcaggggtgttacaggacttgcttggggcaagtgtgtcctcttagccctcataacagactaagaatgtcctctgtggacagagtttagagcccatctctaattcagtctaaaatcactaaagtgtctaacgagtgcctaattctgtgaaggacagggtttctgccctcaaggggtctgagtagagtgggtgagataagtccacaaatcactgtgccagacacggatagatagcagtgtcacggaggatgtatagaaggagaaaacatctctggttagaagattccataaattctttaaagacatgctctgtagaggatgagtgggatcttggtaagcaaaaatcttcagaataggttagtccagccagaggagacaggagtaaagcattgagttaaaaaatggtggggccaggcacggtagcccacacctgtaatcccagcactttgggaggctgaggcaggagaagtgcttgagcctcggaggtcgagaccagcctgagcaacatagggaaaccccatctctacacaaaatttgttttaattagccaggtgtggtggtatgttcctgtagtcccaactactcaggaggctgaagcaggagggccgcttaagcccaggaggtggagactgcagtgagccgtgatcgtgccattgcacttcagcctgggtgacagagtgaggtcccgtctcaaaataaataaataaaaattaaaaactacaggatgaattggggaatgcaggtcatgaagtctggaggaagctgaggggatctccaggacagagggaggaacccctgtcatctcatgctgtccattcttgcctgcccgtctcagattgagcacctgtacggcctgactgtgtttgagaattatctctatgccaccaactcggacaatgccaatgcccagcagaagacgagtgtgatccgtgtgaaccgctttaacagcaccgagtaccaggttgtcacccgggtggacaagggtggtgccctccacatctaccaccagaggcgtcagccccgaggtgagcagggctccatggcccctccaaagctggctttaccccatgatggctctgggaccttgggatcacagcccctctctgggccctcctgtggggaccctggcttctttcatgtcatgaccgattctcctagccagccactcgggctacctgccctggcccctcagcttcccctgccagcccccatccacccactcagcctccagatcccactctgtccctcccattccccttgccagtctggagcagtagcacctggccatgggcaaccctggaactctcttccctgactactgaagcccccactccaagagtttgaaggctgggttgttggggggcagagggtttccacccctgtggcttccaaatcctaaaatgggatagcaagcacaaagaccacagcagcagggggtgtggtcagattcaggaagccttctcaaggcctggcacaggggctctgaggggtcctaacagctcttcaccctgcccccagtgaggagccatgcctgtgaaaacgaccagtatgggaagccgggtggctgctctgacatctgcctgctggccaacagccacaaggcgcggacctgccgctgccgttccggcttcagcctgggcagtgacgggaagtcatgcaagagtgagtgacagggaagggggtgtgtgcccattgggaggctgcgggagggttcctcaggtgtcccccacagcccggctgcctctgtctgacatgcagggagatgaaggaagtgtcccagagtgtacctgctagtgagggcagagatgggacttgaatccatattcgaaaaaagtgcttttctcactcacccaccggactctgcagaaaactaaactgattcattcagcaagtgtctagtgagcagtgagcactcactacatgtttggcactgttctggtcatcaggattaagcagcgaacgagatagatgttgtccctggcctcatggagcttatagtctagttggggaaacaaataaatgtaactttaggtggtaataagtggttatgaagaaaataaaacagagaatagtcaggcgtggtggcttatgcctgtaatctcagcactttgggaggccgaggcaggcagatcacttgaggtgaggcgttccacaccaggctggccaacatggtgaaaccccgtctctactgaaaatacaaaaattagctgggtgtgatggtgcgtgcctataatcccagctattggggaggctgagacaggagaatcacttgaacctgggaggtggaggttgcagtgagctgagatggcgctaccacactccagcctggatgacagagcgagacttcatctcaaaaaattaaaaataaatgaataaataaagcagagaatagagttaatgaggagagcaagggcctctctgaggatgtggtgtttgagccaagctctctgtgaaatgaagagggcaaccatgtaactccctgagggaggagcatgtccggcagaggaaatcaacagtgcaaaggccctgaggccagtgtgagtgtggcaagccagaggaacagcacgaaggccagcggggctgagtggtgtgagggcagagaaggaggcaggggttggattttattatatctgggataggaagctcatagtgacttttgagaatggaagtgacatgattggattcacatttgtataaaagtcacgctgctactgggtgggggatgggcagtagggaagtagccagaagactttcagtgtagtgggcaagaagtgatgtggtttacactaggatggcagcagaggaagtggtaaacagtgatgtgactccaacatattttgaaggtactccttttataccactgatttcatgactgatcagtgggcacttagctgaaaacctgctattcttccctcatttcctacccttggagtgcagaggtcagaccccagggtattgcggccaggacccatcgtcctgtatgttagcgtgtgcgtggtctgtccatctgacccagagcctcgcatccctaacgtctcctgacccatcacagctagggcattgcagccccttggccgcagcccctgggtggggatgatggtcatgtgtgtgtctgactgtaccctggcttgtgcctgctctagagccggagcatgagctgttcctcgtgtatggcaagggccggccaggcatcatccggggcatggatatgggggccaaggtcccggatgagcacatgatccccattgaaaacctcatgaacccccgagccctggacttccacgctgagaccggcttcatctactttgccgacaccaccagctacctcattggccgccagaagattgatggcactgagcgggagaccatcctgaaggacggtatgggctcctagggatgtggcccatggggatggaagggggctggggcccaggcatctgtttctcggtgccctctcagcaggatggtcccctgctgactggctggctgcactggttggcatggagatgaggggatagacagattgacccctgtgtgacccccttcttggctgagccaaagaggcagggttaggatgggttaggcagcatgggccgtccttgccagcccttgggaaaactcagggtctgtctgcattggcttagagccctggagctgcacacagcacacagccaggggacaactgaggtcttgaattggagacaggcctgccagatcaaaacagggcacacccacatgtatgtgcgcacacagggtctgtgcagctgaccttgcagtcgccaaaaactgcatgctaatgtgtcctgagaaaattgtgttttgtgagttgcatccaggtcttccctctgagctgcttgggcaggttcacagtgcattgtctttttaatgtctatgtgaaggattctgagctgtacgagttctgccccaaatctgcacttgggcctcaggatcaggccgcctccccatcaatctggtggatgccagttataacctttgccctgcaccccatccacactgtagttcagagaaaatcaacagtcagcaatcatatcacaagactttggggaaatcaaaagtaactcatcaggaaaagattaggggtccctataccaagggaactgctatttaaaggacacttggagtgaaggctttggctaagtgaaaaatcacttcctaatttattcattttgttagttcaggatttttaggcctaggatatgatgtcacacttgtgcccagagccacatgcccgttgtttcagctctccatgcaggcacgggccagatgccctcacacgagagcccacatcagccatgtagtttaccatctgccacgtgtggttttgagaggctagccctgatacaaatggcagcacacagggctttcccctattccttttccagcctcctgtccctacccccacccatctgtctagggccccagagggtccctgcacccctctgtagcccagactgctcaaaggtacctgagtccgggagggccagaggcaggcagctttgaacttcctttgaagctgttcatcactggtccctcttcccccaacaggcatccacaatgtggagggtgtggccgtggactggatgggagacaatctgtactggacggacgatgggcccaaaaagacaatcagcgtggccaggctggagaaagctgctcagacccgcaagactttaatcgagggcaaaatgacacaccccagggctattgtggtggatccactcaatgggtgagtcctcccaggccttggggtgggaggagctgggagtgtgtgggcctcagataactggaggatgaaatggacagggaagcaggggaaggcaggtgaggcgggatactttagcaggaatgagagtctgcaaggggagaaggagtccctgtcttcagggaaatgggagtgattccttaaacatagaagaaatctgatcctgtcactcccagttcagggccttccaccagctccccttaccctgagaatgaggcccacgttcttgtcaggcctgcacagccccacagtgtctgcctggcccttgtctgacctcatctgcatcccgcttcccacacttgaagttctgtccccactgcctgctgtctgtttctcaaacaagcaccccggctcctcctgcctcagggcttttgctcttggagttcctcagcctggaactcccagatatttgccggactggcttcttctctacatcaagtctcactcatgccacctcctcatggtggccttctccatcactcccctgacacccccacctgcagcccggtcactctccaccccatcaccctgctttatttccctcctggcctttatcgctctccatgtaaccttgattgacctgtttcttgtgggatgggagctccgtgggagcagggaccttggctgccttggtctccactgcatccatgaatgccaaaactgtgcccaacttacaggcactcaacaaatatttgttgaatggagtgaatgaatgaaatgtgtggtccagtgatgagcaggacaggagacccctgtgaggagctctgggacagcactcatggattgggatcacaggggaggctgttgatggcgggggtgcccaggtgatgctgaccagtcgctgcccacaggtggatgtactggacagactgggaggaggaccccaaggacagtcggcgtgggcggctggagagggcgtggatggatggctcacaccgagacatctttgtcacctccaagacagtgctttggcccaatgggctaagcctggacatcccggctgggcgcctctactgggtggatgccttctacgaccgcatcgagacgatactgctcaatggcacagaccggaaggtgggcaggcatgtgcctgtgtgggggaatctgtgtgtgttgctagaccatgcttgggcgtggatgaggttctgtgtgagtatgtgggtatctgtgtgtgtccaggcctgtgtgcctctatagatgtgtgcatctatttttctgtgcatctatagatgtgtacatctgtgagcttgcatgtcttatgtattgtgttgtttgtttgaggattgcctccatttgcgtctctttgtgtctattcgtgttgtctgtgaagttgactgtccatgtgccagtctctgcatacacaccatgtgcgcctcctcatgtgtgtgcatagatacacggcatgccttggtgtgtgtctgcactctctgcaagtgtgagggcctagggacggcatatctctacacttggtcatttgggttgtcatgtgcttcacgagtcatgtacgtgttctagtatataaggcccttcatgatatggcccctgaccccctctctggtctcttttctccccacttccttcatcccaacactctttgaacaagcagcactagacagcttgctcctcccagcacacgtcacagagcatctgccctctgtgccattactcatgcagttcattccacatggaatgttcaccccagctcctcttcccctggcagactgctcaggggctacctcccctaggatgtcatctccagacccctcttcacactggatcacccgtatgtgccctatctgagacagtgggaagctcaagggcagagatcgtgtcgttttcacctcttactacctactacagctcagcccctaacagatcctggtaaatgttgaagaaatgaatggatgaatactgcccgtctgctcattagtgtgtgtgtgtgcgcgcacgcatatgagtgtgtgtgtgtgtgtgtgcacgtatgtgtgcgtgtgtgtgtttggggactatgaatgaataggaatgagcccaggagaggaccatatggacaacctcaccatcagcatccttgctggatcactcgatcacccgctggcttcaggatctaccatcccactgtgtgcaaaactatcactctctggggctcccaggctaatgggggaaacaaagcaaaacccatgcccaggacatagacaaatgaatgtacaaaacagtgatctcacaggcctccctcaattttcttccaactccttagtaacatcctctccatccctagattgtgtatgaaggtcctgagctgaaccacgcctttggcctgtgtcaccatggcaactacctcttctggactgagtatcggagtggcagtgtctaccgcttggaacggggtgtaggaggcgcaccccccactgtgacccttctgcgcagtgagcggccccccatctttgagatccgaatgtatgatgcccagcagcagcaaggtacctccttggggctgggggcagcgtgggacctggaaggggtggtgggacttaggcattgatttgagacttccctgggagtgaaggcacttcccagggatcctaggctctgacttttgaggatcctgagaagagaactcccccaacacaatctgattctctgttccccatttcccttcctgccccatgtctgtgtctcctgttcttcaacatgatcttcttcctctccatatttcctctttctgtccccacatcttaatgtgtctcctcccctatcccttctctgacctctcctcacctcttcctccctttgcctttccccatggcccttccccacagttggcaccaacaaatgccgggtgaacaatggcggctgcagcagcctgtgcttggccacccctgggagccgccagtgcgcctgtgctgaggaccaggtgttggacgcagacggcgtcacttgcttgggtatgaggtgcctggctgggtgggagtgggaagcagaccccatcaggaggatgccgaagagtggggaggggaggatccagggtcccagtcagagattaaggaggcaatgaggggcccttagggggccaacaggaagcaagggagggggagagcaaaggctctgggggctaggagggagtttagggaagatgggaggctgggagggacttgtgaggggatggcaattaggggaaactgagtgaagaatggacagctatggatggaaggaggaaattatccttcacttcttttaaatgtatttctccattactaaagtaaaataataaatagttccaaatattggaaattactttgggaggccaaggcaggctgatcacttgaggtcaagagtttaagaccagcctggtcaacaaggcaaaaccccatctctactaaaaatacaaaaattagccaagcgtggtggcaggtgcctgtaatcctagctactcgggaggctgaggcaggagaatcacttgaagcccggaggcaaaggttgcagtgggccgaaatcatgccactgcactccagcctaggcgacagatggagactctgtctcaaaaaaaaaaaaaattaacattaaaaaatacatataatatatatgttggaaattagagaggagaaaaaagcccaaatcccaccagtgagcaccatatattgttagcattgtggtaaagtgaacaccattcttttttcctcaggggggttataattgttttttacatagctgtaatcatctgtttataaaatgtcttctgcccttttcggttcaagtgtcacagcattttctgtgttgttattgcatgattttaacaagccttgttttttattcaaaatgggttgtgttcattgtaaaacggagtaagtaaggccgggcacagtggctcacacctgtaatcccagcactttgggagcccaaggcgggtgaatcacttgaggtcaggagttcgagaccagcctggccaacatggtgaaaccccgtttctactaaaaacacaaaaattagccaggcatggtgtcacacgcctgtagtcccagctatttgggaggctgaggcaggagaatcgcttgaacctgggaagcggaggttgcagtgagccgagattgtgccactgcactccagcctggcgacagagcaagacatcatctcaaaaagcaaaacaaaacaatgaaataagtaaacagtatagaaaaacacaaaggagaaagcccaaatcatcccagattccaccacctgtagataaccactgttaccatttgggggaaccacctcccaaatgtttccctatgatttactttcacataaatggagtcgtgctgcacatactgttctgtttcctgcttttgtcacttgacagtatgtaacgagtacataagcagcatttttaatggctaaaatatatttcatttgataaatttcacgtaatttactcaaccgtttctctactgttggatgtttaggttgtttccagttttttgatataatcacaacccatgtttgttgagcatggactgtgtgctcagcactgtcatggacatttcccttgcagtaatttgtttacccctaaaaacatcctggtgggaaaagtggttttattatccccattttacagatgaaaaaactgaggcccaaagttagagcaggatttaaacccatgaagtttgacccagagcctgttttgtaatcatgcctctgctatttgtcacatcatcatgcctgcccatattctggatggtttccttaggatagaatcccggaagtgaaaatgggtcagtgcagccatagtgtacacctaggagggagtggctggggtcaggagagggcgttggctgagagggttaaggaatggaggggccaaggtaatgggaggatcatccacatggaagttgaagtcaccaagaactgaaccaggagtgattttggagaaagtgctggtgagccaggagctaaaaacccttacagatgacagggtgcagcctgggagccttccagaagtagaggttggtacagaagcatgatgtaaggggaagaacagtccagggaacagcagtgaggagcaaggaggacacataccagcctccaggtccatggtccatgggatacgggaggggaaatcgccacccatggggccatgggaagtttcagagattagagaggggtgggagatgagtcagaccaggcaagcgcccagctgtgaggtctggagaccgggctcacacaggagcctgcacttgtggaggttaccaaggcacagacaaaggacgtcgtgatttagctgctaatgggccaagacagatagtgatggtgaggcatacgttctggggacaggatgggtggagcctgcgcggatgtggtgccatcttcacttctgctggtgggaccgatgaaactgtgaaataaaaagtccagggaccggggcagggccctggggttcccggagatgacttccaaggggaagttcatggagaagtcagggaaggagtggggagagcctgttcggtggtgacagaggtatagaggccatgggctctcttggacaccatttgattctcaggtcacactgaagtacagtaagcattaagtagagtaaacatcactattgttgcttgggaaagaattgcagtttccatccagataatttgtttcatgaggaagtttgtactagaaaaaattactttgtattattaaaaaatagtaaaacaaacaaaaatggtgcaaagggcttagtacttgtcccacgaccggggtctgactttccccctcacgatcctgtggtgcccacagcgaacccatcctacgtgcctccaccccagtgccagccaggcgagtttgcctgtgccaacagccgctgcatccaggagcgctggaagtgtgacggagacaacgattgcctggacaacagtgatgaggccccagccctctgccgtgagtcacacgccctgccccaccctgttggatggcaggcctgcagggcagctcggctctggcagtgcctatactggagcgggcaggaagctgggggcacccaacttctcgctgacccctgactcattccctccccagatcagcacacctgcccctcggaccgattcaagtgcgagaacaaccggtgcatccccaaccgctggctctgcgacggggacaatgactgtgggaacagtgaagatgagtccaatgccacttgttcaggtgtggagcggggctcagatcacacgaggcacccctcagtcaaggaggcaggggagacgagggggccaggttcagtggctcatgcctataatctcagcactttgggaggccaaggtgagaggatcacttgagcccaggagctcaagaccagcctggccaacatagtgagacctcccactctttacaaaaaaaatttaaaaaaactgccgggcgtggtggcgtgcacctctagtcccagctacttgagaggctgaggtgggaggatcacttgagcctgggaggttgaggctgcagtgagccatggtcatgccactgctctccagcctagacaacagagcgagacctgtctctaaaaataaaatgaaaggagcaaaagaatttagggcagaggggatggagccctgagcaggagtggggtctgctatccccttcccagcctgggaaactgagagggctgagcttgcaggggacagagcatagctctagactggagaggaggaacaaggcagggtagatctcctcctgggaggataccagagaccccttgagagaaagagtaaagcatccagtgagaccagagagatggttttgaattctctaagagaaatggttttggatccttggaaataagggacaccaaaggcagagaataatagggaagaagaggcagtgaagagagggtcaggacaatgagtactcacacccatccctgccccccagcccgcacctgcccccccaaccagttctcctgtgccagtggccgctgcatccccatctcctggacgtgtgatctggatgacgactgtggggaccgctctgatgagtctgcttcgtgtggtaagagggatgggcagagggagtcaggctgggcctgggggaggggcatcctgagagcatgccagttgggggtgccggagacacctgcaacccagcacttgggtggccttgagtgagttaatctcggtggcctctgtgagaggagagccccatcatcacagcattgtgtctcagcaaactcatgcaggaaaagcactcagcacaggtcctgtgtctgctgactcatggggatgagtgagtggagtttccagccgaggcactgctgcggggccttccccacccttcctgactgggctaagggctgctggttatgggagggccgctgcactcacctgcccagtactgtgatgctgtgtaatcgtgaaggccctactcagctactctttcttcctcacagcctatcccacctgcttccccctgactcagtttacctgcaacaatggcagatgtatcaacatcaactggagatgcgacaatggtaagagcttgctctcctcacctgctgattcctaagacagctagaggctacagccaggccctccagggaagtcaaagggcttcagaatccagcagggcctccctccaggacactgaatccctgctgggttgcctgggagaaaacaggagaagtcagaaatgcctggagggagccacgatggaccaaggggagaccatcaccttttagtgtcattcctaccccaggcagggcctgagctgcccaccctctagtagggctcggaggccagggagagatgagtgagatgggccagagaggcagagcaaggagaaaccggtgcctgactcctttctccttgcaaacccccatttcctggagtccttggtgcacccctcaggctctgggcttcaggctcagaagcccacctggcagatagccatggaccaggtgatgtcagccttgagccaccagggctagtatgtgtgtaaatgtgcgggcaggtgactgccgtgtgtggtgtctcagggctctgttctgtctgtgttgtgttgtgacgtgctgccccagtggttcctgtcccagctgatgtgtgagcggatgtgttgggtcagtgccacgttgcccctcactttttctgtgtctcgcatgccaatggttgccccggcggtttctgtgtttcagagaaggattgtggggacggctctgacgaacagacctgtcctgagcctgccggtcagtgcatagaagcacatgcaccatcacccagagctcagctggccccagccccctgcaggttctccaggcccctactccagagctgctaggatatgaagaaaaagcaacagagaggagggagagcagaaaacagagggagaaagcaaatagtggtcaggaaagaagcagagacggcagagggagcctctgaggaaaggagatgacagagaggtggtgacaaaaagcccaagatgcaaggggaggagagagttagagaagcaaatccagttggaaaagaggcaggaacataacccaaaccccagtctccaccacatgtcccataaatacagagggtcaagtcaagcagcccccacccaatgctgagaaagcaggagcttccttcagccagcctcagcgagcttggtccagaagtggcccccactcttgccagccacaggcagggcccctgtaagccaggcacccagagcatggtattcagcagtgccagcctcagggcaggcctgtaaagcttgtctcaagccggccacgcctgcaccccacctacctctctccctccaaaactagagaaacccctgcctttcccccaaaagcaagcagacccctgttcccacacctgccagaaaggggaaatgaaatgtttaatgttccctgcacccagcctttctgagcttcagtgaggggccctccaggagccttctcctcctcctcatcctgaccacgtgggccatggtgcatgctgcagtctatgcagtttctgtgtcttttctgtttgttattttcccagtgggggggttagggtgggctgagggtgggttctgggcagggggcccaagctgggatcacagagaaggctgctccaccaactcccgctttgcctctccccttcttcccccaccgccagacaatgactgtggggacaacagtgacgaagccggctgcagccactcctgttctagcacccagttcaagtgcaacagcgggcgttgcatccccgagcactggacctgcgatggggacaatgactgcggagactacagtgatgagacacacgccaactgcaccaaccagggtgggcaccaggggcccgtggggtggggatgagatcgagccccctgcatcagacacccagcctatccatctgtctttcagacccacggtgtgtcggccaccatctgggagccagaggtagcctaggcatggctcttgtccttcaggagctcccggtcctgtgggagagggaggttgccgaaaaatcattgccacacgctgttaatatcatgcgctttgcagttggtggccttgggtttgagctccagctctgcagcttattatctgggtggccttgagcaagttacttaatctccatgggcctctgtgagtttcgtctgcaaagtggggtaataatagcaccaacatcacagcgctgatgtgggagtttagtgagatcacgcacgaaaagtgctcagcacacggcctgtgtttggtaaatagtagcttgagaaaaggatgctgcaggcagggatgaatgagcctgaagagacagaggagagagggcctggctccacaaggctcccagtgccctggcctctggggcccagcctcgggggcggtggggacctagttttctggagggatgggccctctcaaggaatgctggcttcctagctctggaagatgtgcagatttttatgtgaaaactaccaaatttttaacactacagtattagtttctctcgtctcacagttctggaggctggaagtcccagacccaactgttggcagggtgggttccttctgaggccgtgtgggagattctgtcccaggcctctccccagcctccgcggtttgctggcaatctttgcagctccttggcttgtcgaagcttgacccgatctctgccttcatcttcacacggtgtcctccctgtgggcatgtctgtcaccagatccccatttcccctttctgtgaggacacctgtcatattggattaggatacacccttatgacctcatcttaagttgaccatctgcaaagacactatttccaaataaagtcatattcacaggtattatgggataggactaatatctttttagggaacacaattcaagccataccaactggcagttgattttagaagttttaaaaggctgggtgcaggccaggcatggtggctcatgcctataatcccagcactctgggagggtgaagtgggaggatcacttgaggccaggggttcaagaccaacctggttaacatagggagaacccatcttgaaaaaagaaaagaaaaaaaaaaaaggctgggtgtgttgactcacacctgtaatcctatcactttgggaggcaaggcaggaggatcacttgtttccaggagtttaagaccagcctgggcaacatagtgagacccctttctctacaaaaaataaacaaaattagctgggcatggaggcacatgcctgtagtcccagctactcagaaggctgaggtgagaggttgagcccaggaggttgaggctgcagtgagctgtgagctcgccactgcactccagcctgggtgacagaataagaccttgtctcaaaagaaaaaaaaagtttaaaaaaaactacagaccaaactcttcctgcaggcctcatctgacccatggaccactagattacagcctctgccttatagagttagggcacattcccaccctagtaggagaagactggacagcgttgagtgcccaccttgagccctgccctgagagggaggacagagaaggccacaggaagcttgggaaatagtaattgcgtctccagggctatctctgtgaaggggagggtgaggggcacaggtgatatcccttagggttctgagaaggggcctctggaggctgtgtggtgtggtgagaagagctccctgccgctcccagataagctgggcaaatttggacaagttgcttcccctgagcctgggcatcctcctttatgaaatgagctgaggtatgtgaggcctggcgtggaggagcagggtgtcactattggtagcagttgttaactatggtatgagctggatggtctgggaccattcaggaggagttgtgtttagactgcaggtaaatggacaggagggagggtcttccagtggggatggcatggtccggagaatgctgtcgtcaagacttagagggtgaaactgagcacttccgtagggtgacagtggggccaggtggagccgttcagaccgagggaaaggctcgtgcagggacagtggggaatgaggctgtcctcaaagggggcagatgatgacagcaggtgtaaatcgtgagaggcttgatttgggaggcactgggaacctttgaaggatttccaagccggaaggtgctgtgatgtaggaggtgatttcggaacacagccctagaggaagattagattgagaagaggttcaggggccccaagaaaggaaaatcagttcagagactgctgctgaaagtcccggcatgagatgagagcatcagctgggtccagggtagggaagggggaggagcggggtgtctgtggcagcatgagtgtatgagtgtggggctccaccaggcagtgctcctgctcctctcctggcctcctgagtcagatctcaggacagcagccagagtgatcctgacaacataagtcagatcatgccctggccctgccctccagcctgtactggctccctgcacccttggaacaaatgccaagcccctctgcacggcctgcagggcccccacccctacccctctgacctgcattcctgccctcccctccccctgcactctactccagctgtggcgttttcttttttctttttttttttttttgagatggagtctccctctgtcgctcaggctggagtacagtggcgtgatctcggctcactgcaagctctgcctcccgggcagctgtggcgttttcttttctttcttttttttttgagatggagtctctctgtcgcccaggctggagtgcagtggcgcaatctcagctcactgcaagctccgcctcccagttcacgccattctcctgcctcagcctcccaagtagctgggactacaggtgcctgccaccacgcctggctaattttttgtatttttagtagagacagggtttcaccatgttagccaggatggtctcgatctcccgacctcgtgatccgcccgccttggcatcccaaagtgctgggattacaggcgtgagccaccgcgcctggcctgtgtgctgttttctgaagtgctggcgtagtcctatctcggagatgagactttgcagcggctgttccccttgcctggagtgtgcctccagggatcctctgggctcactcgctcttcatgcaggcctctgctcagattccttctgcccagaggtcttccctgaccatcttacctgacagatcacccccatccctctcagcttctacccagctttatctccatagctttatcaatacctgaaattacagtctagatttatgggttatgtcttgtctctcttccccattagaacctaagctccatgagggtagggactttgtctggttcagtgctggccccaggacagcgcctggcacacaggaggcactcagtaaacatttgtggcatgaatgaatgaaatagaggctaaggaggtgggcatttgggctcaggccttagcaaattgcttctccagctgagatctccggtgtcaatggggggattagatgaggtgattgtggggcccttggaggtgtgatgcctcctgactctactactgagttggtgcttccaaggagtgtcagcaaagcttggcagactctccaggcctgcctctgctcatatccccaggctgggcttaccggggtggcagggcacagggatgaggagggctgacctgggcaacccctccctcctgaggccctccactgtccctctgcagccacgaggccccctggtggctgccacactgatgagttccagtgccggctggatggactatgcatccccctgcggtggcgctgcgatggggacactgactgcatggactccagcgatgagaagagctgtgagggagtgacccacgtctgcgatcccagtgtcaagtttggctgcaaggactcaggtgaagaggatggttggagggcgtctggaacagcacaatgtgggcaggaggagaccgtgttgagagcagagtagcggcaaaggggatggcactgtgctgtgtggagtggtgctggggacagtgcaaggcaaaaggcagtccagaggaagcttgtgtgtcatgggtgggggaaggcatgaagggccagagcctgcacagaggacctgagaagccaaaaccctaccagagttgagcttcagcacctcctgctgcagattcctgccttgtttgttgcctatgtgaatttgacccaaaaagcctcggggttcctcgtggaccccacagcgttgcaatcctgaccctattagagaagcccacagggtctggaaggaagggcagggggagccccagtccccgggcctgggccctcatagtgcacctgtccctcagctcggtgcatcagcaaagcgtgggtgtgtgatggcgacaatgactgtgaggataactcggacgaggagaactgcgagtccctggcctgcaggccaccctcgcacccttgtgccaacaacacctcagtctgcctgccccctgacaagctgtgtgatggcaacgacgactgtggcgacggctcagatgagggcgagctctgcggtgaggcctggtcccaggagaagggtagggagggtggctgggtaggagtctgggccaaggacagtctttgggggacctgagtctaggagagagcagctctggcagccgggcaggcgagcagcacccagagtggtcaccagcagcctgtgtggacctggcgctccccatggcgctgtgctgagtgagccacgccattagagcagtttatccacaaggcatccctgggggccaggtgctctgttttctccgtttgacagatgggagcactgaggcatggaggggttccatagtggtcccccagacttgggccaaggtagtacagctcctaaactgctgtggagactcagaccccttgcccacatgcataccacagagagatgcggagtgctcttgtggagacaaaggcaccagggttgactgctgatggtcagggcaggcttcctggaggatgtggggattgcatggggttcccaaggacaggcagtacttgcagagtgagtgagaaggcatgggggcaggcgcggtggctcacacctgtcattccagcactttgggaggctgaggcgggcagatcacttgagctcaggaatttgagatcagcctggccaacatggtgaaaccctgtctctgctaaaaatacaaaaattagccggacatgtctgcagtcccagctacttgggaggcagaggcaggagactcgcttgaacctgggaggcggaggttgcagtgagccaacatcctgccactgcactccagcctgggcgacagagcaagaccccatcccaaacaaacaaacaggcaaggggaggagggtgcccattcaagaccaaaagagatgaggttgggggagtccaggagtcagggaggaccatgtggtgtgacttggggatgaggagcagagcagccttatctggtcctcttagccaggcagagcccccagttccttggaagggaggagtggaagataaggccacagggactggctgggagaactgccgacaggctatcagtcaggctggcagtttccagggtgtgccagaggaccaagggtggtataggccctgctgcaccccaccccaaacccctccaaatcaggagagatcagcacaaggggactggacctaaggacctcccagggtccctcccagggaggcaaaaagctggggcccccgccctgggcccaagaaggcaggaacatatcgagaccagacagagatattgaggggtgctccctgtgggaaggggaggtatggtgccagctggtgggtgcaagggtcccaactctggtcctgagggagcccaggaagtcctgggctgaagctcagcctgaagctcagcaggaatggagacgaatggggccgtgggcagggcacaaggacttggtccaggctgcccaggacttggggcccagcagggccgtggtcttgcctcctctcagcttctgaccctgggtctgttccatgcctgcccctcccctagaccagtgctctctgaataacggtggctgcagccacaactgctcagtggcacctggcgaaggcattgtgtgttcctgccctctgggcatggagctggggcccgacaaccacacctgccagatccagagctactgtgccaagcatctcaaatgcagccaaaagtgcgaccagaacaagttcagcgtgaagtgctcctgctacgagggctgggtcctggaacctgacggcgagagctgtcgcagcctgggtgagacaacagtgaggtgtggtggggcaggccgaggcaggcctctgagctgcagtgggttgggcttggtggccaggtgccaaaggctgagttttccaccctagcccccagtgcccggaccagcagagacctgcctgcgccaggacgggtggcacacaggcagctagccccttgctgaccccatcacatccctcccatcccagaccccttcaagccgttcatcattttctccaaccgccatgaaatccggcgcatcgatcttcacaaaggagactacagcgtcctggtgcccggcctgcgcaacaccatcgccctggacttccacctcagccagagcgccctctactggaccgacgtggtggaggacaagatctaccgcgggaagctgctggacaacggaggtgaccaccgattgctgccaggcaggatgcacacaggcggagcgctcaggcgctaggggccacaggtcccatccaagtggccccaaagcagaggcttggctcccccatcccccacacttctgttcattgggttagattttgctgtgggtctccatgcctgacgccccgtaattatcgtcagcagaactgccagcctgataattaacaaaatgatcagccttacctttgaatggcctggagctctgctccccagatctagaattgcaggcttgaaagaaaaaagccacttaggagtggcgtacctgaacgctgctttctgtcccaggcagcgtggtgcaccccagacttccttcagtcacacacaatagtgagtgcccactgtacacactgggcagtgggcatgcagcagtgatcaaaacaggctgttttcagttgtgtggtcaaggaaggtcccctgagaaggtgacatctgagcaaaggcttctaagaggcacattttactagagaagtttgtattgtttgtaataatacaaacttgaatttgaaaccattacaaatgtccatcaacgaggggggaggctaagtaaactgtgatgatatccacactgtgcaacagtctctaaaacaatgaggcacacacataatgtattagcatggaaaaatctttatggcagtcacttgagctcaagcagttgaggctgccgtgagccatgatcatgccactgcatccagccttggtgacagaagaccctgtctcaaaaaaaaaaaaaaagttggggagacaataggagtcctactcttgaatatgggcacatcagaaactttggcagaagtgccagggttgagggtgggtcatcgagggctcccaggatttcacacattcatgcacagctccccaggagacgctaacctttcactgccctctcttctccagccctgactagtttcgaggtggtgattcagtatggcctggccacacccgagggcctggctgtagactggattgcaggcaacatctactgggtggagagtaacctggatcagatcgaggtggccaagctggatgggaccctccggaccaccctgctggccggtgacattgagcacccaagggcaatcgcactggatccccgggatgggtgaggaccttgcccagccttctcctggccccatggcccccctgaagtcccattcagcctggccagggacaccttactcctcagtgccatctgcctcctcccaccctctacctacgatcccaccacagtcgctccctgagggccctgactttagccctcctgacccctccccactccccaggatcctgttttggacagactgggatgccagcctgccccgcattgaggcagcctccatgagtggggctgggcgccgcaccgtgcaccgggagaccggctctgggggctggcccaacgggctcaccgtggactacctggagaagcgcatcctttggattgacgccaggtcagcaccctctgtgccctgagaaggcccaagtctgtggcaccaggacggggtggggaggaacctgtggtgatgagggtgatgagaaggaccaagggatctagaactaggaacggtggcaaaggactgggcacaggaggaggaggacggaggggcgtggggaggccagggccgaggggagggggcaggtagaggaggcggaagcagggccatcagctgtggttattcacactgtaccatcctctccactcacctgtcctctccactctgttccctctgctggggctgtgtctgcccagagggaggggaaacttctttctaattggtctgcccagggagggtgcctttttcttttctttttttttttttttttttgagacagagtctcgctccgtcgcccaggctggagtgcagtggcgcgatctcggctcactgcaggctccgccccccggggttcacgctgagggtgcctttttctgactttcatcaaagccctgagtgctgacagcagccctggggagaagtgaccgaaagattcccttggggcttgggaatcggggcctgagaggtgaaacctggacctgttgggttctcacaccttggtccttctgtctgtctgctctggccagcaaggcttaggggagggaatggtcccatgctcttcgctgggagggctgtggccagggcccagagggtgggcacctgggcagagctctgagggctgagatcccagctggcatcctcattctgctccatcatgctcttaggtcagatgccatttactcagcccgttacgacggctctggccacatggaggtgcttcggggacacgagttcctgtcgcacccgtttgcagtgacgctgtacgggggggaggtctactggactgactggcgaacaaacacactggctaaggccaacaagtggaccggccacaatgtcaccgtggtacagaggaccaacacccagccctttgacctgcaggtgtaccacccctcccgccagcccatgggtaaggggctcggggcctcgagcagccggaagggagccagcagcctctttagaagctgtagaagctcttaggagaggagagggcagtgagaacaggagcaagtctgtgctgggatggcaggggtaggccggctgttgacagaggcactgtctagcagcagagaagggtctagtagtagcggctgctggaacagggggaggagagtgggcgaggaaggggtggtccatgtagggagcagcaagtcacaggatgctctggcttcttctcttctccaccctgcccccagctcccaatccctgtgaggccaatgggggccagggcccctgctcccacctgtgtctcatcaactacaaccggaccgtgtcctgcgcctgcccccacctcatgaagctccacaaggacaacaccacctgctatggtaggagcccctccctccagagccagtgagcaactgaggctggagggaaggccgcaggccccaggatcccggttgtcagctaaggcagagtcccagtcgggagggtcccgataggagaggctccagagacagccactgtgagaaggggctgcaggtctgccaggggggctgcacccagcggggtatgtccacggagccaagggccagtagcaaacagacggatccagaagaaggcagggcctgaaaccggattggtgggaagcacagaggcagggactgccttcagtgaccagcccatgccccacagagtttaagaagttcctgctgtacgcacgtcagatggagatccgaggtgtggacctggatgctccctactacaactacatcatctccttcacggtgcccgacatcgacaacgtcacagtgctagactacgatgcccgcgagcagcgtgtgtactggtctgacgtgcggacacaggccatcaagcgggccttcatcaacggcacaggcgtggagacagtcgtctctgcaggttcttcctggccctggatgcccaccagtggacatgggcacctccacccgccccttgctcccaaccctggtctacttggtccgagtggtccttctcccagtcctgttccccctcagtgctccagcctggtttcctgatcccttttctccagaaggcacactggctcccctcctgacccactgccctgcagacacccaacaactgactccctacttgtgcccccagacttgccaaatgcccacgggctggctgtggactgggtctcccgaaacctgttctggacaagctatgacaccaataagaagcagatcaatgtggcccggctggatggctccttcaagaacgcagtggtgcagggcctggagcagccccatggccttgtcgtccaccctctgcgtgggtcagtctagggcccagggccggggagcatggggtgtggggctgggaagaagaggaccctgacctttccctcttggcaccctccccccaggaagctctactggaccgatggtgacaacatcagcatggccaacatggatggcagcaatcgcaccctgctcttcagtggccagaagggccccgtgggtacgagcttccctgcccacccccacagcccctccctaattccttgaccagcaggtgcttgcagggtccttcagttgcccctcagcctccccagagccctagcttagtgcctgttctcaccatctgctcccttccctggatccccagccctgggccagactccccggcagtgactcccccttttccaggcctggctattgacttccctgaaagcaaactctactggatcagctccgggaaccataccatcaaccgctgcaacctggatgggagtgggctggaggtcatcgatgccatgcggagccagctgggcaaggccaccgccctggccatcatgggtgagggctgctgggcgaagcagagatgacgcagagcaggccaggccagacctactgggagacaggggctggcttggggcagtctctcaccatgtggggcgggcctgatgacttagggccaatgggcccttcaggagagctgggtgtggggccttcccaagggtctcatcccctcctgctgccccaggggacaagctgtggtgggctgatcaggtgtcggaaaagatgggcacatgcagcaaggctgacggctcgggctccgtggtccttcggaacagcaccaccctggtgatgcacatgaaggtctatgacgagagcatccagctgggtaggtgcgaggccgggcggccgctgggggctcaggggcaacaggggagccgtccagagctgcaggctgcagggccatggggcaagggagtaagtgggttaggctgtacccaccacccaaaggggctccttgtttccttaccacaaaggcgccttgtaggctcccagcagccctgttcacaaggccaggggcccaggaggacagaaaacctgagagctgggtagggtggtgacccccattaggtccagggtagtcagtgaccatcctgtttctgagcagcccaagcctgaccctgaggtcccaaggagggccacctaaccctttccctctgcctcccacctgcccccagaccataagggcaccaacccctgcagtgtcaacaacggtgactgctcccagctctgcctgcccacgtcagagacgacccgctcctgcatgtgcacagccggctatagcctccggagtggccagcaggcctgcgagggtcagtgcctggctttcctcccagccttgtcccagctccccaaccctgacccctcctaccctacagccccaccttcctcttcttaccttggggacaagactacattcgtcgtgtaggggacactggactatgaagtggctatgactctccagtgcctccagtaggattttggaaaaatagatgtcagcaggcagatcggggcagctgcatggaagaggcatgctctgagctgggttttctaggacaagtaggatttggatgcattgttcaaaggagagggaactatacacaaggcaaggtgtgtgcaggagccccagccaagagtggtgggcaaagtgtggggaagtcctggagataaggctgtgagctaggcggggctcctgtgttctgagccaggagtgcctggaaagtgatgtttggggaagatcaacctggccgcaatggtggtggggaagaaacagaggcggttaaaccagttaggaggccattaggagtaatcagagtgtgagatgatgggcctgggctgggctcagtaagggttgaagaaaagaaatgaaacccagacgcatttcacaagaacctgctaactgatttatgagcttgctgggggacagcatttcccaaaagtgcattcctaggagcctccctctttgatgtgggtagattttaccaaaagaaactctgagttgaacaaagtttaaaagtgttttgtgctgcagaacttctcagagccttgaatatgtttatgtgtgccaagaatttttcaagcgtttggggttttccaaaactcacttgaccattcatttttttttcactgagtctgagcaaccagggaccatgtggggattcactttgggatgtgctgtatcaaagggataaaggcaagggaggattctgaggtgcatgggtagtggtgcctcaagacatgggaaaactgggccaggcgcagtggctcaagcctgtaatcccagcactttgggaggctgaggccggccgatcacttgaggtcagaagtttgagactagcttggccaacatggcaaaactccgtctctactaaaaccacaaaaattagctgggcgtggtggtgggcacctgtaatcccagctactcagaagacctaggcaggagaatcacttgaaccgggaaggttcaagggttgcagtgggccaatattgtgccactgaactccagcctgggcgacagatcaggactccatctcaattaaaaaaaaaaaaaaaaaagagccaggtgcgtggctcatgcctgtgatcccagcactttgggaggctaaagagggcggattaccttgaggccggggttcaagaccagcctgaccaacacggagaaaccctgtctctactaaaaatacaaaattagccgggcatggtggtgcatgcctgtaatcccagctactcggaaggctgaggcaggagaatcacttgaacctgggacgcggaggttgtggtgagccgagatcgcgtcattgtactgcagcctggggaacaagagtgaaattccgtctcaaaaaaaacaaacaaagaaaaacaaaagaaaagaaaagaaaaagaaatgggataactgggaatgagactggcttcggagtgaccttagggggttgagtttttgatgttggagagagggtgtggcatagaccagacagagggaggacaaagaggaaactaggatcaggctgagcaccaaactggaagtctagattttggagtcacctagtcctgattgtctggtctgaactcccagactttccctaaggaacttgcaggggtgcagggttgggttgtgctgggtggaggccggcagagcacagggtgagaaatccgagtctctgctgccctctcatggtggctaggggtcctgcaggtggttccccagagctaccagccaggtgcgcttcctcccggcccatgctctggcctcaggctagggtgtgtgtgctgggtggaggatagggatgatggtggggggggatgatatcaaaggagaagcagagaacagttggagggtgacaggaaccaagtttaagggagtgttggcgatacccatgccttaagtttccttgtctttcaggcgtaggttcctttctcctgtactctgtgcatgagggaatcaggggaattcccctggatcccaatgacaagtcagatgccctggtcccagtgtccgggacctcgctggctgtcggcatcgacttccacgctggtgagccatttggtggcagagggagttgggcgtggcgtaggagctttaggggtggtgtggtgtgccctgagggtccagtgagaggctgcctgaattggcctgaggtggggcacttgctacagctgccaccctgactccacctccccttcaagcacctggcccctccggcactctctcacctctgtcttgagccttgtgagattttgacccctcaccttacccctgccttattgggcatccccatgtcacctcctccacctccagaaaatgacaccatctactgggtggacatgggcctgagcacgatcagccgggccaagcgggaccagacgtggcgtgaagacgtggtgaccaatggcattggccgtgtggagggcattgcagtggactggatcgcaggtgagcagtgggcaggtttgtggggcttggggtgtggcagaggactgggggacgaagtgagaggaggagttggcgggagcaggaagaggagctgtaggggtgcctgggagcttggagacaccaggtccacctgtcctcacctaacctccctgagccccaccaactccctccttaggcaacatctactggacagaccagggctttgatgtcatcgaggtcgcccggctcaatggctccttccgctacgtggtgatctcccagggtctagacaagccccgggccatcaccgtccacccggagaaagggtgaggagctggaaagactggccttgtcattctgcccatggcccatgctgatgaggccctgtctcctccagggtctgaggactgacccccacttccacccccaccctacaggtacttgttctggactgagtggggtcagtatccgcgtattgagcggtctcggctagatggcacggagcgtgtggtgctggtcaacgtcagcatcagctggcccaacggcatctcagtggactaccaggttcgcacgccaacttggccttggatccgatggtagacccctgacccaggcttctgttccctgtgatgagcccattctgggaggacttggagcccaggggaagtcacagggtctcccagcccagccctccacccagagtaggactcctgctaccacagagatgatgggcaggggtcgctcagaagtggggagtgggggagtggagagatgcctggaggtcaccttatcagcagggcagtgggcaggagtgtatgcaggaggcaggagtgagttaggggaggctgaactgagggcctcactctggcccaggcactccctgctgccccagacatggggctggcagcgagctcagccctggaggtgaggtgggtgcctctggcctgtaggatgggaagctgtactggtgcgatgcacggacagacaagattgaacggatcgacctggagacaggtgagaaccgcgaggtggttctgtccagcaacaacatggacatgttttcagtgtctgtgtttgaggatttcatctactggagtgacaggtgagggcttctgtcctggcctcctcagctgatctcttccttccctcctgcctccactgatgccctgcttgtgccctgtccttccctcaggactcatgccaacggctctatcaagcgcgggagcaaagacaatgccacagactccgtgcccctgcgaaccggcatcggcgtccagcttaaagacatcaaagtcttcaaccgggaccggcagaaaggtgaggctggggctctgggctggggtggagaggtgagggggactctggcctgggagagtgctccccagggaacccagtgtgagagggctgggagacaagttagacccatggggcaacttccgatggcccgagagacccagggatggggaggaaaggctgaggtgctctgggacagatcttggcattgggctctgggccctggagggtcattcaagctgggaataccgaggcagagggcagagctttcgccaaagcctggatgacaaaggcaccagtgagcctttcccaaggcaggccctgccctctgtaccctcccctcccccaggcaccaacgtgtgcgcggtggccaatggcgggtgccagcagctgtgcctgtaccggggccgtgggcagcgggcctgcgcctgtgcccacgggatgctggctgaagacggagcatcgtgccgcgagtatgccggctacctgctctactcagagcgcaccattctcaagagtatccacctgtcggatgagcgcaacctcaatgcgcccgtgcagcccttcgaggaccctgagcacatgaagaacgtcatcgccctggcctttgactaccgggcaggcacctctccgggcacccccaatcgcatcttcttcagcgacatccactttgggaacatccaacagatcaacgacgatggctccaggaggatcaccattgtggaaagtgagcccagaccctaagtcttcccaggaagtgggacatggggcggggagcagcacagactcttagaccccagccaggcactctaccctaggtctgaatcccagcagctacaactcagctgaatccaactgcacccccgcagttacatgactcctgatttggagtcagcgtcagcccccgacttcctcccgccactggtcctagttctgccttcagagctgcacagaacaagcgagaggtctctgtggagcccaacgctcacaaacccaggctgcagacatggggctgagctccagtcacttgggctttcaataacttgggtcagtttcctgctcttgccaagcctgagccttctcatctgcgtggatgagtgtctcatctgagacaggattcctcgagctgctgcgcaggaaggcttagctcagtgatgctggggacggagtgtgtgctctggaaagagcagttacagtgtcagggctgtcatcacaggacagcctttcagctctttgaaaactgcatcctgctacattttctcttcttcagcctggttaccaccgggtcccttgactcattcatttgctcatatattcattcagctggtccataaagacctgccaggcaccgaactaggtgctacgtatacagacctgtcctttcagccttttctgggacattttctgctgcacgtagtccagcctgcatgtctgtctaaaaatgtagcatccgaagctaaactcggtactccatgctcgtagcttgatcaggagagactggcacatcaatccccagacccctggaagggatgtcccctcacctccggctgtctgcagaccataccacagcatggccctttggcagccaccatcgcttatagccactaacactctagtcttttctcttacactgctgttcggctgtgtctctcactgtgccttggttctttaacctgagtttaagatgtctgctttataaaataatcaatccagctcagggtctttttaagtagggggctccccagtacagcccaagcaggatttgatttacagaaatctacattgcactcagctcagcagaactgcagctccaggaaagtgcaaacacaccagaaagcccgattgccctcagtgggagagggttgagaggtgaccacaggtcatttgagtgaggacagcagaggttgggggcactgagtcagaccctggtgcccccgagccctctctgctgcacctcttgcactcccataccccacacttcgccttccagccaggagagcacctgccccaggctgtcccccacggctcctgtgcaggctgccctctgggccctcctgacaaatggctgctcctgtctcttcacagacgtgggctccgtggaaggcctggcctatcaccgtggctgggacactctctattggacaagctacacgacatccaccatcacgcgccacacagtggaccagacccgcccaggggccttcgagcgtgagaccgtcatcactatgtctggagatgaccacccacgggccttcgttttggacgagtgccagaagtgagctgctgcctggggatgggggtagcagggagaggtgggactcggggtggcagaaactccccaggcagatccaagcgggggtgcaggagaggcaggccctcacttgagctccacccttcccctgctgtgtgatctggggagaggtgcaaaagcttcctaagcttcaggttcctcttctgtgatacaagctggctaagattccagctgcctgcaccaaagggagcatcaggactgtgggggacgctctgcctttgtgattgattcattcatcagagcaccatgttggaggcacagggtagggcctctagctctgggatccaaagcttcaggcaaagaatgtttgtcgaacccttcgtacagaagcctaaggctgggcctaccaagccacctagctgggttgagaagtcatacttgtgggaagtaatggtaactggcacagggctgtatacgggtgaccacaggtgtcatgaaggcagtagattggcccagagcctggaactggaaaagacaaggaaggccagctcggacaggggaagtgctttgagcaaaagcctgaagaaaggcaaattcaaggcagggaggacagagggggacctctgcatgccatagagcataggcaggcctgagcccagccaggaagtgaggtcagggtgcggaggagttaggagcacaagccaggacaggtggcagaaagcacccgggggtgggtgctccccctggagggttcacccgcagtcagcctgctctgttctcccgcaggggcagccctcatcccggctgtttgggcctctagtgagccaccccctcgccttagggatccaggcccacatgttagcaacatttttttcccaattcagcagtgcttggaatgtttttcaaaagctttactaggaaactagtaaacacaacccaaagcagctgtatagatacgtgagtgtcccgaacccagattccccccaccagtcccccaatgtcagtcacctccaacctggctcaaggaccctctgtttcctcctgcctctgtcatctggcacatctgcagctgatgatgaaggtccagtccccccttccatgaccctcggctgcctcacctgtctggggatggcctcagagcctgtccctcatgagtctggagcttccctggagggtccagcaaggctgcctggccctcgtcccagaggacgtgaccccctggctgcccaccaagctcctttcttatgaggccaggggattccatcacgcattcagcgagtggcttttgagggcaaagaaggtgcagaggacccagtggggagcgcgaggggcgtcatgaagagcttcgtggctgtgtgctgaggactggccccacctggaagtcagggaacgtgtccttgaagaggcggcatgttagccagcgtctgaggatggcaggagtggctgggtgggagcatggtcccagtgcccaggagaaagagctgagctggcaggaggggccctccccctggccacaaggagcaggcactttcggggaatcagaaggagccagtgtggaccccagtggagagggcaggggcaagtggagactccaacaacccagcctcctcctgagccctccccgcgtcagcactggagcactgatggccctgtagagctcacagtaggatagttagaaggtccgccatgttcctggacactgagcacctaccccaggaaagnnnnnnnnnnnnnnnnnnnnnnnnnnnnnnnnnnnnnnnnnnnnnnnnnnnnnnnnnnnnnnnnnnnnnnnnnnnnnnnnnnnnnnnnnnnnnnnnnnnnnnnnnnnnnnnnnnnnnnnnnnnnnnnnnnnnnnnnnnnnnnnnnnnnnnnnnnnnnnnnnnnnnnnnnnnnnnnnnnnnnnnnnnnnnnnnnnnnnagtttgttgacgccaggaggaaaaccacttctcactgcaggtgtgagtagtttcacctgaggtgtaggagttcctggtggggactgacaggccaagtccaatcctgacaagccaggaagatgactggccactgccccaggatacccattttcccttatggaggctagaaggacacgccgcctccctcccaacttacatcccgattccagagccaccgcaaacccctgctctcctccaggatgaggcccttaagatcagagcttctcacgagctcgccgaggctcagggcagccagtgtctccagaggggcagagcagcaccattttcctacgtgagcccagcagaaggcgggatagttcaatggtgctggagacgctgggggtgggcaagaagggtgtgacctggagaggtctgaggagacaagttcacaggccagaggacagatctgtggccagaatggtgaggggcagaggtaggaggaggccagaggcactggggtgggggcgggggcaggtcctgttagggaactggagaacggagctggcttttgtgtggcttggtggtctcagactccactgtgcctaaggatcgcctaggagcaagagaatgtggagtcccctgccccgccctgggcctagctgagtgacaagctctgggaccgaggacccagggctcaccatccaatgccggtggtccaaggaccactctgtcacacccagggtagtgcatgaccagccctgaggccttccacagcccccctccagcctcagcaccaccccacaaggagcacggcataattgggggctggctgttcccattgcctcctttactgagaggaaaccagggctcagaggggcgacaggctcattcaaagtcggagccgttacgaggcagaacggtggctccaaccccaaacatgcaaaggcctcaaagtacggagaaggggactcttgagagctgcttgaggataggacccacataccccaggacctgggacacatgccacactcagctccacaagggcttcctgaatgatctggaagacagccagcctccctgcacagaagagagcagttaagaataaactcctgggaaatactcacatagtgtgtgccatctgtccttaagatggagattaacttcttccactctcacatcctgcgaggcaggtggtgctaccatccccacctcatagaggaggaaactgaggcacagggcagttgagtaagttgcctaagggcacctagctggtgggtggtggagccagggctggaaccccaggggcctgtctcacttggctgcaccggctctcttctcagcaagtagacggtcactgcccagatactgcaatgtgaatatctcacacttggccctcatcccctcacactcagccacctcgtgtgtgaactgtctgtgcaatagtggggcccttcctgggcattggggcactgctggcctctatggctctggggtggctttgccctggcaggcttccaggttccaggtgcctacgcgtcctggcctgtgccctctgttgtggattctcaggctttgcctcctgatctctggaccctcttcccccagcctcatgttctggaccaactggaatgagcagcatcccagcatcatgcgggcggcgctctcgggagccaatgtcctgacccttatcgagaaggacatccgtacccccaatggcctggccatcgaccaccgtgccgagaagctctacttctctgacgccaccctggacaagatcgagcggtgcgagtatgacggctcccaccgctatgtgagtctgcggggtgggtgagctggcgggcggctgaggggaggccagggccagggtcagccgtcaaccaagaccgtccaggcacagacatggtgggaacagctgggaggaggtgagtgcctccaggccccagcctcggtcaaccccaccctgtccagcttgctcctcatcagctagacgagggagatagcaggatgcctctgcgggccctcattctgtagctgtcagaggccaggccaggctgtggtccggtggagactgggcaagaggcctgagcgatgctgtgacggtgatggtgctgtctccacaggtgatcctaaagtcagagcctgtccaccccttcgggctggctgtgtatggggagcacattttctggactgactgggtgcggcgggcagtgcagcgggccaacaagcacgtgggcagcaacatgaagctgctgcgcgtggacatcccccagcagcccatgggcatcatcgccgtggccaacgacaccaacagctgtgagtggggctgccgccagctgcctcaccctcctgcnnnnnnnnnnnnnnnnnnnncacaccacacatactataccacatacacatgcagtacacacaccacaccacacacacaccacatacacagataccacacacactgcagcacacacaagacacacaccacaccatgcaacacaccacacacacaccactgcaacacaccacacacacaccacatacacacaccacatacacacaccacacatgacacatacacaccacacataggacacacatacacatgccacacacctaccacccacaacacatatcacacacacaccacacagcacacacacacaccacacaccacacgtaccacaaacatgccacacacacacacacatctcacagacatactataaacaccccacaccccacacaccacaccccacacacacttgcctggtcctgctctccctgggcctccattacacagacacacacagctgtacacacctttggaaccgcaaaacccccagtgctcctgtaccccttcccaccaaggcatctacgcacacagatggactctgcacacgcctggcatctcctccacgttgcacacacacattcatgtcacacccgcccctcagggctcatccatgccctcggtgcccctaccctcaccctggtcactctcctcacttggagccacacagacagccgagagcctgggtgcacgtgccctcagtgggcacgagtacatgccccagcgccccccaccacagacctgcagctttcccaggtgtctcccatgcgccctggggctcactactgcacccgtgatctcagggccctcagactcgaatctctcagaaacactcctcaaagcccacggtgccctgcctaaaagcacacacatcctcaacggcacacctgccgaaaaccccatgcacctggccctcccacagcagccatccccatgccctccccactggctgcaagccgctgtgcctgccgtgactgagcagaggcttgggagctccatgaagtcagtgaatgggtgggtgcactctgggtgcatgcacagcagagaacactctccagccctgcgcccaccctgtccctgctcaggtgaactctctccatgccgaatcaacaacggtggctgccaggacctgtgtctgctcactcaccagggccatgtcaactgctcatgccgagggggccgaatcctccaggatgacctcacctgccgaggtgagagaggcgggggggaggggctggcggggaacccaagcacacaccagggatggtgaccatctcccctacatgctccagcccagccccccaaagccttttgccaagaagacgctgatgatgacctcagctccccgggggaggaggcgtgggcactggggcccacagcgctggctcagaaagctccctccacctccctccccagcggtgaattcctcttgccgagcacaagatgagtttgagtgtgccaatggcgagtgcatcaacttcagcctgacctgcgacggcgtcccccactgcaaggacaagtccgatgagaagccatcctactgcagtaaggagccccctgcagcccctgcctcttccaggcccagagcccaggtcctcctcccccaggcccctgcaggatggagcaggatcaggacccagcttcctgaccatgagttttgggagctcatgaagggcagaaccactgttagcctggactgggcctttgggtttgggggtggccagctggacacgtgcatgacgtctcagggaggcagccctttccctgtgcctgtggctgacacgcagcctactcctccatttgcagactcccgccgctgcaagaagactttccggcagtgcagcaatgggcgctgtgtgtccaacatgctgtggtgcaacggggccgacgactgtggggatggctctgacgagatcccttgcaacagtgagtgaggcgcactggcataacccatctgtacctcagttcctgccccacccctccctggccaagctttgtccctgggccccgtggtgtctggttcaaggcactctgtgacaggccagggcaggtgctgtgggccaggagctctgtcctgcgtccttctggcccccacagagaaaactctggcctgacgatacggggcgggcactgttctagagacagcctgtggtgtgggcgagttccgctgccgggacgggacctgcatcgggaactccagccgctgcaaccagtttgtggattgtgaggacgcctcagatgagatgaactgcagtgagtgacgccctttgctggcacctcctgggctcctccccattgctcactgcatctcccgccttcaggccctcctgcacctgcccacattcctctctgccttccctcatccccgctgacagcctccatctccctgaggccctgtccccatcccgctcctgctcctgggctctcgtggggttccgagagggggcagtgagcagatggtgcagacagtgccccaccagaagggcaccgttcaacttttggaaacgcatgaaggctccatagggctggcagctgccccagtcgggggtgatccagggggaaccaggtatcacccnnnnnnnnnnnnnnnnnnnnnnnnnnnnnnnnnnnnnnnnnnnnnnnnnnnnnnnnnnnnnnnnnnnnnnnnnnnnnnnnnnnnnnnnnnnnnnnnnnnnnnnnnnnnnnnnnnnnnnnnnnnnnnnnnnnnnnnnnnnnnnnnnnnnnnnnnnnnnnnnnnnnnnnnnnnnnnnnnnnnnnnnnnnnnnnnnnnnnnnnnnnnnnnnnnnnnnnnnnnnnnnnnnnnnnnnnnnnnnnnnnnnnnnnnnnnnnnnnnnnnnnnnnnnnnnnnnnnnnnnnnnnnnnnnnnnnnnnnnnnnnnnnnnnnnnnnnnnnnnnnnnnnnnacttcgcctgccctagtgggcgctgcatccccatgagctggacgtgtgacaaagaggatgactgtgaacatggcgaggacgagacccactgcagtgagtgaccactgcacccactcagtgctccaagagcctgctgggccccacttcttagtcccccccagcaaatgcccccttggaaaagggcatccagagccttcaaccccctgccccacaccccaactcttgaggtcagactcagagactctgcctctagctgctgctgagcccccccacagaggggtgctgtgggcatctctcctgtccttcccatggcatcagcctccccaggtgggtgacccccacccttccccatctaactgtggcttctgactgccccagacaagttctgctcagaggcccagtttgagtgccagaaccatcgctgcatctccaagcagtggctgtgtgacggcagcgatgactgtggggatggctcagacgaggctgctcactgtggtaaggaagctgggattgggccgggggaggtgccccagggagggacagaccccacccaactccaccccacacacagacacccctgcagacgacggcgaaccatcacctccactgctagacctgatctacccgctcctaagtctctcagtggccctctctccccctacagaaggcaagacgtgcggcccctcctccttctcctgccctggcacccacgtgtgcgtccccgagcgctggctctgtgacggtgacaaagactgtgctgatggtgcagacgagagcatcgcagctggttgctgtgagtggcggggccacgtggagcgggtggacagcaaatggccacagtctcactttgcagatggggaagccggggtgcaggagaggaaatgcctcagcggggtccactgggggcggagccatagctgtagcccaggtgtccagactcctcatccagtgccctgcccactctaccaggagaaccacaggaggttagagtgagggacggtcggccgctggccaggcagggctgaagggctgtgtccacctctgtccacagtgtacaacagcacttgtgacgaccgtgagttcatgtgccagaaccgccagtgcatccccaagcacttcgtgtgtgaccacgaccgtgactgtgcagatggctctgatgagtcccccgagtgtggtgagccttcggcggtggtgggaaggaggccctgccctctgccgggccagggcatcagcctcacaggtccattcctcccccagagtacccgacctgcggccccagtgagttccgctgtgccaatgggcgctgtctgagctcccgccagtgggagtgtgatggcgagaatgactgccacgaccagagtgacgaggctcccaagaacccacactgcaccagcccaggtgggccccagacctggctcccctctgccccctccccagactgcctgagaccccgctgacctgccgcctccgcccctctgcagagcacaagtgcaatgcctcgtcacagttcctgtgcagcagtgggcgctgtgtggctgaggcactgctctgcaacggccaggatgactgtggcgacagctcggacgagcgtggctgccacatcaatgagtgtctcagccgcaagctcagtggctgcagccaggactgtgaggacctcaagatcggcttcaaggtatgcccagccctggggaggagcttccacaccccagacgtgccaggaacgcctttctccactgccttattcattcattcatcccctagacagtggggatacagcagtgaatgagacagaaatctgcttggttggggtctgcctctatctggcaggtagagagccagcagatttgctgacagatgagatatgcagtgtgagaggaagagaggagtgaggcatcaagtaggcaagagatacacaggtctggagttcaaggagaggcccaggctggagagggaagtctgggagttatcaccatagagatgctatttgaatctgtgagcctggatatgattcccaagggagcagtgtaggtggagaagagaggagtccaaagtctgagccccgagctgagcaacagccaggagcagggaagtgaggggaccagcagaagagcctgagaaggagcagctgctgaggcaggagaacagccacgagaagaaagcatttccatggggagggcacacgcagctctgtcaaatgacactcgggggcacacagaaggaggcctgcactgtgggccagctgggtgggctcagtacccatatgctgctgcccctagtgaggccgggtagagggaattggagtctctgagccaggtctccagggtgggaggcccagaccctgccacacgcccagcccaaggctccctgtgcctgcagtgccgctgtcgccctggcttccggctgaaggacgacggccggacgtgtgctgatgtggacgagtgcagcaccaccttcccctgcagccagcgctgcatcaacacccatggcagctataagtgtctgtgtgtggagggctatgcaccccgcggcggcgacccccacagctgcaaggctgtgactggtgagatgcgcgcttggagggcatgaggtgacccaggctgtgtgggactgcccgggtggcagagctccagacaggcaggagaccagggccgctagaatgtgccaggagctgaggcaagatcctctgtctgcagacgaggaaccgtttctgatcttcgccaaccggtactacctgcgcaagctcaacctggacgggtccaactacacgttacttaagcaggtaccaaacccaggccctcctccccgctgcccatctcccagacccagcacagcctcccttgcaagtctccccgcttaggtccaaccatccctcccccagatgcaaatgtggcccctgttgccacaaccgacttctgctgtccttcactccccaaatccagggcctgaacaacgccgttgccttggattttgactaccgagagcagatgatctactggacagatgtgaccacccagggcagcatgatccgaaggatgcaccttaacgggagcaatgtgcaggtgaggcgggcggccctcggcgaccaacactggcccgcctcagatgactgttttcagatcgtctctccttcccgccccaccaacccaaattgcttccttctcactccactagtcactatatgactgcttgttctagctgctcactctcctctgggcccagacagcaaggactgggagattcctcttgcccttcccctcgctgccagcctcatgtctccttaatcatcaggaagttccctgtgaggtctggccaagcactgtgaggcttggggcgtggtcccattcacctagagccccctctcctagagcctctgctgacacctacacagtgtcaggcccaggactgggcattttacttccatggttctcccaccagagctgtcagagggagctctaccccattttacacgaggggaggctgagcctcacagaggcttgcaggtcctcccccaggtcacccagagctctccctcccctgccccttcctgcaggtcctacaccgtacaggcctcagcaaccccgatgggctggctgtggactgggtgggtggcaacctgtactggtgcgacaaaggccgggacaccatcgaggtgtccaagctcaatggggcctatcggacggtgctggtcagctctggcctccgtgagcccagggctctggtggtggatgtgcagaatgggtatgtggctgaggagggttgggggagcccctgaaagcagcatccaagcccagcctccctgcaggccactggtgcgatgggttacgggatctcccagggctcactgcctacccatcgccaggtacctgtactggacagactggggtgaccattcactgatcggccgcatcggcatggatgggtccagccgcagcgtcatcgtggacaccaagatcacatggcccaatggcctgacgctggactatgtcactgagcgcatctactgggccgacgcccgcgaggactacattgaatttgccagcctggatggctccaatcgccacgttggtcagtgtgccagtgaggctgtccaggcacagcagactcagtggggatggaggtctgaagcgacaggggatcaagttttgggggcaagagtggacataaaaagtggaggatatggcctgaggacaccactcactggggtgtggggttcagagcaccccgggggcttccccagcctggccaccacccagctcccttgggaaggaagaggagaggcccttcccttgtatacacagttctggaggactggccccaaggagggtggggnnnnnnnnnnnnnnnnnnnnnnnnnnnnnnnnnnnnnnnnnnnnnnnnnnggcaggaacttgccatgaggcagtctaggtttgaactccagctctgacacttgttagctgtgagaccatggggggtctgtaccatgaaccatctgtaactggggctgacacccacctctcagggtggtggtagggcttgaggaggtggagtgggccggcaccctgtccgagctccggctgactggcactgtgcctgccccttggccctgcagtgctgagccaggacatcccgcacatctttgcactgaccctgtttgaggactacgtctactggaccgactgggaaacaaagtccattaaccgagcccacaagaccacaggcaccaacaaaacgctcctcatcagcacgctgcaccggcccatggacctgcatgtcttccatgccctgcgccagccagacggtgagcaggcaaggggtgggagcaggcgaacggtgagccaggcaccggggtccctgggagttcctgctcatcccttctctagcattgaccaagccctcctggccagacactgggagactccaggagggtctagacaggggatggtctggctcccgggagcttcagcccggcctggatccagccctggagtctggcagcagcaagtccctgaggccagtcaagtgggggtctgggtgcccagcccccagaaggaaggcaggccggcccctgggagggaagcacagaggaggtggggagctggccttcaggcctggcctgatcctgggaccttagaatcctctcctatctccagcttcagctccctcctaaaagaggcagggttcagacccacccgcctctgtccaggatagagtgagtgaggcagcctttggtaggccagaaaatgtcaccatatttcacgacgttttctctggcagtgcccaatcacccctgcaaggtcaacaatggtggctgcagcaacctgtgcctgctgtcccccgggggagggcacaaatgtgcctgccccaccaacttctacctgggcagcgatgggcgcacctgtgtgtccaactgcacggctagccaggtgaggctgtcccccagaccccatcaccagtgcccgctccccaacccccaaatcctccttggaccccaacacctgctctgtcctagtgtcctcatgcatctggttttcccacactaacacccccacatttcttgcctacctcttgtctccccacagcaatacttttacccccgtcacctcacacagacacctccacaccctaaccttgaccctccttgccatgcttcagtgctgccttccccaccctatcccacgcagccccatacctggcctttccgaactcaccatagcccaacctgccccataacaccctgacccctgcctcaacttctttgaaacatccaagcccctcaaaagaaagacttctgagtcccccagacccccaccaacccctcttgcccccacctgccctccagtttgtatgcaagaacgacaagtgcatccccttctggtggaagtgtgacaccgaggacgactgcggggaccactcagacgagcccccggactgccgtgagtgcctgctgggggtgacaggagggcccccagctgtgtcggaggcctgactcctgaggctttgaatggccactggagaggctggggctgtggtgccctgcaagtggacctggccgtgtccaccccagccgctctgactctgagcctccctctctggcagctgagttcaagtgccggcccggacagttccagtgctccacaggtatctgcacaaaccctgccttcatctgcgatggcgacaatgactgccaggacaacagtgacgaggccaactgtggtaaggcgctgcccgcccaccctccctccttccccagcatcttccctgccccaggatttggggctttcaagtgcagggaagttgcagcccacggcagcttgctctccaggctggattcctatggctcaagcctgtgtcctccctgctgagggatgggcaccctctccctgcccctgagtcctcccttcgccacgaatcacctcctcctccctccacagacatccacgtctgcttgcccagtcagttcaaatgcaccaacaccaaccgctgtattcccggcatcttccgctgcaatgggcaggacaactgcggagatggggaggatgagagggactgccgtgagtgtcagaggtggtggtgggccggtggtgggagatgacacggaagcagggcaggcagaatctccccacagctttgagaggctctcaaataactttagtagatgggcaacacaaattatattgggtgtaacttgctttgctcataaaaatcatcatgcatgatatagagacatagagatccagaaaacaaaaagcaccaaaactggggataaactgttccttcctccgaagaagttgctggcaggaccaaggccagggcttggaagagagagaagacagtgatggtgaactggagtggcaggtgtaagggagggccctcattctcttgcccaccccacagccgaggtgacctgcgcccccaaccagttccagtgctccattaccaaacggtgcatcccccgggtctgggtctgcgaccgggacaatgactgtgtggatggcagtgatgagcccgccaactgcagtgagttgcctggcctggagcccagcttccctccccagtgtctgctgctcacaccaccccgacgtgtgaccccctcagtggctgctccctcactctccccaccctcccggcacactcctggaaggagtctcatcctcaccccatgcccacccgcttgcagcccagatgacctgtggtgtggacgagttccgctgcaaggattcgggccgctgcatcccagcgcgttggaagtgtgacggagaggatgactgtggggatggctcggatgagcccaaggaagagtgtggtgagccgagaccccactccaggaggaagacagtctacctgggtgggaggcatggcacccctggcaggtggagggctgggggccgcctgcttaccggtctcagcgtggccctgctgctgggcttcctgggcctgctgtggggctggggaaggaggcctggctggagctcacttccccacatccacccgtgccccatgtctcccagtttccctatccctgcccctgcccacgcctcatccacacatacctgtgtggagttttccctgcccaccctatgggatctgttcatctccttcccaaggcagctgcccacacacacacccccaaccatgtctcctgtccccaaacctccttatagaccccacgtctcaaaacaccgcctgggctccccgcggctgacccttcccaagctgggatgcccaccctccctgccaggccagcctgaccatgcctgcttggaccctaatgtctgccccagccctttccctgactgccctgacacttgcctcctccagatgaacgcacctgtgagccataccagttccgctgcaagaacaaccgctgcgtgcccggccgctggcagtgcgactacgacaacgattgcggtgacaactccgatgaagagagctgcagtacgtccccacccacccagccccgcatgagcccctcccaggcctggcccttgtctcgcggccctcctgccacaggccgcgccagagctggtggccacctcccagggtgggggcaggagccgccctcctcacccatcccactccatgtcgtgtatttgagtttgtgccatttcacctcatctcatgtttctctccattttcacactgtcctctcggggttgcagaggtaggtgtctctgatgtgcccgtgctcccaccatacccccacctctgtcccagagccccccatccctgtgctgtgcctctacccatcatccttgattgacctctccccaaaccctggtgcttgtctcagtggtcttgcccccgctcccctccccaaacacagtctgttctgagggcaaggccagggacctgtgtcctctctggtgtctgtcccatggggtaagtgcgagcccgcctgtgcccagctgttccataggagcagccagtgggctctgccaggactggctcggcctctgggtcagtcagctgtggccttcagagacacggggatgggccttgggctcgggactgtggcactactgaggcctggagtccttgtgcccaccctcctgggcctgtctccccctgtccttcccagcccctcggccctgctccgagagtgagttctcctgtgccaacggccgctgcatcgcggggcgctggaaatgcgatggagaccacgactgcgcggacggctcggacgaggtgggcagggagatgagaaggaagcagatggcctcagaggagttcaggcagggcttggggagtgccgagaggtgaccggctgcctgtgcccatgcccacagaaagactgcaccccccgctgtgacatggaccagttccagtgcaagagcggccactgcatccccctgcgctggcgctgtgacgcagacgccgactgcatggacggcagcgacgaggaggcctgcggcactggcggtgcgccccttggcttggtctccctgggtcctccctctgctgcccaccccgccacatggcccagtcattcactcattctttctcttctgtattcattcttcatgcaacaaatatttattaagcatttaccatgtaccaggcactgccataggtgttagggacgtagtagtaaacaagacacagggcccctgaatacacatttttgtgcgggttgtgcccagctcaatgccccctagtctaggggaccagttgagctgaaatccagcaaaccctgagggctgtgcccatctaggccccaccccacaagtccctccgagacagtctgctgccacaagaagaaaagccctgcctattttcccttcctgggggcagtgagacagtgcctgtccctcgctgacctgcctgggctctgcagtacagagggggcaggtgaagcccgggatgagaaaagactgggccttggagcggaaatcccaactgtgcgggcagatgtcttggctctgccttggtaggccaggcacagggatgggaacccggtcttccattcccagcccagtgctgttcccacgtccccgctgtggaactacacagcccagtgctgttcccacgtccccgctgtggaactacacagcacagtgccctgccacataccagagaaggagtgccctctgaactcctccagacacccctgaaaaatggcctcttctcccctaaataccagagggggcagtttggccccaccaagtagaaatttaagagacctggttccaatttggctgtgccactgcttgcctggtgacccctctgagcctggaacccccacctgtggagacaggggtctgggtgggctcatggctcattctatctcttggctccccctggcaccagtgcggacctgccccctggacgagttccagtgcaacaacaccttgtgcaagccgctggcctggaagtgcgatggcgaggatgactgtggggacaactcagatgagaaccccgaggagtgtggtgagatttggggcggggctcccaggcttcccagtggccagcaaccacccccactcccaagactaattctggctctgtgtccccctggctgctgcagcccggttcgtgtgccctcccaaccggcccttccgttgcaagaatgaccgcgtctgtctgtggatcgggcgccaatgcgatggcacggacaactgtggggatgggactgatgaagaggactgtggtgagcagggggccgacgagaggcctgcaggggacgggtagtgcacagtggggtgagtctggtcctcgtgggagctgcactggggttagggttaaccaggaggactcgcccaggaaggggaggatccattgctaggagcctgggggcttttcgttaggaaagagaagcccctggggaaggctctgggggctgcctgatgccttaggtcttggaggtggggctgggaacccaaatgtttgacctgctccccctgcaagccttgtcacttaggaattgggagccactgttatctatggggttgccgtgggaggaggaggcaggggagaatacccagggcctaaagcctctgccctcctcagagccccccacagcccacaccacccactgcaaagacaagaaggagtttctgtgccggaaccagcgctgcctctcctcctccctgcgctgcaacatgttcgatgactgcggggacggctctgacgaggaggactgcagcatcggtgaggcccggcagcggaccggacgctggtggggagtggggagagccaagccctggcctggggtggctcaagggagggcatccactctctgtcccccacagaccccaagctgaccagctgcgccaccaatgccagcatctgtggggacgaggcacgctgcgtgcgcaccgagaaagcggcctactgtgcctgccgctcgggcttccacaccgtgcccggccagcccggatgccaaggtaggaaagcggggcagagcaggggtggacaccccaactgtggactctcatgaccctccctgtaacccttagacatcaacgagtgcctgcgcttcggcacctgctcccagctctgcaacaacaccaagggcggccacctctgcagctgcgctcggaacttcatgaagacgcacaacacctgcaaggccgaaggtgccggagccaccagagggcagaaaggctgggtggggcagggcgaccaggatatcaaacggggccgacttggaatggaatgtcttcctgcggacatcttgcccagacaagaagccccagactcatagttgcagctgcctgagcacagtgctggcccagcagtgggggcaggtcctggggctggctgactgaaggagtctggggtgtggcagtgctctgaattgcacacacacctcctcacccaccactgccaggacgagagtacactcagacacgcattgcacactcacagtcatgggggcctcacctgcacattccccacatgctttgatgcccaccttgccttccacatgcctgtacacagacattcacacacacccctggcacacacacccccaccatgcactcccatgcacaccctcgtgctccatgccaagcacacacaccccatgtgcctatgcacccccgagcatgtgccaggcagtttgtagcagagagcgtggtgatgccatccagcagccgtgaggaggtggaagtctctgggtctggaggggcagggacagctttctgactgaaaggagcgggtcacagtggatcagctcaggggaggagaggaggaggtccagaggctgaggttggagcctgcaaccctgagcagggagggtaagcagcagcttctggccggagcagatggtcctaccaggagatgggacagtgttcatgtgaaaggagctgagctgggtggggtgcacacctgcatcccacagccccagccctggcctcttgcttctccaggctctgagtaccaggtcctgtacatcgctgatgacaatgagatccgcagcctgttccccggccacccccattcggcttacgagcaggcattccagggtgacgagagtgtccgcattgatgctatggatgtccatgtcaaggctggccgtgtctattggaccaactggcacacgggcaccatctcctaccgcagcctgccacctgctgcgcctcctaccacttccaaccgccaccggcgacagattgaccggggtgtcacccacctcaacgtgagtgcccaacctggcgtggatggagtggaagagctccatagagcaggcggttcagagcaggatttgaaaagggcagtgctggctaggcgcagtggctcacgcctataatcccagcactttgggaggccaaggcgggcagatcacctgagatcaggagtttgagaccagcgtggcaacatggtgaaaccctgtctctactaaaaatacaaaaatttggctgagcgcggtggctcatgcctgtaatcccagcactttgggaggcagaggtgggtggatcacgaggtcaggagatccagaccaacctggctaacacagtgaaaccccgtctctattaaaaaatacaaaaaaattagccgggcatggtggcgggcgcctgtagtcccagctacttgggaagctggggcaggagaatggcatgaacccgggaggcggagcttgcagtgagccgagatcgcgccactgcactccagcctgggcgagagagtgagactcggtctctaaataaataaataaataaataaataaataaataaataaatagagactcggtctctaaataaataaataaataaataaaataaaataaaataaaaatacaaagattagccaggcgtggtggcgggcgcctgtaatcccagctactcaggaggctgaagcaggagaatcctttgaacccagaaggtggaagttgcagtgagccgagtgccactcggttgcagtggcaccaaggttgcagaatagcactgcactccagcctggatgatagagcgagactccgtctcaaaaaaaaaaaaagaaaaagaaaacaaaagggcagtgcgaggggcaaaggttgagagtggggcagggggcagttttaggattgtgttctgaggcatggccagcgggaagacagagcagtgggaatggtcagcagctggctgtgctgcaggcagcccagggcacagggcatgatgggcaggcagacagccctccggcaccaatcccccatccttgccacttcccactgtgtacgtcttagctacctcatttaacctctttgggtttcactttgtttatcaataaaattaggtgatcatcgccattgcacaggcttcagggagggctcaccagccacgtgtgagagctgcgagtctggcgcataagctccatgccggttgaatctctttaaagccagggtcctggctgtgagcctggggtgacgttccagcaggctggcagagtggtggcggggggataatggcaggaagacaaagcagtggcccctgaacctgtggcttccattcagatttcagggctgaagatgcccagaggcatcgccatcgactgggtggccggaaacgtgtactggaccgactcgggccgagatgtgattgaggtggcgcagatgaagggcgagaaccgcaagacgctcatctcgggcatgattgacgagccccacgccattgtggtggacccactgagggggtgggcaagggccctggggggaggcctctgggctggtggtaggaagcccccgggacagggttgggggctgcacccacatgcgtgcccttccctcccaggccagcctgaggacagagtccttttcagtcccttgggtcttctcggccacccctgcctggccctccccatgctgcctctgcccagggcccccagctgggcctgcttgggcagggatctgacctctgcttggccggctgtcatgcacagccacactctgccctggggaacagctctgccagcgtcggtggctctgaatgagcacactgtggttttagaggaaaagcccctcaacctgctcagaagcagactcccgcctgcttctctgtagaaggacagaatgccctcctcccagtccccagcagtccctgtccccagaccaagaagctggtgtcctgcctgggcctgcctcctctggccctccggcctgcccacactcaccccttctccctccccaggaccatgtactggtcagactggggcaaccaccccaagattgagacggcagcgatggatgggacgcttcgggagacactggtgcaggacaacattcagtggcccacaggtttgtggggcagggtgcaggagggacgggcatggagggggcccggctcgcagagcccagctgctgctgaagtcacacaaaagcaagggatgggatggggcttggactggggcagggcagattggccgtggaggcttttcccgaaagaggtgactgtgagtggcgtatgaacagggtggagctgtcccgggcatggaggcagttctttccacccggagcctgggttggggaggccaagctctcacagtgctctctctctccccaggcctggccgtggattatcacaatgagcggctgtactgggcagacgccaagctttcagtcatcggcagcatccggctcaatggcacggaccccattgtggctgctgacagcaaacgaggtcagagcccggcataagtcgcagtccccagccctgtccccagccttgccatcctccctactgagccaaaggcctcacttcaatgcctcccatcctttgtcactgacccccagcaatgctgcagcgccttccaggcctctccagctggcctccccctgaaccagccctgcaggcctgagacccaccctgaccctctggcctacttgtccattcattggttgggttgcacggaggcagcataggtacattaggaacgtagcaaattgggggagaaggaatagaagtcagtcatgaatgaccccagaagtctgggggtgatgggaccttttgccagtagtggccacaggaggaggaaccggtgtggggagagagaatttggtctggatgtgttgagtttgaggtgtctgggaaccacaggtgccagtgtcgtggacagcatggccagggcctgagtgcccctcaggtcccctctgactccacctcctcccccaggcctaagtcaccccttcagcatcgacgtctttgaggattacatctatggtgtcacctacatcaataatcgtgtcttcaagatccataagtttggccacagccccttggtcaacctgacagggggcctgagccacgcctctgacgtggtcctttaccatcagcacaagcagcccgaaggtgggggcagaggggagcctgggctggggaagggaggcctgtgggcattgagtctccaagctgtggccctgggacctggtggagagggggtcaccctgggctcacagggctcagagaagggtcctgctcagcatcctccccaccccacccatacctgcagtgaccaacccatgtgaccgcaagaaatgcgagtggctctgcctgctgagccccagtgggcctgtctgcacctgtcccaatgggaagcggctggacaacggcacatgcgtgcctgtgccctctccaacgccccccccagatggtatgcttatgccctcccagtcccagccatgcctcaggaccatctccttcctgtggctcctgacttcccctgaccttgttgcctgtccctctcctcctattcccctggctctgccccttgacgggcccttcctgcagctccccggcctggaacctgtaacctgcagtgcttcaacggtggcagctgtttcctcaatgcacggaggcagcccaagtgccgctgccaaccccgctacacgggtgacaagtgtgaactggaccagtgctgggagcactgtcgcaatgggggcacctgtgctgcctccccctctggtatgccccctcatcccgccacgcctgctccttgcccctgggccccagccccgccacccaccaccccacctcaggcaaatgcccagcccctgcctcgcctccagcctcctttccacaacccagcatccagtcactccagtctctgcttctcgcccaggtccccccagcccattcctctgctatagggccaggtggtctcgagggccacagtcgcgctcacacatcctctcccaccaggcatgcccacgtgccggtgccccacgggcttcacgggccccaaatgcacccagcaggtgtgtgcgggctactgtgccaacaacagcacctgcactgtcaaccagggcaaccagccccagtgccgatgcctacccggcttcctgggcgaccgctgccagtaccgtgagtgagccatccctgggccccagggcatgcgggagggtgacgggggaccccagagcatggggtgatgttcaacctgtgcctgggacccacaggggcaagttcaggaaagaaggccttatgcagctgagccaggcccgagctgctggcgcttccccacaaaggtgctggcacacttcccctgaggcagtgcaccccctgcaccaagattatgcaaacagaaaagctctgttcaacctatggagagccctcatgagggtggggcttgaggcacttctctccctccccaaccacagggcagtgctctggctactgtgagaactttggcacatgccagatggctgctgatggctcccgacaatgccgctgcactgcctactttgagggatcgaggtgtgaggtgaacaagtgcagccgctgtctcgaaggggcctgtgtggtcaacaagcagagtggggatgtcacctgcaagtgagtggggccctcctccacagttccacccagccgggcccctgccctgtcctagccctgccctgcccctcccttcctcagcatcccaggcacgcctctgccagccccagccccagcctctgattccttcctgcagctgcacggatggccgggtggcccccagctgtctgacctgcgtcggccactgcagcaatggcggctcctgtaccatgaacagcaaaatgatgcctgagtgccagtgagttgggcccgggcttcacccaggcatagatcatcgctcccttccccagatttgagcaggaggaccgtcaggcctcagtgcccaccccccgccctgttttcctggcagcagtggctatggaggttatacctactcagccgtgtccctcctttctgcaggtgcccaccccacatgacagggccccggtgtgaggagcacgtcttcagccagcagcagccaggacgtaggtggcaggggttggggcaggcagggccaccgggacctagagcagggggaccgtgtgcctcctgcttccctgagccttggtgactcagtgtcccacctcttccctccagatatagcctccatcctaatccctctgctgttgctgctgctgctggttctggtggccggagtggtattctggtataagcggcgagtccaagggtgagtcacagggattctggaacattctggtcattattttgccatcctagccttcccccccaataatctctgtctccttatactcctgcctttccccagggctaagggcttccagcaccaacggatgaccaacggggccatgaacgtggagattggaaaccccacctacaagatgtacgaaggcggagagcctgatgatgtgggaggcctactggacgctgactttgccctggaccctgacaaggtgggctgggaggcgggcagggtcgagtgccaagaggccgtgggtggcctaaccaaaggtgttgggttaggtgagggacggaggtgggggtggggtaacctgggctacaggcccagctcctgagccctacctgaaccctctgtcaccctgcagcccaccaacttcaccaaccccgtgtatgccacactctacatggggggccatggcagtcgccactccctggccagcacggacgagaagcgagaactcctgggccggggccctgaggacgagataggggaccccttggcatagggccctgccccgtcggactgcccccagaaagcctcctgccccctgccggtgaagtccttcagtgagcccctccccagccagcccttccctggccccgccggatgtataaatgtaaaaatgaaggaattacattttatatgtgagcgagcaagccggcaagcgagcacagtattatttctccatcccctccctgcctgctccttggcacccccatgctgccttcagggagacaggcagggagggcttggggctgcacctcctaccctcccaccagaacgcaccccactgggagagctggtggtgcagccttcccctccctgtataagacactttgccaaggctctcccctctcgccccatccctgcttgcccgctcccacagcttcctgagggctaattctgggaagggagagttctttgctgcccctgtctggaagacgtggctctgggtgaggtaggcgggaaaggatggagtgttttagttcttgggggaggccaccccaaaccccagccccaactccaggggcacctatgagatggccatgctcaacccccctcccagacaggccctccctgtctccagggcccccaccgaggttcccagggctggagacttcctctggtaaacattcctccagcctcccctcccctggggacgccaaggaggtgggccacacccaggaagggaaagcgggcagccccgttttggggacgtgaacgttttaataatttttgctgaattcctttacaactaaataacacagatattgttataaataaaattgtaaaaaaaaaaaaaaaaaaggccaaaaaaaaaaaaagaaagaaaaaaagccgctggtgtctgcctgtgtgtgagagacgctgggagctggggctgcgctttcctgcttcggccaccagagggagacctgccccgtgctggaggcaggctggcgcgtggtttttagtgcccttctcccagggccctccccctctccatcttactgtgcccgggaagcgggtggcactggacttgacatggaagatctgcttctcctggctgtgtgaccttcagccatgacttcgagtctccagattttgtgttccctctgggtctaggacactaactcagatctgtttctctgcattcacttctaccagacaccacccccctacccaaaatgatcacccacagtgagaagccccactataagaagtgaatacactgaggctgcaaaggttttctcatccttcagggtcctcccatgcggttctctctgcctgagtctgctcttgaagcactgacgtctcactttgtggagactaatgaatcaaatgcgaagtaaaatgctgcattccagagccaggtgtctcctgcggtaaaggagagctgggaagaccagtttgccaggccctctaggcccccagcagctccagctcaccaatcatttcagtcattccagggggtaacaggaaaaaactgtcaatcaaaagtgtccaggtccatttcaacccctgcctagagggggaaacttcttgcagaaagttgcacagtttacactgcccaggactagagagggtttgagtcccagtacagcaaatatgagctcaggaagggtggctgcaaatgtctgaagatcccttacccaactcccaaccaggaagtgctgcctttcattcctcctccctcactggttcaactccaggagattcctcccaggcttccttctgccttggggaagctacaagtctaggcacctgtggaaagaggagccctccccttcccttcttagccttcagaagctctctccaacctcatcctccaagccaactctgagatcctcccctgccttcaaaagggccctggatgggcaactgcggggaaacagaatccgtggttgccgagtaggaggtctgtgtcccaatctggccaccaggtggtgtctgtacgcctggagcaccgcctatcctgaagccccacacagcccccgcctcagcactcattatgcacctgcgggggaccccagcccagtctctcgcttccttctctccggctattttgccacacccctccaccctctgccagccagctcccctccctgccccagcgcctgcctgctcccaccaccaccagccccaaccctgcccctctgccatcggtgcatctggtgccccccgggagccactgatctctgcctgtcacctcaagatcctgggcagagcgacaagggacccccgctgcagcttggaaggcatacccctccagtcagcatcccccactccgcctgtcaggacctgctaggagaaggtccaccaggaggcagtttctcaaactacccacccgggaggcaggtgggaagccctcaccttggcctgagagatgggaagaaccagggacagaggctgagaaccagggacagaagctgataccgaatgagaggcagaaacccagaggcggagagacagggggacagaggcaaagacccagagacagggcgagtagtgtgcatgtgtgtgtttgcacttgtgtttgtgcgagcgcgcacacatgtgtgtgtgtaactggagagagaacaggtggcctgagactgtagctaaaggaggagagatgcagtgggttcggcccccagaagaccaggaccctggtaatgggcttctgtcctggacagcctacgcctaggtgtgcccactgttcccacctactactgaagcagcccccgtgcctggaacgtgggctcagggttctggctcaaggccttttggccttgagcctgaacatttctgccccttcctgcctctctcctctccacccccaccccggcacccaggttcctgcctcctggcttctgcctgtctccctgggtgtctctgaatctgcctcgtcctctcagcaccggtccttttcctgactcgtgtgtgtggctgtcacgtcccatatctatctgtccatttctttgtatgtgcccccacttgtcttctgggctgccagtgacagcatacacctgtgtatgtctcagtgtgtgtgtccacctctgtgggtgtttgctctctgccaagacaaagagagggtgagcgcactgagcaactgtctgggtgtgctcgtctgggtgcaggtgtgctcacctctgttgctgtgctcctctgtgtgttggggtgccgctaggtgtgcgcctgtctctgtatttcgctctgtgtgccctgtccccgtgaaggcatctgcgtgcatccctggggtgggctctcaagggatgtgtctgtctctcagtctctttgcttgtccctatctctgtctaggtgttggtcataccacaacctcagccacagcctcagtgcatagcaacagctgacagctgaaaccacccgggcaggagagagagaggcagtggggaggagggaaccgaggaagaaacagagaagaggatgggggcagagagctggggctggggacagagacaaggacagagatagggaatggggacaaggatctagaagagctggtggtgaaagatgggacggcgggaggggaggaacagagactgcaccaagaggccaggcaggcggcgctgagagggatttcctgcccagcccccatgcagaggcgcactgggcctcgtgggggtnnnnnnnnnnnnnnnnnnnnnnnnnnnnnnnnnnnnnnnnnnnnnnnnnnnnnnnnnnnnnnnnnnnnnnnnnnnnnnnnnnnnnnnnnnnnnnnnnnnnnnnnnnnnnnnnnnnnnnnnnnnnnnnnnnnnnnnnnnnnnnnnnnnnnnnnnnnnnnnnnnnnnnnnnnnnnnnnnnnnnnnnnnnnnnnnnnnnnnnnnnnnnnnnnnnnnnnnnnnnnnnnnnnnnnnnnnnnnnnnnnnnnnnnnnnnnnnnnnnnnnnnnnnnnnnnnnnnnnnnnnnnnnnnnnnnnnnnnnnnnnnnnnnnnnnnnnnnnnnnnnnnnnnnnnnnnnnnnnnnnnnnnnnnnnnnnnnnnnnnnnnnnnnnnnnnnnnnnnnnnnnnnnnnnnnnnnnnnnnnnnnnnnnnnnnnnnnnnnnnnnnnnnnnnnnnnnnnnnnnnnnnnnnnnnnnnnnnnnnnnnnnnnnnnnnnnnnnnnnnnnnnnnnnnnnnnnnnnnnnnnnnnnnnnnnnnnnnnnnnnnnnnnnnnnnnnnnnnnnnnnnnnnnnnnnnnnnnnnnnnnnnnnnnnnnnnnnnnnnnnnnnnnnnnnnnnnnnnnnnnnnnnnnnnnnnnnnnnnnnnnnnnnnnnnnnnnnnnnnnnnnnnnnnnnnnnnnnnnnnnnnnnnnnnnnnnnnnnnnnnnnnnnnnnnnnnnnnnnnnnnnnnnnnnnnnnnnnnnnnnnnnnnnnnnnnnnnnnnnnnnnnnnnnnnnnnnnnnnnnnnnnnnnnnnnnnnnnnnnnnnnnnnnnnnnnnnnnnnnnnnnnnnnnnnnnnnnnnnnnnnnnnnnnnnnnnnnnnnnnnnnnnnnnnnnnnnnnnnnnnnnnnnnttccgggacgcgaaggtcccagtgtgcgaggggctccgtgcgcccgccccgcccccagctccgagcgtcccaactttgcgcggcgcgggggaagcggacagacagactgcccgattcaggacgggcactctcctagcgcaagttggctgaggcttggagagggtgccgggcggaggtcccccttgcagccgacttcaggcgcggcgggggaggggacgaagcccgacccgcgagtgcgccagacagagcgggagtgcgagacagacagacaagccagcagggtgtcagccttgccgtctttccgcgccagtctcgctcgcctgcctcactgtctgtctgtccttccacccctccacccccgccttcccatttctcttctctgcacttgtcaccatgccaggtgggctctgtgtcgggagcatccatggcccgagcacacacgcacacacggactcaggcagacacggctgaacttggctacagccagcctcccatcacatttcccacggagacaccatctcccctgcacgacctcacagacacacccccctctcgtgccccactgaagggggaggctgtctggaaggggagtctctcctcccatgccctccctgcctccaaccccactccaaggcctctttccctgaggctctcgggcgaagagccagaggctaagggagctcagacttgatctgcctccttcctgacttggaggcttcaacctgcgaacatgctgtgctcatatgtgctgggtggagggcgtgggtcaccgtgtgcacctgtgtgcatgtgtccagggaagccaggcttggtccagtactggggccgagggtacatgtgtatactggtgtggtgtgtggtgttggctttgcatgagtgagtgtcagtgcctgcctcacagtgcagccatctgcctatgcccctggtgtgtgcccgcaatgggggcccaggccccagtcccccattttccttctaccagcctcccctgcctatggcttccctgttttctgacccccaactgtgacctacctagtttgggggcaggcaggtcattccccaaaccctcattctctgtaccctcagcccctgtagagtctagaaggggtgtatttcttcccccaacacttggacctctgcctgctcagccaaatcacatttggcaaaccccagcagggcaggggctgccccagtgaagctagcattagagctccctggccctcccagccccacctggtgaccttgaggggctgcacggtaggcagaggagcccctccatgaaaactgcttccactagcaggagcttcttagggacttgctgcccaactctgtccttagtgaactggaggagtggggggggtctgtgccctaccacccacccacccatgtgtgaaggcctggggtcaagaggtggtaggtatggcattctcttgcccctcctttccacttcctcccacctcatctccactctcccaggcaaataaactcccctgtggacagatctggtttaatttcctttgccccctgagggggaatgaaacatctggtggagacttgagtgagagtgagcgtgaggatatgagcaatgggatctatctgagtgtgtgtgtgtgagctgcagctgtggggcctccgtgttggagtcaacagggagagtggatctgctggttagcccagcttatgtgcatgtgagaatgtgtttacatgtgtacacactgcgggtgtgtgaatatgtataactgcacggggaggtgtgggtatatgagtgtttgtgtgtccaaatacctgtgtgtgcttctgtgcacttgtgagtgtggcgtatgcacatgtataccccggggtttctggtgcatctgtgtgctggggcccatgtgttgtctgtatgagtctctggggtttgtgagtgtgtttctgtgtgcttgattgtgagtgcatttgagtgtgctatgagattgtgagcctcaggatgtgtttatgtatctgagtgtggcttatgtgtgtgggtgctcaagggtgtcttggtgccagcactgggagtgggcaaaaggtgaggctgatcctgggtaagaggtggctaggggacagtttacagggcaactttttggcaaccctaaccatgaacggctgacacctctgcctctcccgtcctgcttgctcaccctcctccaggtttctctcccttcctcctcactccaggcttcccatttctcagagcctgggactcctggcttccactgcctctggggttctggcctctcagccagggattcttgaggatctttctcatacagtctctgactcctttccctctctctctgtctccccgaccccttgccaaagcagctgcctactgggagaagcagcaggcgatcaatagtcactaatcactaatcactaattactaattagctgggggagggcaggggcggggccctgtgggacctgccagctctatcccgcctcaggaaaggattaggtctgattctcttagagctggctggccgaagcccctcagccagctaccccctcctgcctccacaccctcctctagccccccagctaatctctgcctgggctacttaggcacgcacagcctgggctagggcccagagctgctgccggggatttgggggtaatcaggggccgcagctgggccagggggacaggggagggcctgctgtgacagctcccttgggccagagcctgcagtggaagcctcacattcctaataggaggggcatgcgtcagaaaggagaatttagagtgtcagggttgggatgggtagaggagctggagacccaggagcggggtgactggcgaagaggtgaggtaataaggacagaagcaaggcaaagaggggtcagggacgaggtaattggagagagacaacacaaacgtctaaagaaaacaggtaagtggggggacctcacaggggtcagagatggagtaattggcaaggagatggggaactttggacctagccctgcaactcaagatgtgtgggatccgtgagggacagggcaacagagagggggcagggtcataggagagggtcccagggctcaggcgcaggaggagtcgcagggcgtggggtgggaagcagctgcccagtggggatggggagcagggagcgctgccttgagcgctggaaattggcgcggctccccctctcccccgcctgcccctcctccacctccaccccgcccactccccctccggctccggcttcgggaaattacatccccgctccgcggctccccccaacccccaccgcgccccggagccggcgcctttataggcacatttattgcaataataaagtgaggcgcggggcggggggcgggagggcagtcgttcccgcggggaccgcgctggctccaggaagcagggaaataaaataaaataaaataaaataaaaattcagataacggtgagccttgcgcggcaggccaagagaagtcaggcaggcaggggtagagggagggggcgtccagcccaagggcagagcctaccccaccccaccagcggtccccgccccctcatgcagtggtagggtctggaaagaggtgtcttcgcttcaacctgcctggccccctcccacagcctgatcctgcctggtctttgccttgctctctggctcctctcccatacctgtcctcagcccctgtctctgtccccgtctcctgtgtcttcccttgtcccccatttcccattccagtctccctttgagtcttccatccccatctcctgggtctctgcatccatcactgtttctgcccagtaaccatccccatcccccatctctgttttgccccaccctgaccccatccctgcctgtcccctgtgcttatccctcatccaccattcctgtccccatgctgcttcctggactgttctgtagcccatcttcatttctctggtccttaccccatccacatctctgtctctgccccacgcctggccaccatttctattctgcttctcatccctgtccccaggcctatcctcattgtatcctcatccctgtactctatatctgtgcctgccagtccccaatcccagtccccctccctctctgtctcagtcctcaccccaggctgtcctttccaccccacctctctcctcacccacatctctatccctcgttcccagccagactccaccggcccctattgcagcacccctgcctctttctaggtgcaggggctcaggatgctcttttctccccttccccagcccaggcctggactgtcccttcctccggccagatcctgggagcaccctgcctgacccaggtggtaggggaaaagcaacgggccagcctggaggcccaggggaggtgcaccctgcaatgcggctggggggctgacagcctgatcctcccccaatcccagcagtgtcatccccaaagagccactccccgaagtggagtttgttgcccccagcagcaggaggccacctcaactccctgcaggtgcgtgggcccgctgcctcgggggtaaagccctcctggtgcagctctccccgctccccgaatgggcctgaaggagcctgctgaaccccccagctgccgcgcacctccgccccgcccccgcgccgacagcagcgctagcctctcccctccgcaaatgtcaccgcgcccaattagcttaattaagccagctctggagcaagggggacccctcctcggacaacatcctgctcccaccctcagccatggaggtgggcgacaagagctctgggcagaggagctccttaccacctgccttcccaactcccccacctccccccatgttgctggagacagacaacctgaaggacagcaggagagaaccacagacagagggagaaaatcagaatcatgggaggaggaaatttgagacagagacagtgagaaaagagactgagagacaaaagagactgagagaatggggagggagagatggaaaaacagcacaagagagggagagagagcacgagcaatcaagggagccagagggaggatcttattttattttattccatgttcccatttctcggctctcgtttcctcacagactctcacccctccctgtctgaactcccctacaaggtcgcttcagccgtgcccccccaactcttcctttttatcttggctgtctacagtagtgggtgggggcaggactgcccaaagccaggggattcgccaggatcagagaagcacagacggcactttgtctgagatcagagatgggggtgacaccctggaacctctccttaccctgctgaacctcctcccctccccctgccccttacttctaccccctgcccctgtctggtagaagtcactggcctgaatcaccccagccaggttctgactgggtacaagacataggggtgctctggtctgctgggaggagatggcttggaggcatttggggtcataacatctgatggcatggggataggggggacctggatgactgggcttctggaaagaacagcggttgggtgagattagggaccagagttcaaatggcccacccttcagctttcccaggaaacctaacctccctcccccaatgccctctctcagattcaggccctgccctctccaagcccacttctggggcctcttctccctcccactgtaccctgggacccctccctccaccctctctcaggcccaccctccaggtgttagctgctggcttaagcctgtctgtgggagtcaatcattcttgctgcccccgccccctcacctgggctgagaggagggatggatgggagggggaatgaggggggcgataaatatgtatgacgagcgggtggtggcagcattaataacccgggatcgcagcgtggcggggacggggaccaggcggtggagattctagcccagcagcttggctctgctgttcctgtccccagtgacactgtgtgtgtacacatgggtgtgggcaaacagaggggggcacccatgcttcctggcctccttacctacccacagcacagcctgtgggccagtgtaggacacctccccagagaccactcagatacaattgacatgcatgtatgtcacccccatcggaacacagcaagaccacacttgttctatgactacggatacaccccctttagaaagagcttgacacttgggcagaggatgacaggggctcacacaggaaaggtgacacctccagacaaccacatatagctaccctcagaccgctatacacagccatatagccaacccagacacgtaaccacaccagtcacacagacaccactccacaaattgacacacacacccagccaatccaggcacatacacacagtcaccgatttacacaacagacatgcagccacgacaagca

SEQ ID NO: 474 - DNA, 14538 bp, Homo sapiens
cagcggtgcgagctccaggcccatgcactgaggaggcggaaacaaggggagcccccagagctccatcaagccccctccaaaggctcccctacccggtccacgccccccaccccccctccccgcctcctcccaattgtgcatttttgcagccggaggcggctccgagatggggctgtgagcttcgcccggggagggggaaagagcagcgaggagtgaagcgggggggtggggtgaagggtttggatttcggggcagggggcgcacccccgtcagcaggccctccccaaggggctcggaactctacctcttcacccacgcccctggtgcgctttgccgaaggaaagaataagaacagagaaggaggagggggaaaggaggaaaagggggaccccccaactggggggggtgaaggagagaagtagcaggaccagaggggaaggggctgctgcttgcatcagcccacaccatgctgaccccgccgttgctcctgctgctgcccctgctctcagctctggtcgcggcggctatcgacgcccctaagacttgcagccccaagcagtttgcctgcagagatcaaataacctgtatctcaaagggctggcggtgcgacggtgagagggactgcccagacggatctgacgaggcccctgagatttgtccacagagtaaggcccagcgatgccagccaaacgagcataactgcctgggtactgagctgtgtgttcccatgtcccgcctctgcaatggggtccaggactgcatggacggctcagatgaggggccccactgccgagagctccaaggcaactgctctcgcctgggctgccagcaccattgtgtccccacactcgatgggcccacctgctactgcaacagcagctttcagcttcaggcagatggcaagacctgcaaagattttgatgagtgctcagtgtacggcacctgcagccagctatgcaccaacacagacggctccttcatatgtggctgtgttgaaggatacctcctgcagccggataaccgctcctgcaaggccaagaacgagccagtagaccggccccctgtgctgttgatagccaactcccagaacatcttggccacgtacctgagtggggcccaggtgtctaccatcacacctacgagcacgcggcagaccacagccatggacttcagctatgccaacgagaccgtatgctgggtgcatgttggggacagtgctgctcagacgcagctcaagtgtgcccgcatgcctggcctaaagggcttcgtggatgagcacaccatcaacatctccctcagtctgcaccacgtggaacagatggccatcgactggctgacaggcaacttctactttgtggatgacatcgatgataggatctttgtctgcaacagaaatggggacacatgtgtcacattgctagacctggaactctacaaccccaagggcattgccctggaccctgccatggggaaggtgtttttcactgactatgggcagatcccaaaggtggaacgctgtgacatggatgggcagaaccgcaccaagctcgtcgacagcaagattgtgtttcctcatggcatcacgctggacctggtcagccgccttgtctactgggcagatgcctatctggactatattgaagtggtggactatgagggcaagggccgccagaccatcatccagggcatcctgattgagcacctgtacggcctgactgtgtttgagaattatctctatgccaccaactcggacaatgccaatgcccagcagaagacgagtgtgatccgtgtgaaccgctttaacagcaccgagtaccaggttgtcacccgggtggacaagggtggtgccctccacatctaccaccagaggcgtcagccccgagtgaggagccatgcctgtgaaaacgaccagtatgggaagccgggtggctgctctgacatctgcctgctggccaacagccacaaggcgcggacctgccgctgccgttccggcttcagcctgggcagtgacgggaagtcatgcaagaagccggagcatgagctgttcctcgtgtatggcaagggccggccaggcatcatccggggcatggatatgggggccaaggtcccggatgagcacatgatccccattgaaaacctcatgaacccccgagccctggacttccacgctgagaccggcttcatctactttgccgacaccaccagctacctcattggccgccagaagattgatggcactgagcgggagaccatcctgaaggacggcatccacaatgtggagggtgtggccgtggactggatgggagacaatctgtactggacggacgatgggcccaaaaagacaatcagcgtggccaggctggagaaagctgctcagacccgcaagactttaatcgagggcaaaatgacacaccccagggctattgtggtggatccactcaatgggtggatgtactggacagactgggaggaggaccccaaggacagtcggcgtgggcggctggagagggcgtggatggatggctcacaccgagacatctttgtcacctccaagacagtgctttggcccaatgggctaagcctggacatcccggctgggcgcctctactgggtggatgccttctacgaccgcatcgagacgatactgctcaatggcacagaccggaagattgtgtatgaaggtcctgagctgaaccacgcctttggcctgtgtcaccatggcaactacctcttctggactgagtatcggagtggcagtgtctaccgcttggaacggggtgtaggaggcgcaccccccactgtgacccttctgcgcagtgagcggccccccatctttgagatccgaatgtatgatgcccagcagcagcaagttggcaccaacaaatgccgggtgaacaatggcggctgcagcagcctgtgcttggccacccctgggagccgccagtgcgcctgtgctgaggaccaggtgttggacgcagacggcgtcacttgcttggcgaacccatcctacgtgcctccaccccagtgccagccaggcgagtttgcctgtgccaacagccgctgcatccaggagcgctggaagtgtgacggagacaacgattgcctggacaacagtgatgaggccccagccctctgccatcagcacacctgcccctcggaccgattcaagtgcgagaacaaccggtgcatccccaaccgctggctctgcgacggggacaatgactgtgggaacagtgaagatgagtccaatgccacttgttcagcccgcacctgcccccccaaccagttctcctgtgccagtggccgctgcatccccatctcctggacgtgtgatctggatgacgactgtggggaccgctctgatgagtctgcttcgtgtgcctatcccacctgcttccccctgactcagtttacctgcaacaatggcagatgtatcaacatcaactggagatgcgacaatgacaatgactgtggggacaacagtgacgaagccggctgcagccactcctgttctagcacccagttcaagtgcaacagcgggcgttgcatccccgagcactggacctgcgatggggacaatgactgcggagactacagtgatgagacacacgccaactgcaccaaccaggccacgaggccccctggtggctgccacactgatgagttccagtgccggctggatggactatgcatccccctgcggtggcgctgcgatggggacactgactgcatggactccagcgatgagaagagctgtgagggagtgacccacgtctgcgatcccagtgtcaagtttggctgcaaggactcagctcggtgcatcagcaaagcgtgggtgtgtgatggcgacaatgactgtgaggataactcggacgaggagaactgcgagtccctggcctgcaggccaccctcgcacccttgtgccaacaacacctcagtctgcctgccccctgacaagctgtgtgatggcaacgacgactgtggcgacggctcagatgagggcgagctctgcgaccagtgctctctgaataacggtggctgcagccacaactgctcagtggcacctggcgaaggcattgtgtgttcctgccctctgggcatggagctggggcccgacaaccacacctgccagatccagagctactgtgccaagcatctcaaatgcagccaaaagtgcgaccagaacaagttcagcgtgaagtgctcctgctacgagggctgggtcctggaacctgacggcgagagctgtcgcagcctggaccccttcaagccgttcatcattttctccaaccgccatgaaatccggcgcatcgatcttcacaaaggagactacagcgtcctggtgcccggcctgcgcaacaccatcgccctggacttccacctcagccagagcgccctctactggaccgacgtggtggaggacaagatctaccgcgggaagctgctggacaacggagccctgactagtttcgaggtggtgattcagtatggcctggccacacccgagggcctggctgtagactggattgcaggcaacatctactgggtggagagtaacctggatcagatcgaggtggccaagctggatgggaccctccggaccaccctgctggccggtgacattgagcacccaagggcaatcgcactggatccccgggatgggatcctgttttggacagactgggatgccagcctgccccgcattgaggcagcctccatgagtggggctgggcgccgcaccgtgcaccgggagaccggctctgggggctggcccaacgggctcaccgtggactacctggagaagcgcatcctttggattgacgccaggtcagatgccatttactcagcccgttacgacggctctggccacatggaggtgcttcggggacacgagttcctgtcgcacccgtttgcagtgacgctgtacgggggggaggtctactggactgactggcgaacaaacacactggctaaggccaacaagtggaccggccacaatgtcaccgtggtacagaggaccaacacccagccctttgacctgcaggtgtaccacccctcccgccagcccatggctcccaatccctgtgaggccaatgggggccagggcccctgctcccacctgtgtctcatcaactacaaccggaccgtgtcctgcgcctgcccccacctcatgaagctccacaaggacaacaccacctgctatgagtttaagaagttcctgctgtacgcacgtcagatggagatccgaggtgtggacctggatgctccctactacaactacatcatctccttcacggtgcccgacatcgacaacgtcacagtgctagactacgatgcccgcgagcagcgtgtgtactggtctgacgtgcggacacaggccatcaagcgggccttcatcaacggcacaggcgtggagacagtcgtctctgcagacttgccaaatgcccacgggctggctgtggactgggtctcccgaaacctgttctggacaagctatgacaccaataagaagcagatcaatgtggcccggctggatggctccttcaagaacgcagtggtgcagggcctggagcagccccatggccttgtcgtccaccctctgcgtgggaagctctactggaccgatggtgacaacatcagcatggccaacatggatggcagcaatcgcaccctgctcttcagtggccagaagggccccgtgggcctggctattgacttccctgaaagcaaactctactggatcagctccgggaaccataccatcaaccgctgcaacctggatgggagtgggctggaggtcatcgatgccatgcggagccagctgggcaaggccaccgccctggccatcatgggggacaagctgtggtgggctgatcaggtgtcggaaaagatgggcacatgcagcaaggctgacggctcgggctccgtggtccttcggaacagcaccaccctggtgatgcacatgaaggtctatgacgagagcatccagctggaccataagggcaccaacccctgcagtgtcaacaacggtgactgctcccagctctgcctgcccacgtcagagacgacccgctcctgcatgtgcacagccggctatagcctccggagtggccagcaggcctgcgagggcgtaggttcctttctcctgtactctgtgcatgagggaatcaggggaattcccctggatcccaatgacaagtcagatgccctggtcccagtgtccgggacctcgctggctgtcggcatcgacttccacgctgaaaatgacaccatctactgggtggacatgggcctgagcacgatcagccgggccaagcgggaccagacgtggcgtgaagacgtggtgaccaatggcattggccgtgtggagggcattgcagtggactggatcgcaggcaacatctactggacagaccagggctttgatgtcatcgaggtcgcccggctcaatggctccttccgctacgtggtgatctcccagggtctagacaagccccgggccatcaccgtccacccggagaaagggtacttgttctggactgagtggggtcagtatccgcgtattgagcggtctcggctagatggcacggagcgtgtggtgctggtcaacgtcagcatcagctggcccaacggcatctcagtggactaccaggatgggaagctgtactggtgcgatgcacggacagacaagattgaacggatcgacctggagacaggtgagaaccgcgaggtggttctgtccagcaacaacatggacatgttttcagtgtctgtgtttgaggatttcatctactggagtgacaggactcatgccaacggctctatcaagcgcgggagcaaagacaatgccacagactccgtgcccctgcgaaccggcatcggcgtccagcttaaagacatcaaagtcttcaaccgggaccggcagaaaggcaccaacgtgtgcgcggtggccaatggcgggtgccagcagctgtgcctgtaccggggccgtgggcagcgggcctgcgcctgtgcccacgggatgctggctgaagacggagcatcgtgccgcgagtatgccggctacctgctctactcagagcgcaccattctcaagagtatccacctgtcggatgagcgcaacctcaatgcgcccgtgcagcccttcgaggaccctgagcacatgaagaacgtcatcgccctggcctttgactaccgggcaggcacctctccgggcacccccaatcgcatcttcttcagcgacatccactttgggaacatccaacagatcaacgacgatggctccaggaggatcaccattgtggaaaacgtgggctccgtggaaggcctggcctatcaccgtggctgggacactctctattggacaagctacacgacatccaccatcacgcgccacacagtggaccagacccgcccaggggccttcgagcgtgagaccgtcatcactatgtctggagatgaccacccacgggccttcgttttggacgagtgccagaacctcatgttctggaccaactggaatgagcagcatcccagcatcatgcgggcggcgctctcgggagccaatgtcctgacccttatcgagaaggacatccgtacccccaatggcctggccatcgaccaccgtgccgagaagctctacttctctgacgccaccctggacaagatcgagcggtgcgagtatgacggctcccaccgctatgtgatcctaaagtcagagcctgtccaccccttcgggctggctgtgtatggggagcacattttctggactgactgggtgcggcgggcagtgcagcgggccaacaagcacgtgggcagcaacatgaagctgctgcgcgtggacatcccccagcagcccatgggcatcatcgccgtggccaacgacaccaacagctgtgaactctctccatgccgaatcaacaacggtggctgccaggacctgtgtctgctcactcaccagggccatgtcaactgctcatgccgagggggccgaatcctccaggatgacctcacctgccgagcggtgaattcctcttgccgagcacaagatgagtttgagtgtgccaatggcgagtgcatcaacttcagcctgacctgcgacggcgtcccccactgcaaggacaagtccgatgagaagccatcctactgcaactcccgccgctgcaagaagactttccggcagtgcagcaatgggcgctgtgtgtccaacatgctgtggtgcaacggggccgacgactgtggggatggctctgacgagatcccttgcaacaagacagcctgtggtgtgggcgagttccgctgccgggacgggacctgcatcgggaactccagccgctgcaaccagtttgtggattgtgaggacgcctcagatgagatgaactgcagtgagtgacgccctttgctggcacctcctgggctcctccccattgctcactgcatctcccgccttcaggccctcctgcacctgcccacattcctctctgccttccctcatccccgctgacagcctccatctccctgaggccctgtccccatcccgctcctgctcctgggctctcgtgggtgggcgctgcatccccatgagctggacgtgtgacaaagaggatgactgtgaacatggcgaggacgagacccactgcaacaagttctgctcagaggcccagtttgagtgccagaaccatcgctgcatctccaagcagtggctgtgtgacggcagcgatgactgtggggatggctcagacgaggctgctcactgtgaaggcaagacgtgcggcccctcctccttctcctgccctggcacccacgtgtgcgtccccgagcgctggctctgtgacggtgacaaagactgtgctgatggtgcagacgagagcatcgcagctggttgcttgtacaacagcacttgtgacgaccgtgagttcatgtgccagaaccgccagtgcatccccaagcacttcgtgtgtgaccacgaccgtgactgtgcagatggctctgatgagtcccccgagtgtgagtacccgacctgcggccccagtgagttccgctgtgccaatgggcgctgtctgagctcccgccagtgggagtgtgatggcgagaatgactgccacgaccagagtgacgaggctcccaagaacccacactgcaccagcccagagcacaagtgcaatgcctcgtcacagttcctgtgcagcagtgggcgctgtgtggctgaggcactgctctgcaacggccaggatgactgtggcgacagctcggacgagcgtggctgccacatcaatgagtgtctcagccgcaagctcagtggctgcagccaggactgtgaggacctcaagatcggcttcaagtgccgctgtcgccctggcttccggctgaaggacgacggccggacgtgtgctgatgtggacgagtgcagcaccaccttcccctgcagccagcgctgcatcaacacccatggcagctataagtgtctgtgtgtggagggctatgcaccccgcggcggcgacccccacagctgcaaggctgtgactgacgaggaaccgtttctgatcttcgccaaccggtactacctgcgcaagctcaacctggacgggtccaactacacgttacttaagcagggcctgaacaacgccgttgccttggattttgactaccgagagcagatgatctactggacagatgtgaccacccagggcagcatgatccgaaggatgcaccttaacgggagcaatgtgcaggtcctacaccgtacaggcctcagcaaccccgatgggctggctgtggactgggtgggtggcaacctgtactggtgcgacaaaggccgggacaccatcgaggtgtccaagctcaatggggcctatcggacggtgctggtcagctctggcctccgtgagcccagggctctggtggtggatgtgcagaatgggtacctgtactggacagactggggtgaccattcactgatcggccgcatcggcatggatgggtccagccgcagcgtcatcgtggacaccaagatcacatggcccaatggcctgacgctggactatgtcactgagcgcatctactgggccgacgcccgcgaggactacattgaatttgccagcctggatggctccaatcgccacgttgtgctgagccaggacatcccgcacatctttgcactgaccctgtttgaggactacgtctactggaccgactgggaaacaaagtccattaaccgagcccacaagaccacaggcaccaacaaaacgctcctcatcagcacgctgcaccggcccatggacctgcatgtcttccatgccctgcgccagccagacgtgcccaatcacccctgcaaggtcaacaatggtggctgcagcaacctgtgcctgctgtcccccgggggagggcacaaatgtgcctgccccaccaacttctacctgggcagcgatgggcgcacctgtgtgtccaactgcacggctagccagtttgtatgcaagaacgacaagtgcatccccttctggtggaagtgtgacaccgaggacgactgcggggaccactcagacgagcccccggactgccctgagttcaagtgccggcccggacagttccagtgctccacaggtatctgcacaaaccctgccttcatctgcgatggcgacaatgactgccaggacaacagtgacgaggccaactgtgacatccacgtctgcttgcccagtcagttcaaatgcaccaacaccaaccgctgtattcccggcatcttccgctgcaatgggcaggacaactgcggagatggggaggatgagagggactgccccgaggtgacctgcgcccccaaccagttccagtgctccattaccaaacggtgcatcccccgggtctgggtctgcgaccgggacaatgactgtgtggatggcagtgatgagcccgccaactgcacccagatgacctgtggtgtggacgagttccgctgcaaggattcgggccgctgcatcccagcgcgttggaagtgtgacggagaggatgactgtggggatggctcggatgagcccaaggaagagtgtgatgaacgcacctgtgagccataccagttccgctgcaagaacaaccgctgcgtgcccggccgctggcagtgcgactacgacaacgattgcggtgacaactccgatgaagagagctgcacccctcggccctgctccgagagtgagttctcctgtgccaacggccgctgcatcgcggggcgctggaaatgcgatggagaccacgactgcgcggacggctcggacgagaaagactgcaccccccgctgtgacatggaccagttccagtgcaagagcggccactgcatccccctgcgctggcgctgtgacgcagacgccgactgcatggacggcagcgacgaggaggcctgcggcactggcgtgcggacctgccccctggacgagttccagtgcaacaacaccttgtgcaagccgctggcctggaagtgcgatggcgaggatgactgtggggacaactcagatgagaaccccgaggagtgtgcccggttcgtgtgccctcccaaccggcccttccgttgcaagaatgaccgcgtctgtctgtggatcgggcgccaatgcgatggcacggacaactgtggggatgggactgatgaagaggactgtgagccccccacagcccacaccacccactgcaaagacaagaaggagtttctgtgccggaaccagcgctgcctctcctcctccctgcgctgcaacatgttcgatgactgcggggacggctctgacgaggaggactgcagcatcgaccccaagctgaccagctgcgccaccaatgccagcatctgtggggacgaggcacgctgcgtgcgcaccgagaaagcggcctactgtgcctgccgctcgggcttccacaccgtgcccggccagcccggatgccaagacatcaacgagtgcctgcgcttcggcacctgctcccagctctgcaacaacaccaagggcggccacctctgcagctgcgctcggaacttcatgaagacgcacaacacctgcaaggccgaaggctctgagtaccaggtcctgtacatcgctgatgacaatgagatccgcagcctgttccccggccacccccattcggcttacgagcaggcattccagggtgacgagagtgtccgcattgatgctatggatgtccatgtcaaggctggccgtgtctattggaccaactggcacacgggcaccatctcctaccgcagcctgccacctgctgcgcctcctaccacttccaaccgccaccggcgacagattgaccggggtgtcacccacctcaacatttcagggctgaagatgcccagaggcatcgccatcgactgggtggccggaaacgtgtactggaccgactcgggccgagatgtgattgaggtggcgcagatgaagggcgagaaccgcaagacgctcatctcgggcatgattgacgagccccacgccattgtggtggacccactgagggggaccatgtactggtcagactggggcaaccaccccaagattgagacggcagcgatggatgggacgcttcgggagacactggtgcaggacaacattcagtggcccacaggcctggccgtggattatcacaatgagcggctgtactgggcagacgccaagctttcagtcatcggcagcatccggctcaatggcacggaccccattgtggctgctgacagcaaacgaggcctaagtcaccccttcagcatcgacgtctttgaggattacatctatggtgtcacctacatcaataatcgtgtcttcaagatccataagtttggccacagccccttggtcaacctgacagggggcctgagccacgcctctgacgtggtcctttaccatcagcacaagcagcccgaagtgaccaacccatgtgaccgcaagaaatgcgagtggctctgcctgctgagccccagtgggcctgtctgcacctgtcccaatgggaagcggctggacaacggcacatgcgtgcctgtgccctctccaacgccccccccagatgctccccggcctggaacctgtaacctgcagtgcttcaacggtggcagctgtttcctcaatgcacggaggcagcccaagtgccgctgccaaccccgctacacgggtgacaagtgtgaactggaccagtgctgggagcactgtcgcaatgggggcacctgtgctgcctccccctctggcatgcccacgtgccggtgccccacgggcttcacgggccccaaatgcacccagcaggtgtgtgcgggctactgtgccaacaacagcacctgcactgtcaaccagggcaaccagccccagtgccgatgcctacccggcttcctgggcgaccgctgccagtaccggcagtgctctggctactgtgagaactttggcacatgccagatggctgctgatggctcccgacaatgccgctgcactgcctactttgagggatcgaggtgtgaggtgaacaagtgcagccgctgtctcgaaggggcctgtgtggtcaacaagcagagtggggatgtcacctgcaactgcacggatggccgggtggcccccagctgtctgacctgcgtcggccactgcagcaatggcggctcctgtaccatgaacagcaaaatgatgcctgagtgccagtgcccaccccacatgacagggccccggtgtgaggagcacgtcttcagccagcagcagccaggacatatagcctccatcctaatccctctgctgttgctgctgctgctggttctggtggccggagtggtattctggtataagcggcgagtccaaggggctaagggcttccagcaccaacggatgaccaacggggccatgaacgtggagattggaaaccccacctacaagatgtacgaaggcggagagcctgatgatgtgggaggcctactggacgctgactttgccctggaccctgacaagcccaccaacttcaccaaccccgtgtatgccacactctacatggggggccatggcagtcgccactccctggccagcacggacgagaagcgagaactcctgggccggggccctgaggacgagataggggaccccttggcatagggccctgccccgtcggactgcccccagaaagcctcctgccccctgccggtgaagtccttcagtgagcccctccccagccagcccttccctggccccgccggatgtataaatgtaaaaatgaaggaattacattttatatgtgagcgagcaagccggcaagcgagcacagtattatttctccatcccctccctgcctgctccttggcacccccatgctgccttcagggagacaggcagggagggcttggggctgcacctcctaccctcccaccagaacgcaccccactgggagagctggtggtgcagccttcccctccctgtataagacactttgccaaggaggtgggccacacccaggaagggaaagcgggcagccccgttttggggacgtgaacgttttaataatttttgctgaattcctttacaactaaataacacagatattgttataaat

SEQ ID NO: 475 - protein, 2627 aa, Homo sapiens
MLTPPLLLLLPLLSALVAAAIDAPKTCSPKQFACRDQITCISKGWRCDGERDCPDGSDEAPEICPQSKAQRCQPNEHNCLGTELCVPMSRLCNGVQDCMDGSDEGPHCRELQGNCSRLGCQHHCVPTLDGPTCYCNSSFQLQADGKTCKDFDECSVYGTCSQLCTNTDGSFICGCVEGYLLQPDNRSCKAKNEPVDRPPVLLIANSQNILATYLSGAQVSTITPTSTRQTTAMDFSYANETVCWVHVGDSAAQTQLKCARMPGLKGFVDEHTINISLSLHHVEQMAIDWLTGNFYFVDDIDDRIFVCNRNGDTCVTLLDLELYNPKGIALDPAMGKVFFTDYGQIPKVERCDMDGQNRTKLVDSKIVFPHGITLDLVSRLVYWADAYLDYIEVVDYEGKGRQTIIQGILIEHLYGLTVFENYLYATNSDNANAQQKTSVIRVNRFNSTEYQVVTRVDKGGALHIYHQRRQPRVRSHACENDQYGKPGGCSDICLLANSHKARTCRCRSGFSLGSDGKSCKKPEHELFLVYGKGRPGIIRGMDMGAKVPDEHMIPIENLMNPRALDFHAETGFIYFADTTSYLIGRQKIDGTERETILKDGIHNVEGVAVDWMGDNLYWTDDGPKKTISVARLEKAAQTRKTLIEGKMTHPRAIVVDPLNGWMYWTDWEEDPKDSRRGRLERAWMDGSHRDIFVTSKTVLWPNGLSLDIPAGRLYWVDAFYDRIETILLNGTDRKIVYEGPELNHAFGLCHHGNYLFWTEYRSGSVYRLERGVGGAPPTVTLLRSPPIFEIRMYDAQQQQVGTNKCRVNNGGCSSLCLATPGSRQCACAEDQVLDADGVTCLANPSYVPPPQCQPGEFACANSRCIQERWKCDGDNDCLDNSDEAPALCHQHTCPSDRFKCENNRCIPNRWLCDGDNDCGNSEDESNATCSARTCPPNQFSCASGRCIPISWTCDLDDDCGDRSDESASCAYPTCFPLTQFTCNNGRCININWRCDNDNDCGDNSDEAGCSHSCSSTQFKCNSGRCIPEHWTCDGDNDCGDYSDETHANCTNQAWPGGCHTDEFQCRLDGLCIPLRWRCDGDTDCMDSSDEKSCEGVTHVCDPSVKFGCKDSARCISKAWVCDGDNDCEDNSDEENCESLACRPPSHPCANNTSVCLPPDKLCDGNDDCGDGSDEGELCDQCSLNNGGCSHNCSVAPGEGIVCSCPLGMELGPDNHTCQIQSYCAKHLKCSQKCDQNKFSVKCSCYEGWVLEPDGESCRSLDPFKPFIIFSNRHEIRRIDLHKGDYSVLVPGLRNTIALDFHLSQSALYWTDVVEDKIYRGKLLDNGALTSFEVVIQYGLATPEGLAVDWIAGNIYWVESNLDQIEVAKLDGTLRTTLLAGDIEHPRAIALDPRDGILFWTDWDASLPRIEAASMSGAGRRTVHRETGSGGWPNGLTVDYLEKRILWIDARSDAIYSARYDGSGHMEVLRGHEFLSHPFAVTLYGGEVYWTDWRTNTLAKANKWTGHNVTVVQRTNTQPFDLQVYHPSRQPMAPNPCEANGGQGPCSHLCLINYNRTVSCACPHLMKLHKDNTTCYEFKKFLLYARQMEIRGVDLDAPYYNYIISFTVPDIDNVTVLDYDAREQRVYWSDVRTQAIKRAFINGTGVETVVSADLPNAHGLAVDWVSRNLFWTSYDTNKKQINVARLDGSFKNAVVQGLEQPHGLVVHPLRGKLYWTDGDNISMANMDGSNRTLLFSGQKGPVGLAIDFPESKLYWISSGNHTINRCNLDGSGLEVIDAMRSQLGKATAIMGDKLWWADQVSEKMGTCSKADGSGSVVLRNSTTLVMHMKVYDESIQLDHKGTNPCSVNNGDCSQLCLPTSETTRSCMCTAGYSLRSGQQACEGVGSFLKVHEGIRGIPLDPNDKSDALVPVSGTSLAVGIDFHAENDTIYWVDMGLSTISRAKRDQTWREDVVTNGIGRVEGIAVDWIAGNIYWTDQGFDVIEVARLNGSFRYVVISQGLDKPRAITVHPEKGYLFWTEWGQYPRIERSRLDGTERVVLVNVSISWPNGISVDYQDGKLYWCDARTDKIERIDLETGENREVVLSSNNMDMFSVSVFEDFIYWSDRTHANGSIKRGSKDNATDSVPLRTGIGVQLKDIKVFNRDRQKGTNVCAVANGGCQQLCLYRGRGQRACACAHGMLAEDGASCREYAGYLKERTILKSIHLSDERNLNAPVQPFEDPEHMKNVIAFDYRAGTSPGTPNRIFFSDIHFGNIQQINDDGSRRITIVENVGSVEGLAYHRGWDTLYWTSYTTSTITRHTVDQWGAFERETVITMSGDDHPRAFVLDECQNLMFWTNWNEQHPSIMRAALSGANVLTLIEKDIRTPNGLAIDHRAEKLYFSDATLDKIERCEYDGSHRYVILKSEPVHPFGLAVYGEHIFWTDWVRRAVQRANKHVGSNMKLLRVDIPQQPMGIIAVANDTNSCELSPCRINNGGCQDLCLLTHQGHVNCSCRGGRILQDDLTCRAVNSSCRAQDEFECANGECINFSLTCDGVPHCKDKSDEKPSYCNSRRCKKTFRQCSNGRCVSNMLWCNGADDCGDGSDEIPCNKTACGVGEFRCRDGTCIGNSSRCNQFVDCEDASDEMNCSE

SEQ ID NO: 476 - DNA, 14745 bp, Homo sapiens
cagcggtgcgagctccaggcccatgcactgaggaggcggaaacaaggggagcccccagagctccatcaagccccctccaaaggctcccctacccggtccacgccccccaccccccctccccgcctcctcccaattgtgcatttttgcagccggaggcggctccgagatggggctgtgagcttcgcccggggagggggaaagagcagcgaggagtgaagcgggggggtggggtgaagggtttggatttcggggcagggggcgcacccccgtcagcaggccctccccaaggggctcggaactctacctcttcacccacgcccctggtgcgctttgccgaaggaaagaataagaacagagaaggaggagggggaaaggaggaaaagggggaccccccaactggggggggtgaaggagagaagtagcaggaccagaggggaaggggctgctgcttgcatcagcccacaccatgctgaccccgccgttgctcctgctgctgcccctgctctcagctctggtcgcggcggctatcgacgcccctaagacttgcagccccaagcagtttgcctgcagagatcaaataacctgtatctcaaagggctggcggtgcgacggtgagagggactgcccagacggatctgacgaggcccctgagatttgtccacagagtaaggcccagcgatgccagccaaacgagcataactgcctgggtactgagctgtgtgttcccatgtcccgcctctgcaatggggtccaggactgcatggacggctcagatgaggggccccactgccgagagctccaaggcaactgctctcgcctgggctgccagcaccattgtgtccccacactcgatgggcccacctgctactgcaacagcagctttcagcttcaggcagatggcaagacctgcaaagattttgatgagtgctcagtgtacggcacctgcagccagctatgcaccaacacagacggctccttcatatgtggctgtgttgaaggatacctcctgcagccggataaccgctcctgcaaggccaagaacgagccagtagaccggccccctgtgctgttgatagccaactcccagaacatcttggccacgtacctgagtggggcccaggtgtctaccatcacacctacgagcacgcggcagaccacagccatggacttcagctatgccaacgagaccgtatgctgggtgcatgttggggacagtgctgctcagacgcagctcaagtgtgcccgcatgcctggcctaaagggcttcgtggatgagcacaccatcaacatctccctcagtctgcaccacgtggaacagatggccatcgactggctgacaggcaacttctactttgtggatgacatcgatgataggatctttgtctgcaacagaaatggggacacatgtgtcacattgctagacctggaactctacaaccccaagggcattgccctggaccctgccatggggaaggtgtttttcactgactatgggcagatcccaaaggtggaacgctgtgacatggatgggcagaaccgcaccaagctcgtcgacagcaagattgtgtttcctcatggcatcacgctggacctggtcagccgccttgtctactgggcagatgcctatctggactatattgaagtggtggactatgagggcaagggccgccagaccatcatccagggcatcctgattgagcacctgtacggcctgactgtgtttgagaattatctctatgccaccaactcggacaatgccaatgcccagcagaagacgagtgtgatccgtgtgaaccgctttaacagcaccgagtaccaggttgtcacccgggtggacaagggtggtgccctccacatctaccaccagaggcgtcagccccgagtgaggagccatgcctgtgaaaacgaccagtatgggaagccgggtggctgctctgacatctgcctgctggccaacagccacaaggcgcggacctgccgctgccgttccggcttcagcctgggcagtgacgggaagtcatgcaagaagccggagcatgagctgttcctcgtgtatggcaagggccggccaggcatcatccggggcatggatatgggggccaaggtcccggatgagcacatgatccccattgaaaacctcatgaacccccgagccctggacttccacgctgagaccggcttcatctactttgccgacaccaccagctacctcattggccgccagaagattgatggcactgagcgggagaccatcctgaaggacggcatccacaatgtggagggtgtggccgtggactggatgggagacaatctgtactggacggacgatgggcccaaaaagacaatcagcgtggccaggctggagaaagctgctcagacccgcaagactttaatcgagggcaaaatgacacaccccagggctattgtggtggatccactcaatgggtggatgtactggacagactgggaggaggaccccaaggacagtcggcgtgggcggctggagagggcgtggatggatggctcacaccgagacatctttgtcacctccaagacagtgctttggcccaatgggctaagcctggacatcccggctgggcgcctctactgggtggatgccttctacgaccgcatcgagacgatactgctcaatggcacagaccggaagattgtgtatgaaggtcctgagctgaaccacgcctttggcctgtgtcaccatggcaactacctcttctggactgagtatcggagtggcagtgtctaccgcttggaacggggtgtaggaggcgcaccccccactgtgacccttctgcgcagtgagcggccccccatctttgagatccgaatgtatgatgcccagcagcagcaagttggcaccaacaaatgccgggtgaacaatggcggctgcagcagcctgtgcttggccacccctgggagccgccagtgcgcctgtgctgaggaccaggtgttggacgcagacggcgtcacttgcttggcgaacccatcctacgtgcctccaccccagtgccagccaggcgagtttgcctgtgccaacagccgctgcatccaggagcgctggaagtgtgacggagacaacgattgcctggacaacagtgatgaggccccagccctctgccatcagcacacctgcccctcggaccgattcaagtgcgagaacaaccggtgcatccccaaccgctggctctgcgacggggacaatgactgtgggaacagtgaagatgagtccaatgccacttgttcagcccgcacctgcccccccaaccagttctcctgtgccagtggccgctgcatccccatctcctggacgtgtgatctggatgacgactgtggggaccgctctgatgagtctgcttcgtgtgcctatcccacctgcttccccctgactcagtttacctgcaacaatggcagatgtatcaacatcaactggagatgcgacaatgacaatgactgtggggacaacagtgacgaagccggctgcagccactcctgttctagcacccagttcaagtgcaacagcgggcgttgcatccccgagcactggacctgcgatggggacaatgactgcggagactacagtgatgagacacacgccaactgcaccaaccaggccacgaggccccctggtggctgccacactgatgagttccagtgccggctggatggactatgcatccccctgcggtggcgctgcgatggggacactgactgcatggactccagcgatgagaagagctgtgagggagtgacccacgtctgcgatcccagtgtcaagtttggctgcaaggactcagctcggtgcatcagcaaagcgtgggtgtgtgatggcgacaatgactgtgaggataactcggacgaggagaactgcgagtccctggcctgcaggccaccctcgcacccttgtgccaacaacacctcagtctgcctgccccctgacaagctgtgtgatggcaacgacgactgtggcgacggctcagatgagggcgagctctgcgaccagtgctctctgaataacggtggctgcagccacaactgctcagtggcacctggcgaaggcattgtgtgttcctgccctctgggcatggagctggggcccgacaaccacacctgccagatccagagctactgtgccaagcatctcaaatgcagccaaaagtgcgaccagaacaagttcagcgtgaagtgctcctgctacgagggctgggtcctggaacctgacggcgagagctgtcgcagcctggaccccttcaagccgttcatcattttctccaaccgccatgaaatccggcgcatcgatcttcacaaaggagactacagcgtcctggtgcccggcctgcgcaacaccatcgccctggacttccacctcagccagagcgccctctactggaccgacgtggtggaggacaagatctaccgcgggaagctgctggacaacggagccctgactagtttcgaggtggtgattcagtatggcctggccacacccgagggcctggctgtagactggattgcaggcaacatctactgggtggagagtaacctggatcagatcgaggtggccaagctggatgggaccctccggaccaccctgctggccggtgacattgagcacccaagggcaatcgcactggatccccgggatgggatcctgttttggacagactgggatgccagcctgccccgcattgaggcagcctccatgagtggggctgggcgccgcaccgtgcaccgggagaccggctctgggggctggcccaacgggctcaccgtggactacctggagaagcgcatcctttggattgacgccaggtcagatgccatttactcagcccgttacgacggctctggccacatggaggtgcttcggggacacgagttcctgtcgcacccgtttgcagtgacgctgtacgggggggaggtctactggactgactggcgaacaaacacactggctaaggccaacaagtggaccggccacaatgtcaccgtggtacagaggaccaacacccagccctttgacctgcaggtgtaccacccctcccgccagcccatggctcccaatccctgtgaggccaatgggggccagggcccctgctcccacctgtgtctcatcaactacaaccggaccgtgtcctgcgcctgcccccacctcatgaagctccacaaggacaacaccacctgctatgagtttaagaagttcctgctgtacgcacgtcagatggagatccgaggtgtggacctggatgctccctactacaactacatcatctccttcacggtgcccgacatcgacaacgtcacagtgctagactacgatgcccgcgagcagcgtgtgtactggtctgacgtgcggacacaggccatcaagcgggccttcatcaacggcacaggcgtggagacagtcgtctctgcagacttgccaaatgcccacgggctggctgtggactgggtctcccgaaacctgttctggacaagctatgacaccaataagaagcagatcaatgtggcccggctggatggctccttcaagaacgcagtggtgcagggcctggagcagccccatggccttgtcgtccaccctctgcgtgggaagctctactggaccgatggtgacaacatcagcatggccaacatggatggcagcaatcgcaccctgctcttcagtggccagaagggccccgtgggcctggctattgacttccctgaaagcaaactctactggatcagctccgggaaccataccatcaaccgctgcaacctggatgggagtgggctggaggtcatcgatgccatgcggagccagctgggcaaggccaccgccctggccatcatgggggacaagctgtggtgggctgatcaggtgtcggaaaagatgggcacatgcagcaaggctgacggctcgggctccgtggtccttcggaacagcaccaccctggtgatgcacatgaaggtctatgacgagagcatccagctggaccataagggcaccaacccctgcagtgtcaacaacggtgactgctcccagctctgcctgcccacgtcagagacgacccgctcctgcatgtgcacagccggctatagcctccggagtggccagcaggcctgcgagggcgtaggttcctttctcctgtactctgtgcatgagggaatcaggggaattcccctggatcccaatgacaagtcagatgccctggtcccagtgtccgggacctcgctggctgtcggcatcgacttccacgctgaaaatgacaccatctactgggtggacatgggcctgagcacgatcagccgggccaagcgggaccagacgtggcgtgaagacgtggtgaccaatggcattggccgtgtggagggcattgcagtggactggatcgcaggcaacatctactggacagaccagggctttgatgtcatcgaggtcgcccggctcaatggctccttccgctacgtggtgatctcccagggtctagacaagccccgggccatcaccgtccacccggagaaagggtacttgttctggactgagtggggtcagtatccgcgtattgagcggtctcggctagatggcacggagcgtgtggtgctggtcaacgtcagcatcagctggcccaacggcatctcagtggactaccaggatgggaagctgtactggtgcgatgcacggacagacaagattgaacggatcgacctggagacaggtgagaaccgcgaggtggttctgtccagcaacaacatggacatgttttcagtgtctgtgtttgaggatttcatctactggagtgacaggactcatgccaacggctctatcaagcgcgggagcaaagacaatgccacagactccgtgcccctgcgaaccggcatcggcgtccagcttaaagacatcaaagtcttcaaccgggaccggcagaaaggcaccaacgtgtgcgcggtggccaatggcgggtgccagcagctgtgcctgtaccggggccgtgggcagcgggcctgcgcctgtgcccacgggatgctggctgaagacggagcatcgtgccgcgagtatgccggctacctgctctactcagagcgcaccattctcaagagtatccacctgtcggatgagcgcaacctcaatgcgcccgtgcagcccttcgaggaccctgagcacatgaagaacgtcatcgccctggcctttgactaccgggcaggcacctctccgggcacccccaatcgcatcttcttcagcgacatccactttgggaacatccaacagatcaacgacgatggctccaggaggatcaccattgtggaaaacgtgggctccgtggaaggcctggcctatcaccgtggctgggacactctctattggacaagctacacgacatccaccatcacgcgccacacagtggaccagacccgcccaggggccttcgagcgtgagaccgtcatcactatgtctggagatgaccacccacgggccttcgttttggacgagtgccagaacctcatgttctggaccaactggaatgagcagcatcccagcatcatgcgggcggcgctctcgggagccaatgtcctgacccttatcgagaaggacatccgtacccccaatggcctggccatcgaccaccgtgccgagaagctctacttctctgacgccaccctggacaagatcgagcggtgcgagtatgacggctcccaccgctatgtgatcctaaagtcagagcctgtccaccccttcgggctggctgtgtatggggagcacattttctggactgactgggtgcggcgggcagtgcagcgggccaacaagcacgtgggcagcaacatgaagctgctgcgcgtggacatcccccagcagcccatgggcatcatcgccgtggccaacgacaccaacagctgtgaactctctccatgccgaatcaacaacggtggctgccaggacctgtgtctgctcactcaccagggccatgtcaactgctcatgccgagggggccgaatcctccaggatgacctcacctgccgagcggtgaattcctcttgccgagcacaagatgagtttgagtgtgccaatggcgagtgcatcaacttcagcctgacctgcgacggcgtcccccactgcaaggacaagtccgatgagaagccatcctactgcaactcccgccgctgcaagaagactttccggcagtgcagcaatgggcgctgtgtgtccaacatgctgtggtgcaacggggccgacgactgtggggatggctctgacgagatcccttgcaacaagacagcctgtggtgtgggcgagttccgctgccgggacgggacctgcatcgggaactccagccgctgcaaccagtttgtggattgtgaggacgcctcagatgagatgaactgcagtgacttcgcctgccctagtgggcgctgcatccccatgagctggacgtgtgacaaagaggatgactgtgaacatggcgaggacgagacccactgcaacaagttctgctcagaggcccagtttgagtgccagaaccatcgctgcatctccaagcagtggctgtgtgacggcagcgatgactgtggggatggctcagacgaggctgctcactgtgaaggcaagacgtgcggcccctcctccttctcctgccctggcacccacgtgtgcgtccccgagcgctggctctgtgacggtgacaaagactgtgctgatggtgcagacgagagcatcgcagctggttgcttgtacaacagcacttgtgacgaccgtgagttcatgtgccagaaccgccagtgcatccccaagcacttcgtgtgtgaccacgaccgtgactgtgcagatggctctgatgagtcccccgagtgtgagtacccgacctgcggccccagtgagttccgctgtgccaatgggcgctgtctgagctcccgccagtgggagtgtgatggcgagaatgactgccacgaccagagtgacgaggctcccaagaacccacactgcaccagcccagagcacaagtgcaatgcctcgtcacagttcctgtgcagcagtgggcgctgtgtggctgaggcactgctctgcaacggccaggatgactgtggcgacagctcggacgagcgtggctgccacatcaatgagtgtctcagccgcaagctcagtggctgcagccaggactgtgaggacctcaagatcggcttcaagtgccgctgtcgccctggcttccggctgaaggacgacggccggacgtgtgctgatgtggacgagtgcagcaccaccttcccctgcagccagcgctgcatcaacacccatggcagctataagtgtctgtgtgtggagggctatgcaccccgcggcggcgacccccacagctgcaaggctgtgactgacgaggaaccgtttctgatcttcgccaaccggtactacctgcgcaagctcaacctggacgggtccaactacacgttacttaagcagggcctgaacaacgccgttgccttggattttgactaccgagagcagatgatctactggacagatgtgaccacccagggcagcatgatccgaaggatgcaccttaacgggagcaatgtgcaggtcctacaccgtacaggcctcagcaaccccgatgggctggctgtggactgggtgggtggcaacctgtactggtgcgacaaaggccgggacaccatcgaggtgtccaagctcaatggggcctatcggacggtgctggtcagctctggcctccgtgagcccagggctctggtggtggatgtgcagaatgggtacctgtactggacagactggggtgaccattcactgatcggccgcatcggcatggatgggtccagccgcagcgtcatcgtggacaccaagatcacatggcccaatggcctgacgctggactatgtcactgagcgcatctactgggccgacgcccgcgaggactacattgaatttgccagcctggatggctccaatcgccacgttgtgctgagccaggacatcccgcacatctttgcactgaccctgtttgaggactacgtctactggaccgactgggaaacaaagtccattaaccgagcccacaagaccacaggcaccaacaaaacgctcctcatcagcacgctgcaccggcccatggacctgcatgtcttccatgccctgcgccagccagacgtgcccaatcacccctgcaaggtcaacaatggtggctgcagcaacctgtgcctgctgtcccccgggggagggcacaaatgtgcctgccccaccaacttctacctgggcagcgatgggcgcacctgtgtgtccaactgcacggctagccagtttgtatgcaagaacgacaagtgcatccccttctggtggaagtgtgacaccgaggacgactgcggggaccactcagacgagcccccggactgccctgagttcaagtgccggcccggacagttccagtgctccacaggtatctgcacaaaccctgccttcatctgcgatggcgacaatgactgccaggacaacagtgacgaggccaactgtgacatccacgtctgcttgcccagtcagttcaaatgcaccaacaccaaccgctgtattcccggcatcttccgctgcaatgggcaggacaactgcggagatggggaggatgagagggactgccccgaggtgacctgcgcccccaaccagttccagtgctccattaccaaacggtgcatcccccgggtctgggtctgcgaccgggacaatgactgtgtggatggcagtgatgagcccgccaactgcacccagatgacctgtggtgtggacgagttccgctgcaaggattcgggccgctgcatcccagcgcgttggaagtgtgacggagaggatgactgtggggatggctcggatgagcccaaggaagagtgtgatgaacgcacctgtgagccataccagttccgctgcaagaacaaccgctgcgtgcccggccgctggcagtgcgactacgacaacgattgcggtgacaactccgatgaagagagctgcacccctcggccctgctccgagagtgagttctcctgtgccaacggccgctgcatcgcggggcgctggaaatgcgatggagaccacgactgcgcggacggctcggacgagaaagactgcaccccccgctgtgacatggaccagttccagtgcaagagcggccactgcatccccctgcgctggcgctgtgacgcagacgccgactgcatggacggcagcgacgaggaggcctgcggcactggcgtgcggacctgccccctggacgagttccagtgcaacaacaccttgtgcaagccgctggcctggaagtgcgatggcgaggatgactgtggggacaactcagatgagaaccccgaggagtgtgcccggttcgtgtgccctcccaaccggcccttccgttgcaagaatgaccgcgtctgtctgtggatcgggcgccaatgcgatggcacggacaactgtggggatgggactgatgaagaggactgtgagccccccacagcccacaccacccactgcaaagacaagaaggagtttctgtgccggaaccagcgctgcctctcctcctccctgcgctgcaacatgttcgatgactgcggggacggctctgacgaggaggactgcagcatcgaccccaagctgaccagctgcgccaccaatgccagcatctgtggggacgaggcacgctgcgtgcgcaccgagaaagcggcctactgtgcctgccgctcgggcttccacaccgtgcccggccagcccggatgccaagacatcaacgagtgcctgcgcttcggcacctgctcccagctctgcaacaacaccaagggcggccacctctgcagctgcgctcggaacttcatgaagacgcacaacacctgcaaggccgaaggctctgagtaccaggtcctgtacatcgctgatgacaatgagatccgcagcctgttccccggccacccccattcggcttacgagcaggcattccagggtgacgagagtgtccgcattgatgctatggatgtccatgtcaaggctggccgtgtctattggaccaactggcacacgggcaccatctcctaccgcagcctgccacctgctgcgcctcctaccacttccaaccgccaccggcgacagattgaccggggtgtcacccacctcaacatttcagggctgaagatgcccagaggcatcgccatcgactgggtggccggaaacgtgtactggaccgactcgggccgagatgtgattgaggtggcgcagatgaagggcgagaaccgcaagacgctcatctcgggcatgattgacgagccccacgccattgtggtggacccactgagggggaccatgtactggtcagactggggcaaccaccccaagattgagacggcagcgatggatgggacgcttcgggagacactggtgcaggacaacattcagtggcccacaggcctggccgtggattatcacaatgagcggctgtactgggcagacgccaagctttcagtcatcggcagcatccggctcaatggcacggaccccattgtggctgctgacagcaaacgaggcctaagtcaccccttcagcatcgacgtctttgaggattacatctatggtgtcacctacatcaataatcgtgtcttcaagatccataagtttggccacagccccttggtcaacctgacagggggcctgagccacgcctctgacgtggtcctttaccatcagcacaagcagcccgaagtgaccaacccatgtgaccgcaagaaatgcgagtggctctgcctgctgagccccagtgggcctgtctgcacctgtcccaatgggaagcggctggacaacggcacatgcgtgcctgtgccctctccaacgccccccccagatgctccccggcctggaacctgtaacctgcagtgcttcaacggtggcagctgtttcctcaatgcacggaggcagcccaagtgccgctgccaaccccgctacacgggtgacaagtgtgaactggaccagtgctgggagcactgtcgcaatgggggcacctgtgctgcctccccctctggcatgcccacgtgccggtgccccacgggcttcacgggccccaaatgcacccagcaggtgtgtgcgggctactgtgccaacaacagcacctgcactgtcaaccagggcaaccagccccagtgccgatgcctacccggcttcctgggcgaccgctgccagtaccggcagtgctctggctactgtgagaactttggcacatgccagatggctgctgatggctcccgacaatgccgctgcactgcctactttgagggatcgaggtgtgaggtgaacaagtgcagccgctgtctcgaaggggcctgtgtggtcaacaagcagagtggggatgtcacctgcaactgcacggatggccgggtggcccccagctgtctgacctgcgtcggccactgcagcaatggcggctcctgtaccatgaacagcaaaatgatgcctgagtgccagtgcccaccccacatgacagggccccggtgtgaggagcacgtcttcagccagcagcagccaggacatatagcctccatcctaatccctctgctgttgctgctgctgctggttctggtggccggagtggtattctggtataagcggcgagtccaaggggctaagggcttccagcaccaacggatgaccaacggggccatgaacgtggagattggaaaccccacctacaagatgtacgaaggcggagagcctgatgatgtgggaggcctactggacgctgactttgccctggaccctgacaagcccaccaacttcaccaaccccgtgtatgccacactctacatggggggccatggcagtcgccactccctggccagcacggacgagaagcgagaactcctgggccggggccctgaggacgagataggggaccccttggcatagggccctgccccgtcggactgcccccagaaagcctcctgccccctgccggtgaagtccttcagtgagcccctccccagccagcccttccctggccccgccggatgtataaatgtaaaaatgaaggaattacattttatatgtgagcgagcaagccggcaagcgagcacagtattatttctccatcccctccctgcctgctccttggcacccccatgctgccttcagggagacaggcagggagggcttggggctgcacctcctaccctcccaccagaacgcaccccactgggagagctggtggtgcagccttcccctccctgtataagacactttgccaaggctctcccctctcgccccatccctgcttgcccgctcccacagcttcctgagggctaattctgggaagggagagttctttgctgcccctgtctggaagacgtggctctgggtgaggtaggcgggaaaggatggagtgttttagttcttgggggaggccaccccaaaccccagccccaactccaggggcacctatgagatggccatgctcaacccccctcccagacaggccctccctgtctccagggcccccaccgaggttcccagggctggagacttcctctggtaaacattcctccagcctcccctcccctggggacgccaaggaggtgggccacacccaggaagggaaagcgggcagccccgttttggggacgtgaacgttttaataatttttgctgaattcctttacaactaaataacacagatattgttataaataaaattgtaaaaaaaaaaaaaaaaaaggccaaaaaaaaaaaaag

SEQ ID NO: 477 - protein, 4465 aa, Homo sapiens
MLTPPLLLLLPLLSALVAAAIDAPKTCSPKQFACRDQITCISKGWRCDGERDCPDGSDEAPEICPQSKAQRCQPNEHNCLGTELCVPMSRLCNGVQDCMDGSDEGPHCRELQGNCSRLGCQHHCVPTLDGPTCYCNSSFQLQADGKTCKDFDECSVYGTCSQLCTNTDGSFICGCVEGYLLQPDNRSCKAKNEPVDRPPVLLIANSQNILATYLSGAQVSTITPTSTRQTTAMDFSYANETVCWVHVGDSAAQTQLKCARMPGLKGFVDEHTINISLSLHHVEQMAIDWLTGNFYFVDDIDDRIFVCNRNGDTCVTLLDLELYNPKGIALDPAMGKVFFTDYGQIPKVERCDMDGQNRTKLVDSKIVFPHGITLDLVSRLVYWADAYLDYIEVVDYEGKGRQTIIQGILIEHLYGLTVFENYLYATNSDNANAQQKTSVIRVNRFNSTEYQVVTRVDKGGALHIYHQRRQPRVRSHACENDQYGKPGGCSDICLLANSHKARTCRCRSGFSLGSDGKSCKKPEHELFLVYGKGRPGIIRGMDMGAKVPDEHMIPIENLMNPRALDFHAETGFIYFADTTSYLIGRQKIDGTERETILKDGIHNVEGVAVDWMGDNLYWTDDGPKKTISVARLEKAAQTRKTLIEGKMTHPRAIVVDPLNGWMYWTDWEEDPKDSRRGRLERAWMDGSHRDIFVTSKTVLWPNGLSLDIPAGRLYWVDAFYDRIETILLNGTDRKIVYEGPELNHAFGLCHHGNYLFWTEYRSGSVYRLERGVGGAPPTVTLLRSPPIFEIRMYDAQQQQVGTNKCRVNNGGCSSLCLATPGSRQCACAEDQVLDADGVTCLANPSYVPPPQCQPGEFACANSRCIQERWKCDGDNDCLDNSDEAPALCHQHTCPSDRFKCENNRCIPNRWLCDGDNDCGNSEDESNATCSARTCPPNQFSCASGRCIPISWTCDLDDDCGDRSDESASCAYPTCFPLTQFTCNNGRCININWRCDNDNDCGDNSDEAGCSHSCSSTQFKCNSGRCIPEHWTCDGDNDCGDYSDETHANCTNQAWPGGCHTDEFQCRLDGLCIPLRWRCDGDTDCMDSSDEKSCEGVTHVCDPSVKFGCKDSARCISKAWVCDGDNDCEDNSDEENCESLACRPPSHPCANNTSVCLPPDKLCDGNDDCGDGSDEGELCDQCSLNNGGCSHNCSVAPGEGIVCSCPLGMELGPDNHTCQIQSYCAKHLKCSQKCDQNKFSVKCSCYEGWVLEPDGESCRSLDPFKPFIIFSNRHEIRRIDLHKGDYSVLVPGLRNTIALDFHLSQSALYWTDVVEDKIYRGKLLDNGALTSFEVVIQYGLATPEGLAVDWIAGNIYWVESNLDQIEVAKLDGTLRTTLLAGDIEHPRAIALDPRDGILFWTDWDASLPRIEAASMSGAGRRTVHRETGSGGWPNGLTVDYLEKRILWIDARSDAIYSARYDGSGHMEVLRGHEFLSHPFAVTLYGGEVYWTDWRTNTLAKANKWTGHNVTVVQRTNTQPFDLQVYHPSRQPMAPNPCEANGGQGPCSHLCLINYNRTVSCACPHLMKLHKDNTTCYEFKKFLLYARQMEIRGVDLDAPYYNYIISFTVPDIDNVTVLDYDAREQRVYWSDVRTQAIKRAFINGTGVETVVSADLPNAHGLAVDWVSRNLFWTSYDTNKKQINVARLDGSFKNAVVQGLEQPHGLVVHPLRGKLYWTDGDNISMANMDGSNRTLLFSGQKGPVGLAIDFPESKLYWISSGNHTINRCNLDGSGLEVIDAMRSQLGKATAIMGDKLWWADQVSEKMGTCSKADGSGSVVLRNSTTLVMHMKVYDESIQLDHKGTNPCSVNNGDCSQLCLPTSETTRSCMCTAGYSLRSGQQACEGVGSFLKVHEGIRGIPLDPNDKSDALVPVSGTSLAVGIDFHAENDTIYWVDMGLSTISRAKRDQTWREDVVTNGIGRVEGIAVDWIAGNIYWTDQGFDVIEVARLNGSFRYVVISQGLDKPRAITVHPEKGYLFWTEWGQYPRIERSRLDGTERVVLVNVSISWPNGISVDYQDGKLYWCDARTDKIERIDLETGENREVVLSSNNMDMFSVSVFEDFIYWSDRTHANGSIKRGSKDNATDSVPLRTGIGVQLKDIKVFNRDRQKGTNVCAVANGGCQQLCLYRGRGQRACACAHGMLAEDGASCREYAGYLKERTILKSIHLSDERNLNAPVQPFEDPEHMKNVIAFDYRAGTSPGTPNRIFFSDIHFGNIQQINDDGSRRITIVENVGSVEGLAYHRGWDTLYWTSYTTSTITRHTVDQWGAFERETVITMSGDDHPRAFVLDECQNLMFWTNWNEQHPSIMRAALSGANVLTLIEKDIRTPNGLAIDHRAEKLYFSDATLDKIERCEYDGSHRYVILKSEPVHPFGLAVYGEHIFWTDWVRRAVQRANKHVGSNMKLLRVDIPQQPMGIIAVANDTNSCELSPCRINNGGCQDLCLLTHQGHVNCSCRGGRILQDDLTCRAVNSSCRAQDEFECANGECINFSLTCDGVPHCKDKSDEKPSYCNSRRCKKTFRQCSNGRCVSNMLWCNGADDCGDGSDEIPCNKTACGVGEFRCRDGTCIGNSSRCNQFVDCEDASDEMNCSDFACPSGRCIPMSWTCDKEDDCEHGEDETHCNKFCSEAQFECQNHRCISKQWLCDGSDDCGDGSDEAAHCEGKTCGPSSFSCPGTHVCVPERWLCDGDKDCADGADESIAAGCLYNSTCDDREFMCQNRQCIPKHFVCDHDRDCADGSDESPECEYPTCGPSEFRCANGRCLSSRQWECDGENDCHDQSDEAPKNPHCTSPEHKCNASSQFLCSSGRCVAEALLCNGQDDCGDSSDERGCHINECLSRKLSGCSQDCEDLKIGFKCRCRPGFRLKDDGRTCADVDECSTTFPCSQRCINTHGSYKCLCVEGYAPRGGDPHSCKAVTDEEPFLIFANRYYLRKLNLDGSNYTLLKQQNAVDFDYREQMIYWTDVTTQGSMIRRMHLNGSNVQVLHRTGLSNPDGLAVDWVGGNLYWCDKGRDTIEVSKLNGAYRTVLVSSGLREPRALVVDVQNGYLYWTDWGDHSLIGRIGMDGSSRSVIVDTKITWPNGLTLDYVTERIYWADAREDYIEFASLDGSNRHVVLSQDIPHIFALTLFEDYVYWTDWETKSINRAHKTTGTNKTLLISTLHRPMDLHVFHALRQPDVPNHPCKVNNGGCSNLCLLSPGGGHKCACPTNFYLGSDGRTCVSNCTASQFVCKNDKCIPFWWKCDTEDDCGDHSDEPPDCPEFKCRPGQFQCSTGICTNPAFICDGDNDCQDNSDEANCDIHVCLPSQFKCTNTNRCIPGIFRCNGQDNCGDGEDERDCPEVTCAPNQFQCSITKRCIPRVWVCDRDNDCVDGSDEPANCTQMTCGVDEFRCKDSGRCIPARWKCDGEDDCGDGSDEPKEECDERTCEPYQFRCKNNRCVPGRWQCDYDNDCGDNSDEESCTPRPCSESEFSCANGRCIAGRWKCDGDHDCADGSDEKDCTPRCDMDQFQCKSGHCIPLRWRCDADADCMDGSDEEACGTGVRTCPLDEFQCNNTLCKPLAWKCDGEDDCGDNSDENPEECARFVCPPNRPFRCKNDRVCLWIGRQCDGTDNCGDGTDEEDCEPPTAHTTHCKDKKEFLCRNQRCLSSSLRCNMFDDCGDGSDEEDCSIDPKLTSCATNASICGDEARCVRTEKAAYCACRSGFHTVPGQPGCQDINECLRFGTCSQLCNNTKGGHLCSCARNFMKTHNTCKAEGSEYQVLYIADDNEIRSLFPGHPHSAYEQAFQGDESVRIDAMDVHVKAGRVYWTNWHTGTISYRSLPPAAPPTTSNRHRRQIDRGVTHLNISGLKMPRGIAIDWVAGNVYWTDSGRDVIEVAQMKGENRKTLISGMIDEPHAIVVDPLRGTMYWSDWGNHPKIETAAMDGTLRETLVQDNIQWPTGLAVDYHNERLYWADAKLSVIGSIRLNGTDPIVAADSKRGLSHPFSIDVFEDYIYGVTYINNRVFKIHKFGHSPLVNLTGGLSHASDVVLYHQHKQPEVTNPCDRKKCEWLCLLSPSGPVCTCPNGKRLDNGTCVPVPSPTPPPDAPRPGTCNLQCFNGGSCFLNARRQPKCRCQPRYTGDKCELDQCWEHCRNGGTCADSGMPTCRCPTGFTGPKCTQQVCAGYCANNSTCTVNQGNQPQCRCLPGFLGDRCQYRQCSGYCENFGTCQMAADGSRQCRCTAYFEGSRCEVNKCSRCLEGACVVNKQSGDVTCNCTDGRVAPSCLTCVGHCSNGGSCTMNSKMMPECQCPPHMTGPRCEEHVFSQQQPGHIASILIPLLLLLLLVLVAGVVFWYKRRVQGAKGFQHQRMTNGAMNVEIGNPTYKMYEGGEPDDVGGLLDADFALDPDKPTNFTNPVYATLYMGGHGSRHSLASTDEKRELLGRGPEDEIGDPLA

SEQ ID NO: 478 - DNA, 73718 bp, Mus musculus
  misc_feature (1)...(73718): n = A,T,C or G
acacttgggaggcacagacaggtggatctcttgaattccagaccagcctgctctacagagtgagttctaggacagccagcgctacatcgagaaaccctgtctcaaaacaaacaaaataattactcaccaggtgctgtggggctggccggtaatgccaacacatggaagaaaagacaagaaagaaaagggagggagggaggaggctagtccattttcctgaaaatcaaatcaagtcctgaactagaggttctcagcacgtgggtcaagacccaccccccacgaatgggtcacatatcagatatcttgcatatcaagatagttacattgcagttatgaggtagcagtgaaataattttatggctggtgatctgatcagtagcacatgagaaactgtgttaaagggtcagggctctgttctgaaacagaaagggcatcagggtaacatctgggatgtcactaaatccaaggtttggttaacagaactgtatggatagtgacttacatatttgtttctgtttgagacagagtctcatgtagcccaggctggcccaggacttgttgtgtagcaactcctgcctccatccccaaagcctgaggattgcaggcatgtgtggtcattggttaccccgggctggcaatgttactttcttagttctgacctataaagtaacatcagggggagctttcagaagaattcggaggatatatattatccacaattgttacgaagtaaaaggtttgtcttgaactcaatggagacatcagaaatttttgccaaattctttggcaagctgggcatagggtcacacacctttaatcctggcactcaagaggcagaggcaggtggatctctgagttcgaggccaccttggtctgcagagtgagttccaggacagccaaggctacacaaagaaaccctaactttaaagaaaagacttaaaactttggttgcacagtggctggattgcagtccttgctgggagacctaagtctggttaggggggcctgggttctctttactgtaaggcaagactccttaggttcgagcacaaggctcagacatgatatgtcttcaacagacagctaatattacattataggtccagggaagctgaagtgtgagcctgggacgtcatggtgtcctgtacgaatgccatccacagccgagtaccttcctctgtgctcagcctgccccctctgcatgccccttgccttgctaactggctctggcatccccacacagacctcattaactggtcactatctttctcttctccaaagaaacagggtctgccaacaccagcaggggctcgtcagggtgtgttacacacttctgtgacttggggaagcctggagagagtatttgaaggagattgggggagggcagaggactcgctctcagaccttaggctcctcaacctcagacttggatctcggactccttgaggtcttaagctgccagcaccggaggggacaatggcacggatgtctctgtctgtggaagtctgtgtcctcaggcagccaagtttccctcaggcagcagcctctccctgtcatagatgctcatggtttgtgtaaaaccccatggatgtgttaaagcgtgggttcccagcccatagagctatgcaggggtggtgggacatttctttaagtggtggggtctggtggggatttccttttgcggcgggggcggcagggagggtgtctgttgagactgagtcttactgttttagccttggtggacctgaaactcactgtgtagatcaggctggctttgaactcaaagagaaccacctgcctatacctctggctcctgagtgttgggactgaaaggcattggtaactatatcacccttaactagttcaaggttcttgggtcattaggagtcacactgtgcctctgtatctttgttttacacacacacacctctgtgacccacagtcccaccacagtctcctaaacattggagcctctaaccacataccagaccagcctttctcccttaagagtccttcacctcgggggctttgtcatggtgagaaagctgaaggacactgcagtcttggtggacctgtctgtcaaatagtcctgcccactttatccggggagtagggacactggctgaggagaaactgcacggttggggaatgccaagctccgtgctccttcttgaagactcttttaatccagaccccaaaattgtgtgtgcgcactccttggctgctgtctgagctctgaagcctggttggtcagcgttgctttcattgctgcacccattgctttcattgtttctgttgtttgtcatgagagaggctcagctgatcacctttgcaatcaaagagcctaggccacagacggcaaagcagtaactaagtaacgcatctatggacagaggagaggggtgccaggtctgctgtgaaggatgggaggctccttggccaatcaaaactcacccagagccagaccttagaggctgaagacccagcccgaggtggcaccatcttgcttcgctgggagactctcattccctcttccttgctctctcatcccacagtgaactccctaggggccttttcctgactgtaaagtgtcatgggcagctttggtgcctctcctcagcccctcagatgaagggtcccttgccctgccccgaggccacaggatgaagacaggaagtgttggatagacagacagaagggctcacttttccacgttgttctctgagttctcctgggcatcaatcaaaactcccagatttccccaggagatgggagctcagagccacgggggaatgcttccaatttgctttcagccaagttgcctcgtttgctttaaagggcaagcttgttttctttgattaccaagacgcccatcagctcctgacagcttatttgggtgaaaaagctgggggaatgggagaagtggccgatgtggagcgagggggtagatgatgatgccagcaaaaatgacccaagagtcggctccttgaattctaatatgatggctccctgtcctttaagatgccaccaaccttcatattgaaatcattgccaacccagcctctctttgtaagattcctgcccagagagtgaagcagggctgctgctggactgtgactttaattgtcatgaattctattgattcatctttatcatgcaaatatgcctccacttcattcagataggcataggcctcttggatatttattactgcactcttattttgaaaaaaaaaatgttttcaactaacagagcccctcaaacacttggagagaagctggaagaagaaaccccatcacctgtgactatgggaaggtcaggtagagagggaaggtcttagtttaagaaattttttttgtaatacaggccagtgttagaacttacctatgtgcccaactgttctaaatacacaagtgatcccagctcttgaagggggctgggggggcgcaggatgagaaaagttcaagaccacccttggctacacagtgagttgaaggctatcctgggctacacaatgaactgtaggccatcccaggctatatagggaaactctgtctcaaacaaaataaaaatcaagaagtactctctgagctgggcatggtggcgcactcctttaatcccagcacttgggaggcagaggcaggtggatctctagtttttgaggccagcctggtctacagagtgagttccaggacagccagggctacannnnnnnnnnnnnnnnnnnnnnnnnnnnnnnnnnnnnnnnnnnnnnnnnnnnnnnnnnnnnnnnnnnnnnnnnnnnnnnnnnnnnnnnnnnnnnnnnnnnnnnnnnnnnnnnnnnnnnnnnnnnnnnnnnnnnnnnnnnnnnnnnnnnnnnnnnnnncctgtaaaccagactggccttgagagatcagtctgtgtctgccttctgagagctgggctcaaaggtgggcatcgctactgctgagctaaggagtacttcctagggatgagtgctttcggtccttataaccctgcaaggtcatggttattttctctgattcacagacaagaagagggagctgagagagaggtacaggagtccagttaatcatgctgaacgcatccattcatgctcagtggttaaagatgctgcttaccaacacggaggacctgagtttgagtcagcggaaggaggaaaccaactcctgagagtccttcttgacctccatacttgtgccatggcatgccagcacacacacacacgtacacacaggcacacaggcacacacaatgctactcctactcctactgactttatcttaagccgctatcacatagtagatgctcagtaaacagctgtcagtagatgaggagactgtggccctgcctccttgtcatttcctgcaggactgtggggaattgcaggctggtctccagtcgagctgaggtctgaaccccaatggtcataattcatctacatgacacaacaggcattccctcatgctcctggaactccagccctgcctaaggtaccacctcccacagccctcacaagagaagcatggtcagtagtcacataagcaatggcccaagcttctgaaccttcaggctaaactcctccccagttacctagcaacagtgaagaccataaaaaggggtgctcagccccccttctcactcctttgtccttctctcacttctctctcctcttccctttctctctgtcttctcctcccttctctccttctccttccttctcttctcttctcttctcttctcttctcttctcttctcttctcttctcttctctcttttccctgcatttctataataaagctcttaaaccatagagtctctgctctgctccatcaagttccactgcacactctggtcagtgttgggaacttcttccctcttctctgtctcccacaaccctggtggctttagcaaagtagctacagtgggggggggggtccccaggcagggctgccccttggccaccccctgaagagtgggatagaggaatgcccagccagagatgagtggatagggtagatagcagccctcccacgcctgactgaccagagaatagggaaactctggcagggtgtgggcacctttttcctatcccacttctccccgggcaacaccccagggcccccctttttattttgttcccaacacaggtcgatgcagatgcagtaatgaggtcacaagccagattgtaacctccatgagagccagccaacatgtcattgggtgtcttagttagggcttcctgttgctgtgaagagacaccatgaccaaggccattcttacttaggaaaacatttcattggtgctggcttacagttcacagagtttcagcctattatcatcatggtgggaagcctggcaacgtggtaggtagagttctctatcttgatccacaggcagcaagatggggtgctctgtaccacactggtaaaccttgagcatatatatatatatatatatatatatatatatatatatcctcaaagccccgcctccacagtgacacgcttcctctaacaaacccacacctcctccaataaaaccatacctcctaatagcgccactccctatgatcgaacattcaaacacacgagtctctgggagccatagctagtcaaaccaccacatttgggttggtttttttgtttgctaggcagaatctcactgtattgaccatgtgatttccaacctttgcctccaaagtagctggaaactacatcgtgtggattatatttggtttctggaggccccctgggacaggcttgtggcaatggtgctgaaagtgtcgagagagagggtctcagctgtggtcaggggctgcagagtttcagagacagatggcggtcagtagcaactggggataggtgctcacatggctgcttgcagtggtcaacaaccttctgcagcttgggacagacctgggcgcggtcacctgcccttctacaagttccaaagtgaaaaagaggaagccagggaggggctcactgtatagtaactgagttcacttggagcccagtccctgtggctcccacacagtcacatgagtttttgtgatctgatcactctctccaggctttggctgcccttctctaaaatagggacagacaggggactttacagtactctcgtataaatgcaatactaccaaatatgtccagcttttatgactaatgcaaaaatgacaggtaggagctgagaagatggctcagtggttaaaagcacctgctgctcttgtcggatcaaggtttggctctcagaactcacatggagcaaccatttgtcgctctagtttcaggggattcagtgccctcttctggctgatggtagtactgcacaatatgacgcatatacatgcaggcaggcaaaacattcatacgcattaaataaaaaatcaaaagaaagaagttccaaagtacgactatggtatatcattctgcagactgaacagaatagcagaggcaggaggatgctgggggtgttggcttccaacctagatgagaaacgctgggttcagaggaacacactcagagctacagaggacacttaatcccgcttctggtttctgtgtcagatgctttgaattcctttcttggtcaaagcatgctttagaaatgtgcatttctgttcgcacatgaccgtatagtggattgttttggttgtttcaaaaaaaaggaagggctgatagtgacacatctgcttagcatgtgtgaggctctgagttccattatagcattaaggcatgtacctacacacatgtatacacatacatacacacatataatcacatacacacatataatcacatggatacacatatacatgcatacacacatgcacacacacacatatacacttttttttttttttttggtttttcaagacaggtttctctgtgtagctctggctgtcctggaactcactctgtagaccaggctggcctcgaactcagaaatctgcctgcctctgccttccaagtgctgggattaaaggcatgcgccaccactgccaggcatacatacacatataatcacatgaatacacatatacatgcatatacacatgcacacacacacatgcatgcataagtgaacaagcatgcatgcacacatacacacacatgcacatgcatccacatgcacacaatacacaatacatgcacatccttatacacacatccacatgcatatgcatacatacatatcgtgcacacacacatacacacatgaatacatatccacaacacatacacatgcacacacgtacacacaggaagtaaataaaacagaacttaaaatgcaggctagagaaatggctctgtcagtaaaatgcttgaatctgaagctccttcatactcatgtaagagccaggtgtgacacacagaataagaaaataaacccttcatctttaaaaaatattagttaccagagtataagatatcaacataattaatagaggaagcacagacttcgtatttgcctggtgtttggtgcagtgtgaacccgcgttattctttcaataattaagcctgcactgagagtagaagaggagatgcatttctttgtccattaaaaggaaaaagtttcctgcatttgagagcattcaggttaaaatattttcattggctacaggatctagcccgttgctataataaaagctgaagttcagagatactttaccctgatgttctgtttcaagtgttcttgatttttaatcacttttaattccaagaactctcactaggacctcaaagaaaaagtgtgtgtgcgtgcgcgtgcatgcatgcgtgcatgcatgatgttcatgagtgcaggtgtcttttgggccagtagagggcgctggatcacctgaagtcgagttacaggcagttgtgactcatgaatgctaggaactgagggccctctacaaaaacagtgtaatgtctaaatgtctaagctatcattccagccctcccatttcagacaggatttcatgcaactcagactgccgtcactaaccatactgttatggtttatatatgcccggcccagggagtggcacttttagaacgccctgttggagtaggtgtggccttgctggagtgggtgtggccctgttggagtgggtgtggccttgttgtaggtgcgtcactgtgggtgtgggctttaagaccttcatcctaaactgggcgtggtggcgcacacctttgatcctagcactctggaggcagaggctggcggatttctgagttcgaggccagcctggcctataaagcgagttccaggacagccagggttatacagagaaaccctgtctcgaaaaacaagaacaaacaaacaaaagaccttcatcctagctgcctggaagtcagtcttccgctagcagccttcagatgaagatgtagaattctcagttcgtcctgcaccatgcctgcctggatgctgccatgctcccaccttgatgataatggactgaacctctgaacctgtgagccagccccaaataaatgttgtccttacaagagttgccttggtcaaggtgtaaagcgagcagtcaaaacctaactaagacacacactaagcactcaataagcccatgttaaatatgtgaattattcgttgtatgagccaagagaatgtcctaggaaatgcttagacagagggagttagggtagaataagtcgtggcggggatcactgcaattagcctggcagtcacagcacacacacgttgtgaacataccttgtgcactcacatacacgtaggcacccacagatacatataaagtaaaaataaataaagctttacgttattttaaaagagcgtgtacggctttttgaaaggactagagtttagtcccctgcacctatgacaggtggctcacaactgcccacccgtaattaattttagctccagaggatccaaaaccctttgtctgtattcacattcacataccccaccaacgcagacatagtgataataatattaataatgataataaaactttaacaattaaaggggaaaaaacctaattagaccaagggtggtggcacatgcttttaatcccagtactcaaaggcaaagactggtggatctctgtgagtctgaggctagcctggtctacagagtgagttcgagactacatagtgagaccttgttccaaaatcaaaacaaacaacaaatccttattttaagcatacactgaagggggtcacgcacccagcaagctgacctctgaacatagtgcggacagtgggcaccaaaacaaaccaacccatccaattacttgaactaagttcactcgatgtgaacttcacaaatggtatcagtaagagatgaggagagggactatgaaatggcaggtggaccagacaggaagcaagactatcagaagaggatacttgatggtgcttgcaggaggcctagaggaggacaggatggaggttgggcaagggagtgaggacctggagctggacgggatggcaagtggggcgcggacgcctggaggggagaaatcactggacggcgtgcctactaggtgcacacagcctgcagcctggggcttccccgctgtcactcaccagctcctcaagatgcaagtttcttggcccacagttaagcaactcggcggcccttatgttgctaggttacgagccactcttagaaggcgggactttgagtttgactgacattctttttcaccatttaacttcgaatcgggttgcgttggctccgcctcctgaaagatggccaatcaaaatccccgcctctctgacgtttcgccaatggaaagacgcaggattcctgttggttgcgcgagtgaggcgggggtgggggtggggtggggaggaaaggggtgttgcttcctcgccccgccctccctttgggaggagggctgtgagaacgctgagtgacgtgtagtctaccctgtcaaatttcattgcgacccctctgatggccagtaggctgtggcctagggccgtgggcggggctttcggggctgagtgacaggagtcggcggatgcgaaggctggcgcagctgccgctgtggcagcggtgaggcggcggtggcggctgctgaggctccgcgctggggatattggcggcggcaactgcgggctgagctacgctgtgcagacccagtgcacagtgcgggatcccgggacggcgcgtgtaaggatccgaggggtgcgcgatcttggcccgagggcaagggtcaggggtcagaaggtgcagagaaggggctggggctgagtgctccagaagcccgaggcggggccctgggaggtggccggcatgctctctccttgcggatccccttctctctgcaccccttttctttggcctgacttcctggggcgacccggatcgcgatggggatcgtggggagctagagcccccgagcgacccttcctccctgctcacctccctgctgtgtcctcttgtgacctggccggggactcctgcctgggtcagtctgcctcaggggacagatcgcaggatggcagctagctatctgattccgggaccttcttccaggggtgaccttaccccaggggtgactcgctgggtctccgctagagagagaaccaaggtctgccaaagggctggaccttaggagctccgagtctgctgtgtgaccttggacagtttacttaccctctctgggccccgtttctttctctttgaaaagtcataggctcttcaggaggcaaaggcaggagaatggcaacttcaaagcttcaaagctccatagggatatccctaccaccaaagacaaaaaacaagaaagcggttggtggatttcgcctaagtggagtgcagtttctaggaatagttggtggggctgcgctgaagtgggcagtgtcccctgcgttccatgactacttgtggctctttacttgggagaggccacgctaagctgcctcatgtatcaagtgggcgctaaccaactgagggcagagccgttgagtcggagccaggaggttgtttcctgtgggtggggtctacagctgtgtactgtagatgttcagtagcctctctggactccctcgcaatcaatcccaagttgtgatgctggaaatatttctagacagtggggacaaagtcactccaggcgagagccattgaggtgagaccaggcatgttagaatggagtcatgcatcccgctgttaaaatgtaaaacccactgggaggatctccctaggatgctagtgacgaacattagaaacctgttgtcatgcgttgggagagcttcttgccttccaagtgaatagcgagaacacactgttagagcctcctcctcatggcctcaaagtacatccttgtaatccctctgctgtggagtgcgttagaagtgtgagcctagtctatgcaaggcactgggggaggagagagttaagccaaaattcaaaacacactgcagttctttaggcagccaaatgacgggtatcttgtgggagttcctcttctgtctccccttgttgagatttccaagcaaaataaattctcaaatctggaaaaggaaaacaaaaaacacaaacgaacaaccccctccccaccccccacttgcaggaactttgccaggcagagtctttcaggcttagcaggctgctgcagaaagtggtgtttatctccgctgccgccaccgcctctgttaagagagacaggctgtctctgcctggtgatgttcccatccatcgttcctggaaagggggcagacattgcccagttgtcctgccgaggattggtttggaggcggactatgtctggtgcactggccacagttggaggcagcaacctgctgctgtctctaagttcaaaggtccccgggcagatctgctgagtcctgcctttctttttatctcagtaagcagaagccggtctgtgtaaacagcttctcgaacaggccagtcctgagggtttaaacctggagagaaggaaggatggggcttttgaaaaggactctgattataagttgtaaggaatgtgcaagtgcttcttcctcattgaacatctcccgtagaggagcgcaaaggtcatgcaagaagaattcctgtcggccaccagcaaagccaggatgatcttatgtattcccaagagtaattactgctctctgaggacaagacctggtgactttaagagtcaccacacctggttaggaatgtaggcctggagacaaagcttggctttctgactgtgggcactcaggaaagttacctattacctctgtccctacctgatgtgtagaggtttttatttttgtatagccctggctgtcctggaacacactctggctggcctctaactcacagagatccacctgcctctgcctctgagtgctcagattaaaggcatgcaccatcacaacagactctgattttcatttgttgagactgtctcttataagtcaggctggccttgagctcaatatatagccaaggctagccttgaactaggaccttcctgcctcaggtctcccaagtgctggaattacaagcctgggtcagcatacctggtcttaccttcttcatagttggtgtgcctttatctccataactcttattcatcctctcctnnnnnnnnnnnnnnnnnnnnnnnnnnnnnnnnnnnnnnnnnnnnnnnnnnnnnnnnnnnnnnnnnnnnnnnnnnnnnnnnnnnnnnnnnnnnnnnnnnnnnnnnnnnnnnnnnnnnnnnnttcttcttcttcttcttcttcttcttcttcttcttcttcttcttcttcttcttcttcttcttcttctcctctctctcctttctccctcaccttctctctctctctgtaagtacacttactatatacagttcaactgtccttaaactatgtcactctcctgcctcaacctcccaatcatagcagatgtggcaattcctaactttttttttttttttaatgttgaaacacagtggcagtgtgggctgtggcttaccaggtagagtgaggtctagcacacagccctgggttcaggccccagttccctataaaccaggtgtgatgcacagttgtaatcccagcagaggcagggggatcagatgttcaaagtcatcctttacttcatagcaactttgaaaccagtgtgggctgctccagttgcatggccatcgctgatgccagatccagaacacgttcatcagtaacgattatgttttaatcattacctttctttctttctttctttccttctttctttttttttcttttcttttcttattttaatttttttatccttcagaccttagaagatgcctctgatggaacaggctctgggaagcttccccggccccgtggctttgaacaggagctcaagccggaggcagtttaaagccctggccgttgtatcctgaggaccgcaggtcaggagaagatggctgtaagtttagatgacgatgtgccgctcatcctgaccttggacgaggctgagagtgctccgctgcctccttcgaacagcctgggccaagagcagctgcccagcaaaagtaagcctgtgggcaggtgggcggggcgacctgcaggtgggcggggcgactccgagcttgtctgttcagagagtgagagatggtgggtgggcttccgtctccatgagagaagaacagcccctgtgacccatctcaagtgtgacacagaccttgcacctagtgtgactgatgtgggtgtctgatgctgcagcccagctgtgtagtgcgtttggggtccctcacttctgacacagctttgaccctgtgccaggagacctcaggcaggcctctcttccttgcctcaatccttgttaatgaaaacgtctctgtgggtctccactgaagccggtagtggagacaagcttgcttctctctgccatctcaggatggggtggagggcggcgagctttgtggtgtattgatcggggctttggggtttcacattgtctttctgggaatcgaagcctgctacagagtaaaccccgagagtgggggtgagctgtcccgtgtttttaagtgtctttctggcagagggagaggccttaaaacccttcctggtccccatcccgaaaccatctcctcatttgttcaggacgatggttcaggagaggcttaaaataacttgcctttgcagagggtcctgagaagttagggagcagggcttcagggcttcccggtgagtgcagacagccttccaggatggagggtcaaaggataccacaagcccacaggggaagatgctatggaccaagcagcattgagcctggcacccccatctcctttgtccacaaagaatacagttgggctttgaggatctcggaggcttcctggaatgaaggagagcaatgttccagggtgaggatgctggataaccttgactccctacaaaccaccgatgcttcccccctcatgctcactgctatcccaagtggctgtgctgggtggtcacagaggatcagtcagggaagaaagacccatttcccctaagggatgtgcaggtctgtagaaccctggctctgactcgccatcttaactagctttctttctaagagctcctccacggaaggcagttttacaaaggaggaaacttgagggtcagagaggttcagtaagtttcccaaggtcacacagcaagctagtgagtgagaggaaagatttgaactcaggcctgtcttgactaaagtttcttcccttcttccttttttcttcctagtccatgtcctcctccctctccttccccctcctccatttttcttcaccagctcttaacacacatgggtggaggaggcccttagggttggctgttatttttatttgagttcatttatttgccgtcttgaggtttcaacccaaggcttggcagaagccaagcttgtcttgtgacttcaagacagttattgctacctattttatagaggaggaaatgacctcagagaggggagctaacttggccagggtcatacagccagtgggcagagccccctctgtttgttcctcccataccactgtggagctagctgctctgggggagagagaggcaaatgagtcagcttcaggggactccccttcagcatctctgtcatctgcaaaagggaatggactgaatggggtagggtggcctgctcgtgcctgccatgaggcgggtccatttctaaatgggaactttggctgtcttcaagacttcgatctctccagagtgcctggggttgggacaggatcctgttctcccatgccaggaaatttctgagagccacccagttctgtaccaggagcaggccttctgctcccggggccaccagggaggccaccagatcttgctgaagtctgttgccgattctcgcttcagaacagaaaacacaacatcccttgccacagagccttgtgttttctgctcaggacactcttgcctcggtatccccctctcacactgttacagggagctttctaaaagctctgaggaagaagcgtccctcatagctggctgaaagccagggcctctctgaggacagatattgtcttagtcgtggtttctatggctgggacaaaacaccataaccaaaagcaacttggggtgggaaaggtttcttcttaggtttctaggtagcacccataatgggaggaacttaaggcagggacctggaggcaggcactgatgcagaggccatggaggggtgctgcttactggcttgctcctcatggcttgctctgcctgctttcttatagatcccaggatcaccagcccagggatggctcaatgggcggggccctctgttgtgtcaaccactaattaagaaaatatactgcaccaaataaataaataaataaataaataaaacaaaaaaagaaaaagaaaatatattgcagtcgggcattggtggcacacacctttgatcccagcacttgggaggcagaggcaggcggatttctgagttcaaagctagccaggtctacagagtgagttccaggacagccagggctacacagagaaccatgtctcaaaaaccccccaaaaatttacatatatatatatatatatatatactgcagacatcctacagggcagtctgataggcagcattttttctcaagtgagattccctcttctaaaaggactctagtttagctccagttgatataggagacccacagacctttgtccaggcggagctatttcatgcttacatgttttgattttcacattgtcctgaggtcccctactgtcaatgggagccacacccaacctagcaatttcctgtcctaaaactgtttggggaccgtcctttccctccatggtggactcaagcagttttgctcagtgtcccttgccttctttcctgcctggtcctgattctagggatagcccatggcgtcagcctgcctccagtccggtgagtctccagtgctgtgttgagcccgggctttggtccggcagtctgtccggaagacattcctgagccttcttcatttgctcgaggattccagttggagctgaaaattcctcctgctcacatggtcctttgggaatcttgtcagcctccctctagagagagttaatgagtcactttgctgctgtccggggcaggcagggagagatagccacctgtggtaatgattcagccatccggtcaccttctgggccctgacttccattcatctttggacctctcagctcagtgcctacaggagcagggacttctcagggcgtgatgtgacagaaatgaactgagctgattttctggggcctggaagctggttggtgtggctgacaaatggctcttgtcagatgtgagtgacattctgccttgcctagaaccagtggcttgggtctcttctatcccaataataccttatggtcccggagaccccccaggccgcggtcgacggtggctgcaaacccctaggttttagctcatttacctctaaagatcccatcttgaaacctatgcgccatattgagagactctgggagtcagcatgtcaacatggggatttgcttcatcattcgactacttcgttttgttttcctgtgcgtgcatgtgtctgtgccgtagcacccgtgtggaggtcagaggacaacagcccgtaagactcggttctgtccactgtgtgcatcgctggaacagactctggtcatcagacgtggtggtcagggcctttacccactgggccgtctccactccacagtcctgggaggggagagaggggtttgagactgggtctctctggggttgccaaggctgatttgggaactcaaaatcttccgggggcctcccttgagttacagggggatcagtctcacgtggtctttgaggcccacagttcttgtaaccttttctccactgcccaccccccacccgaccccccccaccccccgccccaacttcctgtggcagccttcagtgtggattttatgtaagaactctaacatctttggctctaagggcggctagtgagatgctactcacgggcagaagggtgtcaggctgatgataaaggaggtgaggtatttaaaacagagagaagaacctttaaaagggtcctggggctgacggtgacagagtggttagagacaaccaataatccgcatgcattcgggacagtgatctcggctgcgtgtccatgccagtccatacagtgggtgtgcccagaggctcctggcaattcacatcaggatttgctccctcccaccccatcccccccttaagctcacacatgtgttttttggtgaagaacggactagggacgtgaggacggctgtaacacggtctcctggctgttttggtgtggcactggtgacactgttgtattttctaggtggcaagctggtcagggatgggacctaaggggagagagaagagagtcttggtagtcaggccttgggcactgtgctatctctatctatctatctatctatctatctatctatctatctatctatctatctttctatctatctatctatctatagcacatatagcacaatggatacacatatacattgtacccacaggggcctgtgtgtgacactcaggctccttctctagagacttcatacggtgccaggtatcatctagatgaccagacttgctggcctcaagcggatgcggccgagaggagctgagaaggtgtggcgggaccattctggaaagatggtcagctcaatggtccctcctgcagaagtctcactgtatagctctttcttgggccagacgttctagcatgctcgtcaaagagccgaggacaccaggagccttccatgacctttgtagccggagcggtggggtggctgtgtgggttccggagtccgttcctagctgaggacataactggcttcgacaagctgcagcatcctagggttcttacagtatcccaggcatgggggtagaggggggggcggggacttggtgaagtgctacagatcacatggtcagtgcgtggccagctacaacgtaggtaggtgatgaggctctttcgaggaccgtctgcagtgtgtgaggcatgcgcccctatctcctcactccccaccccagcaggtgcctgccaccacacagggacaccgaggcagcatagcggttggaaaccaagaacaattaagtttccaccacctcccacttggcctggccacctggccacctggccctgccagagtcattcctctggcttttacagggctctaccaaggcagagtgccgggtgtcgccagattgtcggtggtaccaattaaaatgagcgagcacccagcctgctgagatggagcctcataatagagactcaaagcctcgtgtttcctggccctccgcatcttcatggggggatcctgtctgttgcctcagggccccctgccacgaaacgccatctctccctctgcacggagaaaagccaccgcatctaaatggcaggcacagcagctgggtgcgggaccggcacctgctgccctgttccgccagtcacccgaaggaggtctgagatcatatgtgctctggaagtattttatgagccagaacagttgacttcccagcctcccagtcagggaggggaggagggacatggggagcagccagaggatttactgtgctgttgatctggtggtttctggcctccgtgtctcctgggattgtcttgagtaacaacgcgaggcccctggaggaaaccccacgcatgcccttacagaagggaaccaagaccgaagcgttggggcccttcatgctcagggacctgaggggtaggtagctcttccttctgatctcggctgagcggattccctgacgtggccactctctggcttaaactcctctcccgctgcccagtcagtctaagtgagaaagttcacagaaaagtcacagtgagctgccactgtggggcggctcccgggacgcggtgcgcacgtcccctgtggcatcgtgaccccgcagacatctaggtcagtactttcaagatcctcccactgggaggaatctgaggttttcagaggtagtaacctgtatcataaagttacactggtacacttggatccaagcattctagctctgtgcctccatcagggagtgaaggttgagggggcaggattgggnnnnnnnnnnnnnnnnnnnnttggtttctagcttcggttttccaaaccgaagtgtgtgctgttccacagagttggctggcctccaaggcagcgttccctgttgtcagactggcctccctggtggtgttttgttgtacaaggtctgtgggatcaccaaaaccccagcttcctgtcttcagtgagccacggcttcctcctccgtgtactctcccccacacctgccatcaccaccatcccctccacactagagcctctgggtttgttttggctatgaaaagaggatgtgtcaggaaccaagattaaggagcaggaaagggagaaccagggaggatgcgcttggagtgtgtgggggatgggggggggggtagctgcaggccatgtggatcccagatgttggatccctgtggcaggccatcaatatggagaccagttgggagatgccccagactgggggcccactggcgatcatgtctttggttcctgagacccttgatcttgtttgctttctgtcagggtgtgtagctggtgttggacgtcttgggcggggcgtacttgtgtgtttgtataattcaggcccggaaggctgaggcaggtggatcatttacgttaaacccagaaagtgtagttctgaactctgggggctttggtgattgaaggagcagccttggacatgctaacacatgtgctctccgcaggggcagctgccaccttgctctgtcccccagtcatcacagggtcacaggctgccactgccagagccgcctaaggacgtcttaacaccgtctgcgtcctcacgctagctcacttctgcagatcacatcaagtcaaggaaaactgtgcccacatggccagccacctgtcctggtgtgaggtcacctcccctgggtgtcattcagggagcatcagaaccggttgaggcaggcttagcctgtcaggcagaaaatggagagggcagaagggccagtttctggcctccctggcttcaggccatcttctttctttaccactttttggttctcgtgctacagctccaacccccgaaccccacatctgccacaggggtgcagcaccgagccacacccctctctcagtgacttgccttagctgataacaagagtttactatttcacttttagctttgccctttttttttttgacagtgctaagaattatggcctcagccatgctagctgaggactctgtcactgagctacaaccccagcctaaaggtgtttatgtgtacacatgtgttctgtctttgactttggaataggtagtggagattcaagaagtgacacgtttaaacaaataattgtgtgggaactggagaggtggcttagtggttaggagcacaggttgctctgacagaggacctggggttctgttcccaggaccttcattaggcagctcacagtcacctgtaactacagttccagggcaaactggcactctcttttggtctccataggtacctgcactcacatggtgcatatgctgtcaagcaggtgcacacacacacacacacacacacacacacacacacacacacaaataaatgatgctttaaaacatttttttttaatgtaatgatttgttgtctggcccttcttaaacctttgccatctttgtaagctaagcaggtagcacattctaatggctggctcatctgtctttaggaggttgcagaaaatgacctgtggaggtgttgataggccggggagcatgtgatggacccgttttgttgcgtgtagttttgctactgttaggaatcacaaagtacatatttttggaggtagagggttgtcagaggggtcgcgacccacaggttcagagtcaacaccctagcgctaaggtggagtgtgccccacattttaaagggatagcgaacaggaagtgaaagtctgttcccaagaaggagccagagagagcgctatcctgttgtggttgagtgacacggcagtgttttaattactgggtggggtggggtggggagccaggattctgacggtgccttgcctccaccccaggcctgtactgagatgtggaaagaacaccagagtgatagagaaggccacaggagcctcaggcaggggctgttgtcatgctgcagggctctgaaggttcaccccatctgcctccagaaaggtgctgaaaatgagtgacaggaccaggtgggggccgggggcgtggccaagcgtgtacaaggccctgggttcaatcccaaccagccacaaacggggaggggagtgggggaaggaggaaatgacatcatggcagcggtccaggacaccacagtgcctgtttgattgggctcggtgtgtaaggggcacctgggtagtcaagtaggccttgtgcttgttccaacccgagccttaaccttctgaaaccccagtctcccacattcttgcatgtgcctggtgccttaagcacagagtttatagcccttgcagtgagttctgattgtcccactgtggtaggaggcgttagagcacagggagacatcgctcagttagagggagccggatttgttcaggtgtctgggtgagcaaggtcagggcttctcagactgtttctacttataactccttcttttttttttttttttaattaggtatttatttcatttacatttccaatgctattccatataactccttctttaaaaatttttttataaaggtttatttattttatttatgtgagtacactgtagctgttttcagacacaccagaaaagggtgtcagatcccatgacggatggttgtgagccaccatgtggttgctgggaattgaactcaggacctctgggagagcagccagtgctgtaaaccgctgagccatctcaccaaaccaagaaatgtattttaaaacaattcttcggtatatataatttcaccatttattaaagatgaaggcagatttgcatcctaagtgggaatgatgtggctgtttgctttcacatgcagggtcaaatcctggccgagtacttgatgccgcaggattcagggactccgtttcctagagccgatcaatatttggagttgatagccattactgagaacattgctctgcataattacctagggcacagaggcaggagcacgtttaggctcctctcagacagttgaaagttctgtcctaatcccaaaacagaattgatttagtgatttttttttccttttttaaatttttttttttttttgttttttgtttttttttttttttggttttttgagacagggtttctctgtatacctctggctatcttggaactcactctgtagaccaggctggcctcgaactcagaaatccgcctgcctctgcctcccgagtgctgggattaaaggcgtacgccaccacgcccggcccttttttaaatttaagaaacccaagttagtaactcaaccgtcagtgtttaaaatcaaatgttcaaacaatccaaagatatatgctggagaatgacgataggaaaagactttagagtctttgtttttcataactaaacccctgtcttcagtcagggtcaccaccacagttttaaaaagtgggatctgggggtgggggagggtatggaggacttttgggatagcattgggaatgtaaatgaggaaaatacctaataaaaaatattttttaaaaaagtgggatctggggaggggagggttcacggctgggatgaggggccagccctctctggcaggggatagcacgtatagacagaggaagggtgatataggctttgggacagggcggggaagggcaaagggtgtagaatgtggggtgagcctgggctctggggtcagatcagctgggtgtgagtccagcacctggccagcacgtctctcagcttgggtccccttattcataaagacgctgtcctgaggttgaaatgaaaggcttccagagtctcagcttacagagaggccgtcctgccgtgaagtgcctgagctgtgaagtgtggtcggtggagttgtcgtatgatgatataatagatgaccgtcccatggtgtgggttggtcttggagatgctctgtccatgtgatgaaggcagagctgggtttggcggttggtttactctctggttcaggctccccagcatcccctgagcttccctcagggccacgtgcagcataccaccttgcttatctacacagcccggatgcctaacaccctcctgcttcagaggtactaggaaacatctggaccaggaaaagcttgcaggactatcccggccactgtgccctggccagggaggtacttagattagtccaccctggcagcaggaggcaggggcaggaagtgagagctgacctcgccaccctcccatgcccttcctcatcccatccgcccagatccagatcacagaggcctttaagtccaggcccactgtctcaaggacctgctgtgtcccgctttccacccagctcccaagcctccatcctgaccagagatgggcaagtgtcccactgctcagtggggtggctttgatcttcacaaagcagaaacccgcttttggatggcttctctttgaggtgtgatgcagggaatagcatggtttctccgtggaagaccccactataattgagggaactttctggagatatttgcagggcatcccggtctccattaggttatggcactggccagtcctccctcattctctgcaggagtcaaccttgctccttggctggagaacaagtaaaggagctacaagtgaaatggcattcacaccacctaatgacagtctcctcatccactgtcattgcccacattgactttacaggcaggcatccccactcatacaatgtgggattggctcccgttctttctgcagtcaaacctgtggagatgtggtatagctggtcttcgctactttgtgggttcttctttttcccatcttttatctaacctggtttcacaccccctattactagatgagagagagagagatctgtgaatttaacttttttcttcttgtttcttctttgaacaggactactaacaaaccccaaccaaccccttggaatgaccaacaacccaccctgccaatggggggccctagcatttatacacactttgaaagttcccagaattccaaatgtcacataattgcagaaactatcggcagctggtagaaccacgcctctgctagagaacaaggctgctgtggacagtccaaagcagccctatatccccacatctggaattaaaacagaaacacattcttatctctctctctctctctctctctctctgtctctctctctgtctgtgtgtgtgtgtgtgtgtgtgtgtgtgtgtgtgtgtgtgtgtgttttaagaaatcaaaattccagaattctcactacaatgtgggagaaaggcctctaccctctaccccagggccttttcctttagcaaacacttgtgagccaccttggccaggtgacagagaaggaactggtggtgaccccagggccttgttctggctgctttaggctaagtatctgctccagttctaggacattccattaatagagttcaaagccagcctggtctacagctttgagaccttatctcagaacaaacagaagagaaggagaagagaagttgaggttggcaggtcctcagggaaagacgggaggagaagatgcctgaatcctgaatgactctagaaaagctgattcccaacccagagaagaagccatcttgggagcagcctgctaactagttcaagtttcaggatgcctggcagtgaggggctgagtgttattgacagcccaggagactggaagccaagttcccagacatgtgcccacctgagttagataaggggggtggttccctttttaattcccaagcatgttggtattctacacaggggatagaccatacagagctacgttaggcctcagttgacaataaatagtacactttttttttctcctggagacaggatggtgtgtagctcaggctggcctcaaccccctgtgtagccaagaatgatcttgaatttctgatcctcctgcctccaccttctgaagtgccaggagcacaagtgtgtgttccacacctagccgattaagtttggcctgttctgttttgaagttatggctggaaaactttctgtgtctggtcgtctgacaatccgtgtcttatctgctgctacatgaatgaaatttacacaactagtgtgagcttactttaaaaaaaaatagtagattctggtcagcaagatggctcagtgggtaaaggggcttgctgtacaagcctggtgacctgggttcaattcctgggacctacataaaggcgagagagagagagaaagagagagagagagagagagagagagagagagagagagcagtgttgttctttgacacagtgaatggcattatgccatatacacctaccccacccatccatttaaaaatgacaaaacggatccccaaatgccacatgacttgtatctttagcaccaacaccttacttctgtcttggtagtctacaaaagtctacgtatggtagcctatgtctgtagctcagttggtagacggttcccatccccagcatgccatatacccagcccaatggtgcaggtctgtgagcctggcacttgagaggcagaggcaagaggctcaaagagtgcaagataaatcagggcccctgggtcatgtttgcatagagagtgagacatgtattctattgtttgccaatatgcgtgtgtgtgtgtgtgtgtgcatgtatgtacatataggggtgggtgctttgaaggccagaagaaggcttcagatcacacatagctggcgttacagttgtgaactgcctctcctcagcgctgggagttgcaagagcaacaaatgctttaagcactgaaccatctgtccagccccatttttgcttgcttgcttgctttctttctttctttctttctttctttctttctttctttctttctttctttctttctttctttctttcttccttccttccttccttccttcctttctttctttctttctttccttctttctcttctctctctctctctctctttctttttaaattgaatttattgattgcttttagtatgtatttacgtgtgtgcatgtacatgcacgtgtgtggctgggctagggctcacatgaggggaccagaggatgacttgtgagagtcatttttctccttccacttgtgggttccagagatggaactcagcctgtctggtgtggcctcaggcatctgtgcccagtgagccatcttggtgaggacccgctgtttgttggtttttttgtttttgttttgagacagagtccagttggtgacaccagttggagctcgctggctggctgggctgggctggggaggtagagtgcccggcggggtaggtggctgatgtttcagagctgctagtcacacggctctgcctcttcctggtactgcagttttcacaaagacaagggcagtccttgtacaccttccctgtgcactttatatttgagatggagtcacagcttcaccagcccctggagttctctagggtaaagcagagtctctctcatgttcatgtgaccatcccagaatagcctgggtgaggtctgcctccttagagcagcttgcattgggagcactgacatctctctcagcctccagcctgcatgtattatagttccagcatcagcctgtactgtttggtgccctcatcttccttcatatctgagctccccaagcctgccatttggagactgcctgccattgctcaaagctctctttctttagtggaatgctacagattttcattttcttcttcgcttagccctcatggaaagtcagctgggtggcaactgaactctgccctagctaatggcctggagccgctccaggccactggctgcatccgctagcactcgtgggtggtccagagcaaacatcatatcttctctctctgtggctctccagggtcccctcttctcacgagctcggctattcacacttggctggcctgcctcgagtcatgtgcgatcgcggtccgtcatgcagaccctaaagcggatctggaacctcaccaagactcgattttattagtattgaagccacttggcccctaggccagtcggtcatttaagtctatgacatagtgggtttcttcccccccccccccttcatttttatttggagactgggcagtgtcccagaatgtgaaggggcagcagagcctggagctggggatggcttgggacaattcttaggctggaggaagctgcgatggaggggcagggtggtggtaatggccacacgtagtcagggattttaaggtttcttcagttgcccaggcttcttcagcccaagaaagaagttgatgtgccagctaaaccacttggaacaaagctgtcagcatttgtgtgtgtgtgtgtgtgtgtgtgcacgtgcgcgtgtgtgctgagcctcaattcctcatctgccagatgatctcaagaacagctaagtgagagtctgcgtggtgagggattaaacctgagattcactaaaggggagattcactatgtaatccagtcacacgggaaggctgggctgcaggattgtaggaacaaagtgtcaaggtcctgtcatcaacaaagtagcatcatcatcaacaaagtagccacactgcaggtgttgcccttatgagtcctgagtcatcgggcaagcgccctctctgagcccggctcttcctcattctgacttcctcttaggggatgcaaactggctttctgacttgttttcccagctgagcttctgaggataatttacttccttgattccccaattcttccccccacccccacccgcaaccccatgcactggacagtcaggagctcccttctaggcctccagagtgagtttcttcatgatgtctctatcgggccgttgtcctattagacagaaagggaaactgatgcaaaaagaaaaagtactcagctcaggcctggccaactgaccacccagggtttcagctccctgaggtgcccattgcaccccaacatccagatcttctaggacatagactccctcctaatgtcactttctggaggtgcctgtaccagggaggccactttgtcccagactgctgcttttctgaacagagtggcttgcagcagcctcagccccagatgctgtgggcacagcattcacagagctggatccaggctaccttccttgcgaatgaccctggtagccactgcgtagggactatgtggattctgacaggacacagctgcagtcttggacaggctgagtttcgagccagtctgccttctgagcatgggctgtctgctggcctcttaaagaggcccaaaatgcccctggttcttctgcactcctgtctgattccctgaggtaggtctcacggtattccagctacttccaagaaaccatgggtcaggtgtctgtatagatgctgatagatatctataggaagcagcggatggattagtgtgtatacgagcatgcatgtgtgtcttgagcccttacatgtttgtgatatttgtgatattctgagcattttgctaggcgagtgctaggataacaaggggtaagtggtgggcatagagacccactttgggagagcaggtgttaacaggtccaagctgggcctcaaaattcatggcctgaagaaagtgatatcatgtatggattagctaaccactggggtagcaggaccagacaactttatgcacagaatagtgttggggggcggggtggggggacgttgtgactgtggttggtctctgatgcaggcgtgccatggcagaaatggacctcgtagcttgcctgggtagagtgagcatagataggcttgaagaagatgggcctcgtggctgtgtgtcctcaggtggctcactgctgagtggggagagccttccttggaagccagcagcccaagtccatatctgtcaatgggcctgtgcactggcctctcatcctacaaccttgggctgtcagaagcagcagagaagagataagaacgcagcagcagagtccagctcctgaggggggtcaaggtatggcccctaggggctctgctcctccagtggccagcttcactgttgtcagtcccctgcctcagccttacctattctctgtgactctctaagcttctggattttggaatgtggctttccaaatatgccttgtgcgatgccaacttatgcttcttgcctgggcttcccactctctgctccccttccccagttctagaacacactgcttgtctgttttccaagtactagggttataagacatgtctagtgcctcctcttgtgtgtttttttttgggggggtgcacacagcagacagtttcacctacaacatcagtgatactgttggtctccttcccctgtgtcccctccctgcccgcaccaccccccttccagactcccgaggccagctgtttctctcctgctccctcctgccttcccttttaagtttactgctttcagccttctggccctttgcctgccaagtcctaggaaggcaagccgcaccaatgaatccctttagatttggccgttcaatcccagtcaggtggttgaagacagttagaggtggtacgatgctttatcctgaccgcttccgagccagaatttcttctataacagagcttgccccatgcagtcgtcctacagagccttctgttgctccttgggcccaagtaagcttttggcaggactggcattgagttggtgccagccattgaactagagaggaccctgggccctagaggccaccctgtgtgcctggatatgccttcagtagacacgctgataccagggatctactctccaccccgtctcccaaccagttaccagaaagcagaggtttggaagagggcagcgtgcctcctgacttcttattctgccgggtttctatctgggagtcctcaaagtgccatccgcccaggagcatcgaagcgccatggcccctgtgaacgccccagcagtgctctctgctttatccccaccccctctctcctcctccagcttcacccatggagtgggacttctcagtgacaactggcaagcagtttcgcggctgctcattgtcattctggtgggctctggtttccagcgggctccgagtgctttctgggtatttgcatttattgctgctgtgcccggagcacagctggcacaggtcccagcgcagagtggagaaactgaggctccgaggaagaggtttactgtgtggcaggggcattttgccatcaaagagggacaggcattcctggtgtgcctttaaagagtgtgggaggcccgagggcagtttggaaggaaagtgccgtggacttccagttcttgtctcatggatcaggccaagtcattcgttgctaccttttggatcagagctcctaccagggcagctctcaggctttttacccaaagctgcctctccaggcctcaaggccaacgggggctggcctgccctgctggacgtgtggaggcagagccgcccctctcctgcccaccctctccctctcctccctccctcctcgcctctcttcctctgctttatggctggcatatggaagccatttctatttatccacaacaccaggatgctgcctcttgctgtgctccagcgagcggaatcctcggattccccgcagggccatttcagaggctgcatgcgaagcagccagctgtttgcagggagcgcctgggcccgttacatcagcgttagaggcggcatggccatctgtgcacgcgggtcatcctgggctgtctgagtctcagggttggaggcggtgcgtgttccgcccaagtctgggcggtttttttctggcctattgctttccagtccctgtctctccgttctcccataacgttgtgttcatgtctctgtgcccatggccagggcttagggatggggttcccaggacagggacaacacaagtctttagtggtcaaggtcttcgtgtctgctcagcctgattttgaagagccctgcccggggcaccgacagagctgaacaccctttgtacctctagggaactttccccaggctcagggtgtcaccttcctggtggctgagtgccctgtcccagccacccagtcaccttctctggtttgttccaaactgtgggtgccagagaagggaatctgcttccactgcccatgaaggtcggtccctgcatccctgtgaatttctagctgactcccagacaagtggaaattcagaggccaaaggcagctgctctcctgaggagtccgaggaaagctagccctaggaccgtttcctgatgatgtcatcctggcctctccattgtggctcttgtggtatgccttgcctcctggcaatgcaggtcatctggaacgttctttcagacgtgccaaagtcccaggtgctgatggggtctttaacggtctgagttggacagggcctgttacagcagtccatgatgagaagctatactgaggtgatattgcgtgagcccagctcttttacctgaagacccgtcacctatttctcatgagaggctcttcaggaggagactgggcaggtcctgtcaccagggtaggtgggtgccagtgtcacaagggctggaactgtgcagccagggattctgtagcagtttcagggagtctggcctcagtgggatcagggggatagatcatgaactgtgtggtgacatacggaagagccacggggcattctccagtttacttccaatctggcctgtgttcatcggagccaggccgtgggatcagttcctcacctgatttgccagccacatggtccaccctctgagctttgatacatcctttgtgcccttccatggggttcttaattatcctttccctgtggaacactgccaagcccctgagcacagctcacacaagggacaataggccctgaggagctggaaagactccagcctcagagctaggcagacaagcaggctcaggcagggggttgcagcttagactgcaagaggttttggacccgaagccaccaaaacctccacatgaaagagctgggagggccagtggctccctgcccaccacttatgacctttctgtaatccctaaatatcctagccggccacctgcatggctgaaggaggcttttgtggaatcacctgtggcttctttgaaaagcccttcagtgacccaggttacccagagcctttcaggcctgtcctccccgcatgagagccactaacaagtcccaggcctcgccaaggtctgtgttgtgttctccacagtgaagggttaaatgctcagatgcgcagaagagggagagggagctcggctcccctacccgggggaactggggtgttggaaccacgttttccctttctgtgctttctgaaaggtccgtcctggctcacctttgtatagatccacccctctgcaaccctcaatctttaaaacaatacagagggaccgtggcatacccattaacacccctgggtgctgcctagtgcgccctgggtaaatgctgccgggtcctgagcctggctcctggccacatgttgttctgtgccccgtgggagtgtgtgattttcaggcaagatcccctacttcacatcagttctatagacttgttgactctttatatactgggcacacacacacacacacacacacacacacacacacacacacacacactctgtgctttgaggacacaacagagactatatcgaaggtccatggtccatgtccctgtgtcactgacatttggccacagtctgagcattcccgggaccatgtaggggccagagatcatgggagttcacagcagagccaagggcagtctctcccaaggcagcaggagggtggaaagctgaaagaccggagagagcggactgcttaaaggtccttcaggcagaaggtttcagaataacgaggggccaggatattgatggagaagaggtaaaagggataagatgacatgacgaatggcctgtttaactggagtgtgtgttgagagtaaatgcttacggtttcccagggaggcagacactctatttctgaagcagaagactaataccagctgtcttagnnnnnnnnnnnnnnnnnnnnnnnnnnnnnnnnnnnnnnnnnnnnnnnnnnnnnnnnnnnnnnnnnnnnnnnnnnnnnnnnnnnnnnnnnnnnnnnnnnnnnnnnnnnnnnnnnnnnnnnnnnnnnnnnnnnnnnnnnnnnnnnnnnnnnnnnnnnnnnnnnnnnnnnnnnnnnnnnnnnnnnnnnnnnnnnnnnnnnnnnnnnnnnnnnnnnnnnnnnnnnnnnnnnnnnnnnnnnnnnnnnnnnnnnnnnnnnnnnnnnnnnnnnnnnnnnnnnnnnnnnnnnnnnnnnnnnnnnnnnnnnnnnnnnnnnnnnnnnnnnnnnnnnnnnnnnnnnnnnnnnnnnnnnnnnnnnnnnnnnnnnnnnnnnnnnnnnnnnnnnnnnnnnnnnnnnnnnnnnnnnnnnnnnnnnnnnnnnnnnnnnnnnnnnnnnnnnnnnnnnnnnnnnnnnnnnnnnnnnnnnnnnnnnnnnnnnnnnnnnnnnnntaaggtgattatgtggaactgggaggttgacatacacacacacacacacacacacacacacataaaacacacaaacacacacatacacacatacaaacacacatatatgcatacatacacataaacacacacacatacacacacatatatgcatacaaacacacatacacacaaacacaacatacatacacaaacacagacatatatacacaaacacacacatacacatattcaaataaatacatatacacacaaatatacatacacataaacacaacataaacatacatacatgcatacacaaacacacatacatgcacaaatacatatacatatataatacacataaacaaataacaccaaacacgcatggacacagatacacaaacacaccaaacacacacatacatatacacacaaacacacattcataaacaacacatacatatacacacatttacacacaaacacacatacacataaacacacaaacacatgtacacataaaccacaaacacacacacaccagatttctctggtatagaaaaggtcttggggcaggatgttgagaggacaagatcacgaaagtgcctgggttggtccacaggagagatggctccagctgtggcagagaggaggagcctgtgagaagattaaagacagttaacagcctgagctatatagagcgagttcaaggacaaccaaggccacacagaaagaccttgtctggaaaaaccgtgaatgcacacacacacacacacacacacacacacacacacacacacacacacacgaagacaattaaactgacacatgtaacttttttatacagtatttggtgcttgttggcagtggccagacagggagggtttgaagctggaatctgtgtggagcctttttttttttttttgatcctaggggcgggcccatcaacttcctgaggcctcctcggcctgtgttgattcagctgttgcctgtgcagttacaggccgaggatagtacactcccattctgcctcctcgcagccccccaccccccatgctcctccgccagcccgtgttccccaggaacatcccaagagcctcatcattggtcctctgagtccagacagagtttctcacatctggactcagtgccagctgcggaagtgcagaaggcgatgctctccctagtgaggaagaagctactcggtatctggtgctcaggccaggccctgtaggtgtgtggccattttagtgcacgctagactggctggtggactgtggttcacgaggcaaagggagagtggctcatgtgtgctaacactgttactgttctcttagagccgagctgctaggttgtgttgttagagggcctctgtctgggcagagtctgcagggccggagtgtggagttgtttctcgggccacctgcatctgccagtgagagtggagaatgatttttcctgggaatttgtttggcgggtttttctttctccttttggaggcagtgtctcactgtaacccaaacttgttaggatctccccgccccggtccccaaagtactgggcttgcatcgggccagccaccgcgcctggcctggtttgtgcttcggaggttacacttgtgactggtcacctgacctctggagcgagcttgctccaccgcctagccctcggcggctgtcggggcggacactggatacttaaggacacagttacagggtggagtatactcagtaatccagaactgactgactagccaaacagcagggatgcatttcagattgcatagactgagaggcaggcaggtgtgcagaccggacagaacctcttacagaacactgtaaggcttgcagggacaccaggcagggtgttggctgagtgattctctgcagccagacaggaaaccgaggaagccatgactctttcagtcttttatttagatttatttatgtatttttggtttttcaatacagggtctcactctgtagaccaggctggccttgccttcaaagatctgcctgctgggattgaaggtgtgtgccaccaccaccacctggcttcatttttatttatccttttagtttagtttagtttttgtttttgtttttttaaagatttatttattattataaatgagtacactgttgctgtcttcagacaccagaagagggcatcagatctcattacaggtggttgtgagccaacatgtggttgctgggatttgaactcatgactttcggaagagcagtcagtgctcttaacctctgagccatctcgccagccctagtttagttttttatggtgctggggattgactcctggcctcgagcaaaataaggttgtgctctcctgctgagctgtgctcctggcctacttgcttttaacttgtttgtttgagacaggatcttgctatgtctggaccacttttacttttgatgtatgtatgtatgtatgtatgtatgtatgtatgtatgtatgtacctgtctgtctgtctgcccgtccgtccatccatccatccatccatccatccatccatccatccatccatctgagacagagtcttgtcacagccctggccaatgaccttgctatatagaccaggctagccttgaccttaaagcgattcacctcccctttacctctgaagtgctatgactaaaaagcatgtgccatcagactaggcttattttttaaactcctaatacgtgtttatttactgtgtctgtttgtacatcgtgcacatgtggaagttagaggccaaggtggggatcagttctctcctggggtgggggtgggggtgtcaaattcatgtccttaagctaggcagcaagagccttaccctaaccctctgggccctctctcctgtagatcctacattttattctgaggcagagatttcactctggatttgaactctgtaatttgcagtgctcctgcctcacaaacctgggactcccactcatttaacaacttcttcttcttcttcttcttcttcttcttcttcttcttcttcttcttcttctccttctccttctccttctccttctccttctccttctccttctccttctccttctccttctccttctccttctccttctccttctccttctccttctccttctccttctccttctccttctccttctccttctccttctccttttcattttcctcctcctcctcctcctcctcctcctcctcctcctcctcctcctccttcttttaaagatttatttattacatgtaagtacactagccgtgtgaataactgtacctaaacaccgggttcctcctattgagaactcgtttgctgtggcttatggggaaccagattgtcatagattaatttctcctctgtaaattaaccgcgtgggactcactgccccgtgttcacattcacggaggggggaatcaggagagatggaggattgtgacaagccaggctaacgagctttggaagtcaaagggtccccattggttgacccttctgaggcagccaggagcaccgaaagagctcctctttcccagctgacccaggacaggtgccaaactcagctccagttggctggctccagtgctcgcccatgatccctgggctctgccggcaagtccaggtcagctgcctgtgagccagagccgcctctgtccaagccaaacactgtggccgagggtgggagcgagggtgggagccggcactgtgccggaacaaagcagcccggggttctgggagaggtgatcaagggtgggagcaaaaaagcaacagatggtcctgtccgtgccctccctcccaccccaggggaaaggggaggactcactgtggttaaatgattgactcagccggattgccacaagcttccaaaagtcaaacgtctgtgcagtaagccctcccttctgaccgccctcggtcctcatagacagctagattctttcttgcttttcttcctgcttttttttttttcctaaatatatatagacatgtgtaggtttagcctttccctccccccactccctctggtcttttctacttctttttcttttttaagagttacatgtatctgtttactgaaggggttggcctgtcttcacgcccctcctcccaccatgggagccccagggagtgaactcaggccgtccagcttggtaaaaggcacctttatccactgatctatcttgctggcacattttttttcctccttcttatttaagagaaagtatttttgaccagcttccctgatggttgttgctagaaatacagattggcacatggacagactgaccacccactgggcccccacaccggcagcagaagaccttgccacattgggcgtagcctgatcctaggagacctcaaagtccgcccctacagtgacacacttcctccaacaaggattcaaactatgggggccattcctattcaaaccaccacggcttctgagtttcttccctctcctaacacagatgggggcagccacagcatccacaactcccaggtccccagtctggtctccggagcggacagccccccctccagtcccaccggacacaactgggagatgaattatcaagaggcggcaatctacctccaggtgagtgggtctgggtcagtgtctggggggaggccctggaggctggagtgagggggaggggcgtgcttagcacagcagctcagaagcgaggctgggctctgcttagtggtctctgctccagacaagaagcaggggggggggtgcaggggtggagaatggtccagggatggaggggggagctcacctggttgtgccataggaacttgtgtgcccggtcctcctctgagccccatttgtggctgagcctgctctaggtctgtgccttctgtcttccaggaccacacagacagacctagtcagtccttaggggacattttatctgccttggatggtagcaaaaggttgttcatgcaatgggtggctccagggtctggtctcctcacgtgccctgttgctgttgtctggcctgatagttcatggttgttttggggggtagggttttttttttttttttttttgagaaagggtcactttatgtagtctggaactcacagagattctcctgcctctggctcctgattgttgggatcaaaggcatgggccactatggctagtactgtttagggattttttttttctttaaagcggtacttttctttaaaactactacatgcttgttaacataaattcagatagtctcaggcaacataattttctccattttgtttaagaaaccgggtctcactgtgtagccctggctgccctgaaacttgttgtgtagacctggctagcctcaatctcacagagccctacttgcctctgcctcaggagtgctgggatttcaagtgcgcgcccgcctcctgcagcccaggagaaggcccggtctctgtgtatgtgggatgcgggccctgggtggtgcatcaagggcggcggctgccagtggctccctctgctcttcccttggactgttaactttctctctcaccccagagaaccatgagtgtagaggttctggtgccctggagacttgaactccagagagcagaggcctggggtggttggtctgtacacaaacccagagctctgtttgggagctgagttagatcttacggtgtggatgctcagcccgtctttgctggtagagagaaacgagccctaccagccatcccctgggcggttattgatcctggagttgggagccgagcctcctatcaggctgtctctagccacaccttctcccctagctgttggtaggaaaaattgcacaagaactgcctatttttagtaatctaaagcagaagcttccatgcccccaaggccgccgtgagatggtgggagactccaccccgctcagaccatggggttcttctgcggcctcccctgggcacgacctgcctttgcttcctccgtctggtctgggctgcggtttgtcttctgtgatcggcaagggcagcagcgtgtgcagctgcgactgaatctcctgtcagctctggctatggtctcctgggaaggggaagagggtcatggggaagacggggaagacagggtgcccccccagccccaccccacccccagtgtgagtgctttttcactgcattcccagatgtgggaatctgtcgcagccttttctccaggacgttgagccatagaggtgtgtgtgagtgagtgaggtgcagcctcagtactgtggcgttttcggtgcagccccgtggggggctgttgtatgcgtcacaggacaccgaggggtgtcctggagtctgtccaatgtgaaattggggtgctgtagtcacccatgtaaaaaaaatccctaagcaaggagctaagtgtacacagagtgcaacagaggctctattggacagggctatgctatacgagcctcactgggaatggctcctcccaagtgttactatcattcactgtcccgtggccacagtttggtgtgccggccatcagaatcctggcattaagttcccgtatcttcgatctccgggaagctccagcctggtcctgttcaccattgtggaggaaggcagggaactttgccatgcctgcagagaaggctgaggaaggaagcctgggccaagctgctagtctggcctatgcatagactcttcatgcctaagaatttaccccctgtaaggatcagacaattctccgagccctcctggtttggcaggtttaagcagcagctcctgggtgggcagcaggcagaggcggggctaacctgcctgagccctgtgtgaccctctgtgaccagccccactttctgcccttgcacctcctgggcacctttgtgctcgcatgctcaggctctcctgtctttgtaggaaggtcagaacaacgacaagttcttcacccaccccaaggatgccagagcgctggcggcctacctcttcgtccacaaccacttcttctacatgatggagctgctcacggccctgctcctgctgctgctgtcgctgtgcgagtcccccgctgtccccgtgctcaagctgcacacttacgtgagtgccccgggggaaaagggagccatgatgctcctgtcagtgatttcaggggacctaacacggaacattccagaagcacagagaggaggtgcagctcctccctgctcccagccagagtgggtgcgcttccgtttcccagtgactctgtggacaggcaggggccttgcagagctcactcagaggcctgtctcactgggctacgnnnnnnnnnnnnnnnnnnnnnnnnnnnnnnnnnnnnnnnnnnnnnnnnnnnnnnnnnnnnnnnnnnnnnnnnnnnnnnnnnnnnnnnnnnnnnnnnnnnnnnnnnnnnnnnnnnnnnnnnnnnnnnnnnnnnnctgtctcactgggctacgctgtggtcacgcctgggagagccacagcccacgttggtgtggatgaagccccactatgggtcttcctggggtcactgtcctcctgtcctttgtttagagagttggctgtttatatgtccttcttttaaaaaaaattagttattactagcctgtgtgtgtgcatgtgtgtatctgtgagtgtccgtgtgtctgtgtgtgtatctctgagtatctgttagtgtctgtgtgagtgcatttgtgtagtgtgagtgtctgtgtctgtgtgagtgtatctgtgagtgtgagtgtctgtgtgagtgcatttgtgcagtgtgtctgtgtgagtatctgagtgtgtatgtctgtgagtgtgtgtgtctgtatctgtgtgtgtatgtgtatgtctgtgtgagtgtgtgtatgtgtgtgtctgtgtgagtgtgtgtgtatgtgtgtgtagcccagccatgccatatgtcagaggacaaacgtggagtgggttctctttctgtctgtatatgggtgcagaggatggaatgccggtgtctttacccactgagccatctccccagccctcgcagccgacttagacggagatgacagttatgtttggagtcttttgccttctttttgtttttaatccccagtttttgtttcctgaatgccttttgtggtttttttttttttaaataagtactgcacagttctcctcagaacaagaattttttttaaatctcttagagccttaaactccttccttctttctaactttttactatgtgggtctgcatttctgtctcttgaatgtcaggtttattcttagctatctgggaaaatctctgtctataaagccttgtctggcatcttgaggtttggtctctctctctctctctctctctctctctctctctctctgatatttgtgtgtgtgtgcgcgcgtgagtgcacgagttcatcatgtatggtctccttgaagacggttctcacctctgtggctgcaggtccacgccacgctggaactctttgccctcatggtggtggtatttgaactctgcatgaaattgcggtggctgggcttccacacgttcgtccggcacaaacgtaccatggtcaaggtaatacatctatctgtccatccccctgcggtgattcctcccatatccccttcacatctgtgtctacggttccatttaaaatctcctcagccccagcgtatgcttgggagtgtagcccagtgagattatttgtgtatgccagaaacctgtagggtcacatggttcttccatatccccaaatgagcagacctggaatgaactgagtcccaaagggcttcctggtgctgtgaggtggtcggggagaacatcggtgggcacccagggtggtgtttcactgtcaagaggacccacacaccagcttcatctcaggccacgtctctgtactggccgcaggagggctcactgttgctgttaagagaggcggaaatggaaagagccctgctggtcccccgtgggctgagttcatcagcgtctgctccgtgcgtaggaggctgggtcagggagctaaccgtgtcccgacctgtcatctccagacgtccgtcctcgtggtgcagttcatcgaggccattgtggtgctggttcggcagacgtcccacgtgcgggtgacccgggcactacgctgcattttcctggtggactgtcgctactgtggcggtgtacggcggtaaggcctggggctgggtaggcctttctggggactgcagccctcctcactatggcccagggtcctcccatgtctgcgtgtgtcatctttccagccctacaacaacagtagcttcaggcagacttctcagctctgtcctgtaggttcctcccacccagtccagagccctgagcccagagctaacccgacgtacaattaaacccatccgtaaagattccatctggttacttggtcagggacttgctgatggcagggaattgatcctttgtgcccaaagttagaaacaactctcctgggattgggtagcttagtgtgtgtgtgtgtgtgtgtgtgtgtgtgtgtgtgtgtgtgtgtgtgtgtgtatgctgtggaaggtgaccttgattccccaggtgatgtagcctctgccatgccttccctttaagagactgtcactcggtggagatggctgtgtacacacacatacacacactgttgttgtccctgtcacctgctgggtacattactaagctaagcatggtgccctcctgggttactaggtcaggtataccagatgcatctccaccagcccatccccccaccaccccagggcacagatcagccctcccacccctgccacccctcagctggccatctttctccccagcaacctgcggcagatcttccagtctctcccacccttcatggacatcctcctgttgctgctcttctttatgatcatctttgccatcctcggtgagcagagccaccaccacccacagcaccccatccctgggcatcctgccagtcagtctccgggccctgacagctgagaaggctacaaacccagcatttctcactgatagagcatccccacgtggtagaggggccggggaagccaggtctcactgtgtagcccaggctggtttagaacccttgaatgtcttgcctccgtcttctaaggaagtaataacatccctgcccaaggcctggcctgccttttgcatgattggctgccatgtccgcagagcacaaagacactctatcggcagccggcatctatgacccagtccgctgctgggatttgtttagtttgaaaaccttgtgaaccatcagcttaaaagtcaatcttgggctggtgagatggctcagtgggtaagagcacccgactgctcttctgaaagtccagagttcaaatcccagcaaccacatggtggctcacaaccatccgtaacaagatctgactccctcttctggtgtgtctgaagacagctacagtgtacttacatataataataaataaatctttaaaaaaagtcaatcttatgcaacaacagccacaacaataataaaataaactaaacagatttccagccccttttaaagactagacctgacagagccagcacacattcctaggtgtcagcaggcttgcatgcagcgacatgacctccgttagccagcacgtgtattctccagagccctgcagtcctcaccgaaccctagtgccctcctccagcgtctccccctgactctgctctaactccagccttggtctgtttttctaccacattctaggtttctacttattctccacaaatccttccgaccccgtaagtaatgagctcttggtcccttgtctatggaggggccttcccatcagacagggtagccaggagggccctggccatgttaagaagggtaccctgtctggtttctggttcccaagagtccccacccctcagacctgagccaccgagaaggagccgagggggacccccctcccttgtgttcttataggcgaagcttccagggatcaggtttggaacgttggggcattctagcagagagagtggaggaggggagcttctcacagggacaggtgacccccctcactcctccccaagaaactccctccctcccttagttggtagccagcttcttcactctgcacatactcccatgtgcactgcacctccgcccgggtgccccttgcattccgaggtggaagtggggagaggcgctctagaggagattgtccagacctggcagcaccatccccaccctttccttgcagtacttcagcaccctggagaacagcatcgtcaacctgttcgttctcctgaccacagccaagtaagtctggggtcactcctaccactgacctctgtcctcatccagccaagggatgtccatcacgccccccaccccggcaccctctccctggtctcagtgaacacagggctgagtggagggaagggggctgtctgggagtgcaggggagcagcagtccctcgcaaggtgcatccttagaggctaaggtgaccctctgccccatgcacacagctttccagatgtcatgatgccctcctactcccggaacccctggtcctgcgtcttcttcattgtatacctctccattgagctgtacttcatcatgaacctggtgagtgtccctcgtgaccccactgcagcagtggggccttcggagagatgtggggacaccaagcagatggtcgggtgtggcgccctcctgcagaatgcgatgaggacggctgggatcccccggctctgtgcctccactttgtagatggtgccggatctttcccacccctgcagtgaaaattttgcactaacagagccagcccggctctgcgcagagaggactgtacgcagatctagcgcctgccttgctgtgtggttctgttactgtcatgtgctgggggtggggtggggatgggggtagcagctgggtgtcagacctgcagggacacgtgtgcccatcaccacagctcagagcacttggcactgcaccctgtgaagggcaggaagctccagtgcacacggatgctgcagagacactggctggggctcagggccaccaggaatgttttctgccatcacaggcaagagccaacactaggccaagacccacagcgacagcggagtgagcagagaccagggcgtcccgtagcctttgggttctgtggtaccgcgaatcgaacctaaatcctctcggatgctggccaggctctgtaaccctggaccacccccagcccattggatttgagatgacaggcatgcgccaccacacttggctttatgtggtgctgggggtggaactggggagtcttgttcatgttaggcaaacactctgctggctgagcaacatactgccctcggagaggacctgggcttggtttccagcacttacaatgacaggactcaatgttttctgatctttgagagctcctgcacacacatgctgtgcacgtgtacactcagtcacacgcacacaaacaaaaggaagacaaggagaggaaatactctgtctgtgtggtttcctgaaatctgcaaatttgaagacttaaagaaatatgttcttttctccttccttccttcctccctcccttcctcccttcctccctccctccctacctcccatcacaaagtaacataccaactgtctcctgtagtggttttaagttgtcagctactgagaggcaccaggagaagcagacacttctctgctctcaccacggcctcgggagactcaagaagccccacaaggtgaggggcttctcgccaccaaccagcaaacaacgctagagtggacgctgactggtgtgtccccaatacagtccagagtgacacagttcactgtcactcacctctgaggggataggagaccgtggcccgggaacacagacagaggttgctccaaaccccatgttcctgtggtaactctgctgagagagtttgtctgaacagaacaaagggatgtcataaatcaagacaattttcaaatacattggtggaaacaccattaaggagaaggcaagttctgccgtggacctcctttgctagctgggggagttcttagcctttagatcgctgctctgttcgtacatcctgaaggatttccttaatagccaccaaggcattaggtcaatgcagaggtgcacaggaaatggctgtgaagaaccgtagctagtttgtacttaggtcctggaccagccatgatccaagctcttcagtccctgaaggtcatcctgtggtcacgcaggtgtgtgctttctagcaagttttggccacagcatgtgcagacagccccagaccccacaggtcaaggggcttgcttcccgaacctcaggcggctgtaagcacccagagacccctttgcttctggttcactagccgcacgtcggggtttctcggcccttttctcaagtgactcgcagaactagggagaagtgtttgcagctttatcataaaagaattgccaaggagttcagatggagatttgcgtgggcacagtggacgccctcctgccctccccacacgaggctctctggaagcaccccaaaccctgttttcacaaagactccatcacacaggcatgatgggagtgtggacagccccaggaaactttagggaaagaggccggcatagtgctgccaggctgaccgggcaaagcctgtgcctctcaacattcccctcaggcgggactctgggataccgatggtcggatgactacaacgagggaaagtcagagactttccacgtggctggcaccaagtcagaacactagagaaggcttgggcctggtgctacgtgcctataaccctggcacatgggaagtggagcagggggatagcgagttccaaaccagccatggctatatagcgagactatgtctcaaaatctaagagagagggctcagcaggtaacggcactttcctacaagcctcacagcctgagtaggaaagacagacccccccaaagttgtcctctgaccgccccccccacacacacactgtagcatgcagaggcatacacagacacacacatacatgcatgtgtatgcatacaataattagttttagtaagttggggggttttttggtacccagccacactcctgtgcttattctcatctgtagctcatctctccttggagcggtccagccacagagctgagtaaatgtacgtacgacagagcttgtctgcccacacacccaaatgtcttgcctgtgcgggctatggtagagacacactcaccttccatctgcatgggaagcagtgtgtgtgagggtgtgtgtgtgtgggtgggtgtgtgtgtgtggcgggggggggggggtggccttagaaggatcaggagcacacactcagaacagctttgaaagacagagtggagagatggctcagcagataagaaaactgactcttccagaggtcctgcattcaattcccagcaaccacatagcggctcacaaccatctgtaatgggacctgatgccctcttctggtgtgtctgaagacagcgacagtgtactcatatacatgaaataaataaatcttaaaaaaaaaagaaagagtgtcactcaggtcttccccaccctctgtccccctcattaataaactgattttgctctggggcagttctagaatgttccattcctggcatgcaggttttctcctccccactattcctggagccttacccgaagctgtgactcacaggaaaagtaaccgtggaaggaggaggatgaggccccagggtcgaagtccatgtggcctcttccccaggcccttcctctggccagctaggggccagctatggggaaagggacagggccctggggaaaacccagcaatggtgacttcaggagagaaatatacaaagagcagcagtttctttcctcaagtacccacccctgtcccgagcagtgcagcccaccgtaggctttcctcagtgaaagccctgtatgggggacagagggtgacccccggatcctgtaggctcacctagggcggccaaggacgccatgcttgtccctttacagctcctggccgtggtgttcgacaccttcaacgacattgaaaagcacaagttcaagtctttgctgctgcacaaacggaccgccatccagcatgcctacggcctgcttgccagccaacgggtagggcagtgggggaggggtcacagggagggacttcattctctcccccccccctttgctgctgcacaaacggaccgccatccagcatgcctacggcctgcttgccagccaacgggtagggcagtgggggaggggtcacagggagggacttcattctctcnnnnnnnnnnnnnnnnnnnnnnnnnnnnnnnnnnnnnnnnnnnnnnnnnnnnnnnnnnnnnnnnnnnnnnnnnnnnnnnnnnnnnnnnnnnnnnnnnnnnnnnnnnnnnnnnnnnnnnnnnnnnnnnnnnnnnnnnnntttggcttggcagagctggtgaccctgtggctattatgttgcctagggagaaatgcaggtcccacccccagggaccctgcctctcccgtcctactgactgccttcccctccctctcttgcagaggccggctggcatctcctacaggcagttcgaaggcttaatgcgcttctacaagcccccggatgagtgcaagggaacgcttcctgactttcaaggccttgaaccagagcaacacgcctctgctcaggtaagagccgggtaccaggggctggggggctggagagatggctcagcggttaagagcactgactgctcttctgaaggtcctgagtgcaaatcccagcaagcacatgtgactcacaaccatctgtaatgagatctgatgagctctactggtgtgtctgaagacagctacaatgtatttacatataaataaataaacctttaaaaaaagagagagagagagcgcgagagagttgggtaccacgtcgtcggggccacacagccagaccttactgtcctgtagcaaagaggttctgggcattaggaggtaggtgcagggaagccttggagagatgcagatcacaccacgactcttacatggttgtgttccttggtaatctcttacaagacacagaagccaaacagtagtctgtttcagtcctgtttggttgaagagaaacgtttgaggctgggtgtgctggtgcatgtctctaaggcctgaggcaggaggattggaaacttaatgcctccttcaggtatgaaaagaatttgaggccagcttggactttttcagatcttgtcaataataataataataataataataataataataataataatacaggaaagggtgagatggctcagcagataaaagtgcctttgccaagtctgacgacttgagtttcattcctgggacccacatggtagaaggagagaatcaacccctgaaagttgccctctgacctaaaggaaagcacacacacacacacacacacacacacacacacacatgcgcaccggagcttggagggactgagctggagagatgttggtgctggccttgaggccagtaagcacaagggtgccgccctctcagctgggcttcccctgctgtgaaagtgagggcagcaggctcattactctgtcattccgggaggcctctcttgccctcaggggcagcctctgagggtcagaggtggtcagtgtggcctgagtcatcatagcccctggagaacagaggcagtcaggccactgcaggtgagggccctggctcagggctaggtcccataaggtgtccgtcttcctgggagaggcagccttgggcaggtgggaggagcagagtgtgggtgtcaacgtgtgtgacaggccctgcctgtgaccgtcctttcactttgcttgtgacagcctgaaggacttctatgatatttacgaagtcgctgctctgcagtggaaggtgagtgtgtccctgcatccgcatccagcaagtgaggagggcagctcagccttcaatggtccatggacctcagccgcaaccggaatccagaccgcgtgacccagccttcccaaggcttctcagagagatgagccatatgcaaatgtggtccatacatggaccccagatgtccagtttagcagcaggagtgggaggccgggccctgtggaggtctgggctaggttctggaccctgggcctgacctcttctcccctgggtcctctgcactacaggcaaagagaaacagacagcattggtttgatgagctcccccggacagccttcctcatcttcaaaggtgagtgtgtggaaccaagctgggaaagaagctcaggaagggccaggaaagaccctgatcagtaattcaaaatccaagggccaagcgggcacccgtaaccgcagcaccgcagaggctcagacaggaagatggcaagtttgtggtcattctggaccacatagcaaacctcatttcaaaaactaagtaaaagtgcgttaagactgacagatgcctgcagttcttcatgggatagtcacttttcagtcaagggctaggtttgtttgcttttgagacagggtttctctgcatagccttggctgtcccggaactcactctgtagaccaggctgccctcgaactcagagatctgcctgcctctgcctcctgagtgctgagtgctagggcacccatgcccagcctaccttggaccctctaacctttacattttcttctcttcaaacagggattaacatccttgtgaattccaaggccttccagtatttcatgtgtaagtgtgacccatcgcagctctgggcccctgtcctcctgagcccttcattcttgaaggtagagagacaaacaatccagaaaacgccaagcactggattctgtccccagtacttctcaaaaaaaaaaaaaaaaaaaaaaaaaaaagcaaaattctgagatcgaggcacgcccagatcaccaaacttattatgtgcagaagtgatcacgtgtggttgcttcctggccccctgctcccttcagtccctcacttcagttctgggtctctgttgcagaccccagtcctctgggaccacagtgttgatagggtccctcctgtttaaggacgcttcctcagcagatatgagtctgtcactatgcttagttaaggaagtgggtctgttttcgctctgcctgtccccctacatacctaagtccttttaatttggaacttcagtgcagagtcctatggtgatgtggtactcatagcaacatgtaattctcaacatgtaagccagttggggagcggggaacctaggagagtgtggtagctcatgactgtagtcccagcactcgggaggctgagtgattgtcacaagttcgaggccagcctggcccaacaccaagctcttatctgaaggaaaaaaaaattcaagggctggaaatagcacttggtggtagagtgttcactggccatgcaggaagtccctggttcccccagcatctcgcggagttagcagagcaactgttcaagtccccagcacatctcacttacttgacagccagaaggggctgggtggggcagtgccctcaggaagctctctgacttcttctgagaagaaataatgatcagtggccacagtctgagggatagagggctcactgcctggccctgactgtccccggggctttctgcagacaccgcccgggttttgtttgtttattcactattgacttagtgcttattggtgaaggtgatcattttattctgaggtctgattgaaagtgtggaggcagaaacccctagaaacacacctcccctgtagattttctttgagtagccttggctgtcctggagctagctctgtagaccaggctggccttgaactcacaaaaaatctgcctgcctctgcctcctaagtgctgggatcaaaggtgtgagtcaccacggcccagctggtgcttcagattttcaaccccagggatttttttttacctgaccccactactctgacatttcttgattcacaatcttaacctgaaggtccccagcagcgcaagcatgtgtgacctttgtcccagggtcccagcagcagccccaccacaggactgggtcagctggagtgtcacctagggacactttgcttagtgtgcgtcaggcccacagagaaagttcctttctctatatgtgggcaggttgccagaccttttcttgttctgagacaggctctcactgtatagccctggctggtctggaactcacagaaatacccctgtctccgatttcccaggtgtggggatgaaaggtgtatgtcactatactgcccatctttatttcattttatttcagatctttagggcttccctgatctcactgaacttcatatcacaattccatagcatatttatatggcttcaaatcatacttttagaacaaaatatgttcaagtaaggtatagagactattcctatacccccccccccccccagtggctgacttatattttggcttatttttctgttgtttaaaagctttaagaggggctggagagatggctcagcggttaagagcactgactgctcttcccagaggtcctgagttcaaatcccagcaaccacatggtggctcacgaccatctgtaatgagatctgatgccctcttctggtgtgcctgaagacagcttcagtgtgctcataaataaaataaataaatctttaaaagctttaagaaggtcagccactccttcttgtttcccgaagggattccctggttgatgctggtccacagtgagagccctaagcagaagtgggaatccttcaataatgatgtgtgctccctccacccccccccccgttcactccccaggggggtcctgcccatagccctgcaggccggctgacccatccctctgactccctctcatggcttctctatcccagacttggtggtggctgtcaacggtgtctggatcctggtggagacattcatgttgaaaggtgagctccacctgggacccctccctgctttacccagnnnnnnnnnnnnnnnnnnnnnnnnnnnnnnnnnnnnnnnnnnnnnnnnnnnnnnnnnnnnnnnnnnnnnnnnnnnnnnnnnnnnnnnnnccccccccccccggctgactggaaccaccacgtctgccacttctctgtcttctaggtgggaatttcacctcaaagcatgtgccctggagttacctcgtgtttcttaccagtaagtgtgctgcctgactctgcctggctgccggcttaacccaactggagggtttcgattggctacagcatttaatagcccttccctaaaacaacctggaaggacccccatcttagaggtttagtctgacccctttaccctgctttcaatccatgtactttaaaaaaaaaagatttatttattcattttatgtatgagcacactgaagctatcttcagacacaccagaagagggcatcagatcctattacagatggttatgagccaccatgtggttgctgtgaattgaactcaggacctctggaagagcagtcagtgctcttaacggctgagccatctctctagtccaacccatgtacttcttactggcccctggtcatacaacgtgatccaccatgtatcagccttgcttctagctggcccccaccatgtccctcagttttacctctagctggccccccgacatgtcactcagcctggcctctagctgtcccctcaacatgtccctcagcctggcttctagctggccttctcccccagtgggctgggaagagcccagatcagcccctgttttctccctcttgtcttagtctatggagttgaactgttcatgaaggtggctggcctgggccctgtggagtacctgtcctctggatggaacctgtgagtagagcacacggtcaccctgaggcagaggtgtccatgtcggctgtcctccccacaaccaaagggcaggtggctctggggacacccctggaggtgcagaggacagcaagatctgtctgcctgtgatccaagaccattctggtgatcttacctaaagtctctggggccacccacacaagtccccattgatccccactgtccccagagctggctcttcctagtctcaaacctcgtctctttcacaagggccacagaaggtgtctcctccccttggctggcagtgggaaaaagccacagggtagagccggtgtggcagagcctgtgtggcaaaaccagaccacactcacgaggacttggatcatcaaaatataacgagctagagcgggaagaaatcagggtggcagggccccactgtcatctccacttagggtagggttgagggcttatcccttgaacccagaagtccaaattctgcctaggcaacacagagacaccatatcaaagcggatacacacacacacacacacacacacacacacagagagaggagcaaaagacaaatgagctacaagtttgcatgtcacacgtgagggtcccatgccaggcaccatgccgcacaagaagagtggggcccgtgcctgcctggtgtgtcttgagtcctgccttcagtttctcagtgtggccagcaatcttgggactaccgaggccaaggcttctgccctgtccttagagtagcataccgtccactgaggcagtttccaggcacatacgtcccccggggtcggaacacccaagggtgactctcagacttgagcacacctggcaggcgcaagccccactgtatgctgtggccggtcaggtcgccatggaagccagctaagagcaggactgcaggaggggattgtggaggggaaacctggactgtcaccgacaaactggctccttcccccgccccaggttcgatttctcggtcacggcattcgccttcctgggactgctcgcactgacgctcaacatggaacccttctatttcattgtggtcctgcgtccccttcagctgctgaggtgacctgcagggcttggggagtgggtaatgggtgggcactgagggctgaggactcttgggattagcccatgagattttgccagctgctggcagggggccccccatctttagcctgagctattaaggataggggcacacagtgctctcgatgggcagaacggcccagcctgcagcccagggagagccacactgcctacttgcccagtcgttagtcagggtatcttacctttgagggactggagggatgtccctggtggtcacttgttcctgtttcaacctatgttcctgggcactttgttcccgctgctcggctttttcgggtcccagtggggttccacttacatagatacgccttcctcggggcttgggcttttggagactcagaagtcagggctgccgtgtctgcctaccatgtccccactctgcctttccttccaggccaactagagctgttgattgattgtgcaccccatttcctgagcttgtcccagttgtgcatcccatttcccgagcttgtcatgttacctgagctgctggcttcatctgtccactccagtaggggacttgatgcatttttttttaaaaccagtatgacatgatgagtctagcccagtctgtgccccagtgtcccaggactgtcccatccagtgccacagtttatgagtccccagggaagtgagctcagctgcgcaagtttctcagccttgtcttgccgtggggagaggagggcttacaaggttctggcccatctgaggaaggggcagtgtggccatgcccctgcctctgcagtcccagcaacactgttctcgtcgttcaggttatttaaactgaagaaacgctaccgcaacgtgttggacaccatgtttgagctgctgccgcggatggccaggtactgcccacctcttggcccgcaggtccaggccgcactaggctcatgtaggggtccggggaaatgggaacaaggaggaatctcaggaaggccggattcaggggcttgggggtggtcttcaaagagacagaaatctggaatctgcgggtccctttggcagcactggcctggctgaactgtctagcggggagggcagggagctgtcgacttaccacctgtgtctacgttcacaggtaaggggtcacctgtgagcctaccttcacaggtaaggggtgcatctctggtcaaggggcatctgtccctagcgtcccccaccgtgagccacgcggcccctcccctgcagacactttgtgactgtcactcggccaaggctaggggcatgcctcccgcagtcagtgccgggagaccaggggagaccaggacgcgctgcagctgcccccgtcccctccctcccgccctgaccgcccctgtccctctgcctccccagccttggcctcacgctgctcaccttctactattccttcgccatcgtgggcatggagttcttcaacgggcggctgacccccaactgctgcaagtgagtggcccggaaggctctgggcctgcccagcatgggctttactgctaggctgggcacaaggagctgaatgacagtgtgggagccagcgtcactcatccctagctcaggcctcagtcgatacaccccctccccagaaccagagcagccctcatccctgataggccccaggagacaccgagacctggcaagagaccagagagatgacacatggcaagaaggtcgcagggctgaggggtgaagagagagggtgacacctctgtggcccttccccttctcctcccctccaaaaggaaatgagcatgatccaccatcgctgtgtccagttatgactgcccgcgcagccttggctctgataggctaccagtgacccttgtatgtatccagcagacggctgcaccgagagccctgttgtcgtcagggtttctattcctgcgcaaacatcacgaccaagaaacgagttggggaggaaagggttttttcagcttacactttccacactgctgtttatcaccaaaggaagtcaggactggaattcaagtaggtcaggaagcagaagctgatgcagaggccatggaggggtgctgcttactggcttgcttcccctggcttgttcagcttgctctcttatagaaccccagactaccagcccaaagatgacaccacacacaatgggccctcctgccttgatcactaagtgagaaaatgccttacagctggatctcatggaggcatttccccatggagttctctgtgataactccagcttgtgtcaggctgacacacagaaccagccagtacgagcccataacaatggtcaccatagcacattctagtcctccatcatggtccatgtacctatcaggctgatgacacaggacacagccttgctagtgagctcccttgtgttgtgggcacctaactcttacaaatggcagaggagtataaagctggagtgtggcaaagagggtcccatccaagtggagcaactgggtcaaagcaaggacgcatgggtagtgatccagaggcccccatcttaccacctccccctcctgatggtgcatgaggcaggatacaggtggctcagagaggcaaggagacccctagccagaccttggtttgcattcttgtcccagggaaggtggttagtcatcttgtaaccctcctgccctcttgtctcctcgttagcaccagcacagtggccgacgcctaccggttcatcaaccacactgtgggcaataagaccaaggtagaggaaggctactactatctcaacaactttgacaacatcctcaacagcttcggtgagtgagtcctagagggtattcccggccttagtccggctcagagttgctgtaaggcctccctccttccctggctccttgggagcccttcctggggtccttcttttttttttttttttctttaaagtttattttatgtatatgagcacattcttgctcccttcagacctgccagaagagggcatcagatcccatcacagatggttgtgagccaccatgtggttgctgggaattgaacctttggaagagcagtcagtgctcttaaccactgagccatctcttcagccccactgggggtcccttctacagcaatgctgtgcgattgtagggcaggcagatccaggcttgcctaggcaccagacctcacagtgacagagagataagaggcccttgctggagggctgctgtgtcagcatggcatggtgtgcctcagtgccagcaggggttatagggcagggatgctgccatttcaatagccatgcagcctctgacaggtcccggggctcctctctgctccctggttccttttgaaagctagatgatgggaggctaaccccatgcagggcgtggcctctcctcaataccagccttagcctgagatagcccgccatgggctctttagtcaaagggcatcccttttgggggagaggttgggtggcaggcctccttgcaaacagttacgaagggactgaggggggctttgacattggcctgaggctaccccctcttcccctgcagtgaccttgtttgagctcaccgttgtcaacaattggtacatcatcatggtaagctctgccccctccccccaacacacacacatgatttctcttcccatcctcacagaatgtggggtcctttatcatgctctagtggaagcctccctgtgccccctgacaggctctgggtatctgactattggtcagcagtgtgccacgccaggccttgtggtgtgaacccgttgttgtcagctgcttgggaggctgaggcaagagtccacgactctaaaataaagcaaagagagtattgggggggggtgtgttcttccaccccccacctcccattccataaattctctcctgctggagactctctgtgctggcctaggctccagtcagccatgcaggagagggctggggtctgatgctactacagaaagacacactcagatcagaggatcaagaggcccttgcctcagggcctcacgcccccagggagggcctgggctgacagacacagaagacggtggccatgctgcccacaaactcactcactcactcactgactgccccctccaggaaggcgtcacctcgcagacgtcccactggagccgcctgtacttcatgaccttttacatagtgaccatggtaggtgtcgccacagccatgctcgcccctacccctacccctgtccccgtccctgtccgaggaagggcctcatctaatggggccacgacccccccacacacacactgcctctctccggccaggtggtgatgaccattatcgtggccttcatcctggaggccttcgtcttccgcatgaactacagccgcaagagccaggactcggaaggtctgtaagggtgtcatgtccagagcgctgtctgccccactgtctgtctcctgggccttgcggtctctacacagcagctcagtttctgtgtttgccttgtctgtccaggtctcatttgtatctgtggttagaaatctaatggaaaaatgcccacggttcctaaatgtataacaagtagctgccatcccttgatcctgccgtggaaggagctgcccattatctccctcccaaccctgtacagactctgactagtgcttacttggagccagggcagagggacagccaagtcctgtcagccagtgccccgtttccctatactacacccccagcttgcgactcccggcatgagacttcggtgcagccgcctttctctgtaatacactcagaccaccacagattccccattccggccgtgaacagttcaaggcagaggtggacagcgtcccttctgcagcccagtggcctggctgtgctcgctgcttcctgcatgcacagcctgtcttcacacttagctgcgcggcggctcagtgttgctgtgcgcagcatgtacaaagacccccccccccggggcttgcaaccccgaactgaagaaaggaaaggaatccaagagcagagaagacctcccgttccctccctgttgttaaatcggtgtgattttatatatgcacaccaacgtgtatgattagagtccgtcttgctatataaatggtcctcaaatctctgcatcctcgatgaagcctgacgcttttctgtttttcttggagaccttctcttcaagcctctctctgtgagatgggtgctcatgtaaccccgggctggcctcagacttgctaagcagccaaggccgggcttgaggtggtccatctactctccgtaccctaattctgagattaccacaccctgctctccctgatgccctgtgtccctgcaagcggttggctagacatagtaccttcctgacgcacacaccctgttagtgaggggagggagaggaaggaatcactgcttgggagggaaagcagttatgggacctggctctccccaccctcagtggacagtggcatcgtcatcgagaaggaaatgtccaaggaggagcttatggccgtcctggagctttatcgtgaggagcgaggcacctcctctgacgtgacccggctgctggacaccctctctcagatggagaaataccaggtaaggggccacaggctctgcagattgcggagggggcggggcctgccacttcaagccggtggcacccacgcagaaacgtcaataggataggagcagcagcctccgtggcccacccctaggtgagtccatgccacacacacacacactccatagcctccattcctccctagcaaaattccatggtgtttctgggacggcgatcgagaaccaaaagtgacctgagtctgaagatgtaccaggaggagatccaggtaggggctggtgccctgggaggcccccttctggtggagggctcggaaaggtcccatgtcctccatggagctaaggaccgaggcccttggcagcccccatgctgatgcatcttttgatactttgccgcattcctgggtggccgctcttccatcctgtccactgcatggccatgctgccccttgagggtgcccagtgcccccagtggatctttctagagatttgagtgacaggaggagagagaccagggcccctgcaagacctgctgcctcttcctgcccctgttgcctgatgggattaagctcagagttttgacttggggccttttgattttaagaaggataaggtcaatttccttccttccttccttccttccttccttccttccttccttcctttcttccttcnnnnnnnnnnnnnnnnnnnnnnnnnnnnnnnnnnnnnnnnnnnnnnnnnnnnnnnnnnnnnnnnnnnnnnnnnnnnnnnnnnnnnnnnnnnnnnnnnnnnnnnnnnnnnnnnnnnnnnnnnnnnnnnnnnnnnnnnnnnnnnnnnnnnnnnnnnnnnnnnnnnnnnnnnnnnnnnnnnnnnnnnnnnnnnnnnnnnnnnnnnnnnnnnnnnnnnnnnnnnnnnnnnnnnnnnnnnnnnnnnnnnnnnnnnnnnnnnnnnnnnnnnnnnnnnnnnnnnnnnnnnnnnnnnnnnnnnnnnnnnnnnnnnnnnnnnnnnnnnnnnnnnnnnnnnnnnnnnnnnnnnnnnnnnnnnnnnnnnnnnnnnnnnnnnnnnnnnnnnnnnnnnnnnnnnnnnnnnnnnnnnnnnnnnnnnnnnnnnnnnnnnnacaacagtctgtgcctggcagaagcagtggtggcaactgcccaggtagcacttgggcacctagaggccaggccacctgcatcctctcccaacctgcccagcctctctggtgtcagttccccccccccccccgctaatgagggcagagcattgggctgtctctggagaattctttaagctctcacagtctggtctgtggcttgggttttgtttctttaaatatgggggagctgtttaacgctcgccctaccagagtgccccagaccctggaagtaggtggctttctggggaagctgggaggttaagagcctatgagtttctgatgtgacccatcgaagggcagcagcagtgtctgagcctgggacctggcctcctccagagcctgtgtgtggcctggctcaggcctctaaccggtttttgtagctttttcctctattggtggccattgtctgtatccccaggtttgtgtttgggtggtgacctcagtgggtaggcctggctctgcctctgctgctcccctcccccccaagcagaggttcttccgctctccctcccttccccccccacctgtgtgtccctcacactggctgggagagctggagagttggcaagcgagcgaaccaccctcagcagcgcccgcctcttccctaggagtggtacgaggagcatgcccgggaacaggagcagcagaagctcaggggcagcgtgcccggccctgcagcccagcagccccctggcagtcgccagcgctcccagactgtcacctagctgggtttcgtcaagccagcctcttctatgcaataacaccatagtattatgtactaggacgtatgggaaccatgtgtgtatgtagacacactcatatatatgcacatatttacacagagacagaaaagagactatagccagggtccgttccagccacctcgctctgtcttcctgagctccagaaataaccagcttaggctggaggcccaggcctggcggagctctcgtcctaccatggaaaactctggaagccctctgctcaagaagccccttaaataggctatctcgtctcagcaatgccggctttccccggggagggatggggggagcttgaccgcctccctactgcggcctccagcttcgtccctacctgaaccccagccaacacaggtgtctgtgtctggtatgaggatcaaaaccactaggaagaaaccccacaccctgcaggatgacatctatcaatgacaaaagtgttagaaggttcccttgagggagacagaagagcttactctctcaggctcccagtcctttcttgttgctggaaccctaccacaannnnnnnnnnnnnnnnnnnnnnnnnnnnnnnnnnnnnnnnnnnnnnnnnnnnnnnnnnnnnnnnnnnnnnnnnnnnnnnnnnnnnnnnnnnnnnnnnnnnnnnnnnnnnnnnnnnnnnnnnnnnnnnnnnnnnnnnnnnnnnnnnnnnnnnnnnnnnnnnnnnnnnnnnnnnnnnnnnnnnnnnnnnnnnnnnnnnnnnnnnnnnnnnnnnnnnnnnnnnnnnnnnnnnnnnnnnnnnnnnnnnnnnnnnnnnnnnnnnnnnnnnnnnnnnnnnnnnnnnnnnnnnnnnnnnnnnnnnnnnnnnnnnnnnnnnnnnnnnnnnnnnnnnnnggagttggagtgggcaggccagcccccccctcctgttctcccagccgcagaaccaggggtcaagctggaaagcggatgtttttactttaaataaagcacagttgccccccccccccaatacatacactatcccccaggaaaaacctctggtttccacagagagtcaggagactggccaagtcccttccacttcaaagagctcttggcctccacttggactccagttcccaaccctgagaagcagtttcatttccatagccggttgccttagcttctttgtgtgtgaggggcattttggaagcagaaagaggggaggcctataaagagggcggtggggggggggaggctctgagcaactgcctggttctaggccccttcctctaccccaggtaccctcagcctaggggagcaggctcaggtggaagggactggtcttgggccccatgtagaggtactaaaacccctgggtctagcacataccagccaggtgcctgagcaagacagggccctcaggccaaactgtagccccacagagtcacctttgagcacacaccaagctgaccctcaaacttgctagccaggcagggaacagactgtgtcgcccagggctgtaagctgagacccctgggatccctgtctaagctagatgccccttccctccattcagcagagtgagaactagtggctccgtgtcacagcctagcaggggcagctacggaaccaccacgctgcttctcccgagtggggatagggcactctgtgggaaccaccacgctgcttctcccgagtggggatagggcactctgtgggaacagtgtccggcccctccctctcgcttctccaccccctccaccccagccttactccacaccgtgcagacaatcattttgtatgggttaagagccacgtcgtcggaaggttttatacagtgatttgttacctaggaacgcactgtgcccagatttctggtgtgccaataaaagagcctctgctttatagacccggctgcagcctttgatttccagcttgttagtgggtgggccactactgaccccacatgttcccaccatccagccttaaggtcacctgcccagtcaaagaactgacgagaccctgtgggactcttctggtacgtgtgaaataactcatcttttatttttggaaacaacaaaaaacaaaaacaaaaaacaaacaaacaaaaaaaaaaccccaacagtcaagtctcttaattacagctgaaggcagtcagggagtgagtggcacttttaaaaggctggtcacaagctggacagtggtggcacacacctttagtcccagcacttgggaggcaaaggcaggcagatttctgagttcaaggccagcctggtctacagagtgagttccaggacagccagggctacacagagaaaccctgtctccaaaaaacaaccaaccaaacaaacaaacaaaagactggtcacactacttgtaagacctccctggggagggtcagtccccccaacccccagctccccttgaggtaggcacagagcccaggctggctcctgttttgcagacgggagagccagagtttggaccacaaagctctagaagtgtttagatccacagtccaacatggcagccaccaactaggaagggcagtgcctgctgctgtcaactcgacctctttcctctggctgacttgacacggaagctgagaaacccagtcttgtttccacgtgtggagtctgttttcaggccaccctgtaggtacgcaggaccccacagagagtggaagagccagagagggaactgcagggctgcccagagcccagcaggcatgggggctgactgaaaggctgccctccccccagagcctccggtgtcatttagatcccatcattcctacccgggattgtccccagcaaagccagcctccagatccccacactaaggctgttaggtgccggcagtcaggaccttctcacccatgcagagctctgccagtgactatcttctcaggagatccacgggggaccacagagggtccccctccccacacctccccctcaggaggctagcagaatcgcccccacacctctaggccaagcagcttcagtcacgccttcttcaggtgaatcaccccaaactctgtgagcaggaccacaacaaggaaacagatgtagaagaggaggaggcagaggccgtaagccttgctgagctggaaacactgaagcggcacggagaccagggagaagatcaagctgaggcccagggcactggccagcacccacaccagtaatccgtctggctccagctgtggggagaacaggagttgtttagtccccaccctgggagccttctgggccatgtgcaccatgaagggagtgttgggtccttggtacacagctatggggtctgccacgtggtactgtctctatcagcgtccacatccgcctgtttgggcttttcttcctggcctcccgtgttagcagcgatagacatgcattcccatggtctatttttttgggggggggaggttgctggggattcaaacccagggcctcgtgcatgctaggcaaacaccctgctaacaagagccacatccccactcacccaaaaaccttgccctgtgacttagtctggctttgaacttggggcaatcctcctgcctcagtactcctgagtactgggattacaagtgtgtaccgtgcttggctctggctgcatgctgctacatactgacttctgtgtagccaaggacatgatcctgcatcaagacactgtgcatgcaggatgcaggaagcaaacagagcagggcgtaagaggacctgggctgggtacagaagtgtttgttaagacacatctttcagcccttccatgtagagttgaagaaatggcatttgtgtgcatgctcccggggcttgctgtctatccagccgatctttaccaggcccgacttctgtgtaacagtacaggtagccccgggtgcagtacctagcactgagtttgcttgctttgtgcaacatcttccaacatgatgtcactgaagcagcctgccttgacaaccaggggatgtctggtctgaggaggcccgaatgcctgtactggttttctagccctgccttctggagttttccagcctttgaggggagtttcttatgcggaatcccttgtataacatactcaggccccaataagtcttgtttaaaatgcagatcctggtgtgtttgcctggctaaacgagagagcctgtatcaaaaggaggacgggtggccagaaatggatctattggtaaacaacgcttgctgcacaaacacgatgaccctgggtttggatctcctaacatgcctgtcaccgtagcaccgaggggtggagacagaagctggctggccactaatcaaacccaaaatcattgagcaccaggttcagtgagcttcctgtctggacagattgagaaagtcatgggaggtcactcaatgatcgccttcagcttctgtgtctgcataggaggtgtgtataactgtacacacacacacacacacacacacacacacacacacacacacaccagggtccagtgagactagccaggggtgcaataatggtataatgcttagcatgtgtgagccacaggtttgactctccagctttccacaaattgcagtctcccagactccactccttaaaacacatcgtagccttcacaagaacccaggctatcctatgtgtttcaaaacctctcccttagtattcggaccccaccccttcttctcccagctcctccctggagctaaccaggaagctataagggtgtgttatcactccaatggtaaagcccagagacaccctacccagttacacattgaagatttcagttatgggcccaggaccaaagcctcaggtcacctgcccattctacgagggctgtaatctcagttacatgtcctggttgcagggaagctctttctttccaatccccatgaaaagtattcccaagagtttctgcaacctcactactgaccttcacctccacaacgtggttcctgatgatctgcagcaagcagcccagccccacaccaaccaggatgtctgccataggttcaggaagctttgctggagcccacgcccaccctagcagccctacctcactcggcggctcaaccctggccctgggctcagagaccccacagcatgtgtgggcttttttattgtccctgggccccagggttaatgcctctaatacactgggtgtcaagagcccagtttaagccggacagtggtggcgcacacctttaatcccagcacttgggaggcagaggcaggcagatttctgagttcgagaccagcctggtctaaagagtgagttcttggacagccagggctatacagaaaaaccgtgtctcgaaaaaccataacaaaacaaaacaacaacaaaaaaagaacccagtttgcccttggcctatgggagtcaaatggagtgtcagatatgcctgatacctgtgaacacccagcagttgggggaaactgaggccaagggacctgtgccttgcatttgcccacccctatgactcattccagattgcttcctttgtaccaacctgaggttgtcacatgagtcccacaagattggaatctcaattccccatctacaaatgccaaagtgaggccccaggtccccagccagaaccaagggtggggtgctcagagtccaccatgactctcagagccaagacgccaccacacagaggctcggagaagccgtgcaaaggatactgaagatgatgcccccgaaacaggcggagaaggccatccgagggtatccttggcgggccagcgtgaaatctgagaaggcatctgcatagagagaatatggtgtgtgtgtgtgtgtgtgtgtgtgtatgtgtgttgggggcggactcctgtttacacagctagtcagtcaacaaacatggataagggcctgcccccttgagggtgcactgctataccccacaagctctcagggcacctctgtgtgctttgggtaagatgctcaaagagctgaactgagaacagctagattctggactcccagatccatgcttgaatggtcctgtttggtgtgtagcctggacaaccataactggctgctgtggctaaacaggtctgtatgtgtgacagcctgtatatcaccctccccaacatataaacacacacacacacacacacatacacacacacacacacacacacacacactcgcgcattaaacatggttggctgtaatgggtttcacatcctgcctgaactctggggatctgcggagtgtttcaagcatccaacaagttaagcccctatgggatgtttcagtccagtggtggtttagtgacacgctccccagattcctagtgtcactcaaaagcgacagcgggcaccccgtcagtgcagaggaagcacacactggatgtcctctccagctctgagtatggctagggaagagaagagtcaacccagagctccaagttacctccaatgctgtttccccaggccaggagggtcagccctaggacggtgttgctcaggcggaagatcacacccagggaccgtaatatgttcaccacctctgtggcggctgcattgatccacagggcactggtcaggaaacccaggaaagcaaagagctgtggagggaatggggatcctgatgggaccccggccggtccccagcagaacatgtcctatctgtaaactgggtagcaggtacccacaacccaggccaggctgtggtgtgacacagtggcagagtagcagtggcggtgggacccagacagaggaaaggggatgctctctggcaggcctgaggccctaggtgccaccctagcacagccttcttcagaaaaggaaggagctacacgtgagatcagggatcgcccttaaagacacaactgccatcaaaagagagcaggcatgaaagacacagtctactatgatacccttgatgtccggaacacagctggggtgtgatgggctctgcagaggggcccagatgggagcatttcaagttcaagtccaggttgcttagcaagatccccaaagcgggctgaggatatggctcagtggtaaatgcttatctagtaccacagagaaggaagagagtgagggaaggacggacagacagatggatggatggacggagggagggagggagggagggagggagaaggggcaaaggaacttgctctcaagtatgataaccggcattcaatcttccaaatccacaaggtagaaggagaaaaccaacttctataggttgtctttgacttcnnnnnnnnnnnnnnnnnnnnacacacacacacacacacacacacacacacacacacgtgcaaaaatgtagtaaaaagaaatatttctttttgtaaagaaaagaagcaggggaagaaagatccagagagagagagagaaagttgtaggggctggtgaggccgaggctaccagtcaaccagtcacatggttctgaggaggtgagatggcctgaaactgctcacactgctctgaaggagacaaacccattggtgctggggcatagcttggcagggcactggcctagcctcagcatcctgaaacacagtcacacctgatcccagcactggaagtcggaggcaggaggaatcatgagttcgaggtcattcggggctacacaaggctctgtgccaacaaagcaggaagtcagggctggaagggttggctctgcagctaagagcattttctgctcctgcagagtgggtcggttcctggtgcccacattgggtggcccataacctcaggttactcctgttgcacgggatccagcaccctcttctggcctcttagggtaccaggcgtgcacatggtgcacagacacatgtgcaagccagtcatacacataaaaataaataaatctgaaaaaaacagaaaataagggagcaaacaaaaataaaaacaaaacataaagactgaaaagtatgtgagtaatagctcaataaaaataaatccaattcacttcaaagtaaaaagaagcccgaataggcaaatggcttggggttcggctcatctgcagggtagactttgccattcaccataccacaccagaaacatacccaggccacccttcagaggcttccaattcttttttttttttttggttttttgagacagggtttctctgtgtagccctggctgtcctggaattcactttgtagaccaggctgtcctcgaactcagaaatccgcctgcctctgcctcctgagtgctgggactaaaggggggcgccaccacacccggagaggctaccaattcttacccagtgcagtctagggggttctctgttagacgtggcaaagaaggtcactgaagccagcgctgtgcccacgatcaccaccacagcccagacaggaaggagaccgccgatctcatagatgccatctgnnnnnnnnnnnnnnnnnnnnnnnnnnnnnnnnnnnnnnnnnnnnnnnnnnnnnnnnnnnnnnnnnnnnnnnnnnnnnnnnnnnnnnnnnnnnnnnnnnnnnnnnnnnnnnnnnnnnnnnnnnnnnnnnnnnnnnnnnnnnnnnnnnnnnnnnnnnnnnnnnnnnnnnnnnnnnnnnnnnnnnnnnnnnnnnnnnnnnnnnnnnnnnnnnnnnnnnnnnnnnnnnnnnnnnnnnnnnnnnnnnnnnnnnnnnnnnnnnnnnnnnnnnnnnnnnnnnnnnnnnnnnnnnnnnnnnnnnnnnnnnnnnnnnnnnnnnnnnnnnnnnnnnnnnnnnnnnnnnnnnnnnnnnnnnnnnnnnnnnnnnnnnnnnnnnnnnnnnnnnnnnnnnnnnnnnnnnnnnnnnnnnnnnnnnnnnnnnnnnnnnnnnnnnnnnnnnnnnnnnnnnnnnnnnnnnnnnnnnnnnnnnnnnnnnnnnnnnnnnnggaagcagctggctgggtagacagtgcgcctagcatgcatgaagtccaggatcatataaaccagacagggtggtacacgcctgtaatcttagctctcgggagacagaaagatcaggagtttatggtcatcctctgctgtgtagtgagttcaaggatagtctggggtacctactgagactatctaaaattaaaaaaataatgccggacagtggtggtgcatgcctttaaccccagcacttgagaggcagaggcaggcggatttctgagttccaggacagcctagtctacaaagtgagctccaggacagccagggctacacagaaaaaccctgcctcgaaaaacaaaacaagcaaacaataacaacaaaaataagtgaggggctggagagatggctcagtggttaagagcactggctgctcttccagaggacccaggttcaattcccaccacccaattgacagctcacaactgtctgtaaccccaattctgggatatctgacaccctcacacaggcacacatgtaggcaaaacaccaatgcacatttagaaaaataaaataaaataaaaagtgagagctggggtcaaagcccaggcttgttcacattcagccgtgtgaggccctgggttacatcctagagaaagccccagtcagccgctgtaaagtaggctccagacttcccctggtgcgaggcagggccataactctcccagagacagaggcggcagggtactaggctcccaggtacccccatctgccttcctcctccccctccataaactgggcacacatcacacaaatgtggttctgggttcaccctggcatgaaagtcgcgccatgctcacccatgcctttggccgcaggctcccaccccaccaacctagggtggaggggaggtgccagaagagagagaaatgaggtgtgtgttacctcagagcttaagaaaagacatgggcgaaaccagaaagtgcccggtgagtctgtgtgctcttcagtcaaaacaaggcagaaatgaaactgccactccgggaccaatggggaaagccagcgtggcggggtcattctcagggcaacggagggctctggggtcagacaagctgcctacacacattcacgagtcacctcggactgaactctgccaggttttccttcaggactcaagtccagatctcaagatgacaacgctgggagatttagtgtgaaatcttccattctgtaattttcttttttttaaaaaaagacagggtctcactgtacatagttctggctatcctggaacttacagtgtagtccaggtgggccccaagttccgagattctacctgcttctgtctcttgagtgctggggttgattagaggagtttgctaccacgagcagccttggtctgttttcttgttgttgttgttgtttcttgttggtagaagtggacctgaaatcctgcgccttggctgctaggcaggtgctctatctctgaccccacccatcccacagccctcttcaagtcctttgatgggcagagggcaggacttggcctgagggccgcctgtctatagctccacctgcaggcagcaggactgagccactgatagggaagacttgcatgagcattgccctggtctgatgaaactctgggataggaggaggaagaggaggggaggaggagggggaggacaggggcggtactcacagacccccgactgcagggtcaggaccaggaccagggggctgatgaccagctgcagacagttgagtggccgtttccaatt

SEQ ID NO: 479 - DNA, 3240 bp, Mus musculus
gaaggctggcgcagctgccgctgtggcagcggtgaggcggcggtggcggctgctgaggctccgcgctggggatattggcggcggcaactgcgggctgagctacgctgtgcagacccagtgcacagtgcgggatcccgggacggcgcgtaccttagaagatgcctctgatggaacaggctctgggaagcttccccggccccgtggctttgaacaggagctcaagccggaggcagtttaaagccctggccgttgtatcctgaggaccgcaggtcaggagaagatggctgtaagtttagatgacgatgtgccgctcatcctgaccttggacgaggctgagagtgctccgctgcctccttcgaacagcctgggccaagagcagctgcccagcaaaaatgggggcagccacagcatccacaactcccaggtccccagtctggtctccggagcggacagccccccctccagtcccaccggacacaactgggagatgaattatcaagaggcggcaatctacctccaggaaggtcagaacaacgacaagttcttcacccaccccaaggatgccagagcgctggcggcctacctcttcgtccacaaccacttcttctacatgatggagctgctcacggccctgctcctgctgctgctgtcgctgtgcgagtcccccgctgtccccgtgctcaagctgcacacttacgtccacgccacgctggaactctttgccctcatggtggtggtatttgaactctgcatgaaattgcggtggctgggcttccacacgttcgtccggcacaaacgtaccatggtcaagacgtccgtcctcgtggtgcagttcatcgaggccattgtggtgctggttcggcagacgtcccacgtgcgggtgacccgggcactacgctgcattttcctggtggactgtcgctactgtggcggtgtacggcgcaacctgcggcagatcttccagtctctcccacccttcatggacatcctcctgttgctgctcttctttatgatcatctttgccatcctcggtttctacttattctccacaaatccttccgacccctacttcagcaccctggagaacagcatcgtcaacctgttcgttctcctgaccacagccaactttccagatgtcatgatgccctcctactcccggaacccctggtcctgcgtcttcttcattgtatacctctccattgagctgtacttcatcatgaacctgctcctggccgtggtgttcgacaccttcaacgacattgaaaagcacaagttcaagtctttgctgctgcacaaacggaccgccatccagcatgcctacggcctgcttgccagccaacggaggccggctggcatctcctacaggcagttcgaaggcttaatgcgcttctacaagcccccggatgagtgcaagggaacgcttcctgactttcaaggccttgaaccagagcaacacgcctctgctcaggcaaagagaaacagacagcattggtttgatgagctcccccggacagccttcctcatcttcaaagggattaacatccttgtgaattccaaggccttccagtatttcatgtacttggtggtggctgtcaacggtgtctggatcctggtggagacattcatgttgaaaggtgggaatttcacctcaaagcatgtgccctggagttacctcgtgtttcttaccatctatggagttgaactgttcatgaaggtggctggcctgggccctgtggagtacctgtcctctggatggaacctgttcgatttctcggtcacggcattcgccttcctgggactgctcgcactgacgctcaacatggaacccttctatttcattgtggtcctgcgtccccttcagctgctgaggttatttaaactgaagaaacgctaccgcaacgtgttggacaccatgtttgagctgctgccgcggatggccagccttggcctcacgctgctcaccttctactattccttcgccatcgtgggcatggagttcttcaacgggcggctgacccccaactgctgcaacaccagcacagtggccgacgcctaccggttcatcaaccacactgtgggcaataagaccaaggtagaggaaggctactactatctcaacaactttgacaacatcctcaacagcttcgtgaccttgtttgagctcaccgttgtcaacaattggtacatcatcatggaaggcgtcacctcgcagacgtcccactggagccgcctgtacttcatgaccttttacatagtgaccatggtggtgatgaccattatcgtggccttcatcctggaggccttcgtcttccgcatgaactacagccgcaagagccaggactcggaagtggacagtggcatcgtcatcgagaaggaaatgtccaaggaggagcttatggccgtcctggagctttatcgtgaggagcgaggcacctcctctgacgtgacccggctgctggacaccctctctcagatggagaaataccagcaaaattccatggtgtttctgggacggcgatcgagaaccaaaagtgacctgagtctgaagatgtaccaggaggagatccaggagtggtacgaggagcatgcccgggaacaggagcagcagaagctcaggggcagcgtgcccggccctgcagcccagcagccccctggcagtcgccagcgctcccagactgtcacctagctgggtttcgtcaagccagcctcttctatgcaataacaccatagtattatgtactaggacgtatgggaaccatgtgtgtatgtagacacactcatatatatgcacatatttacacagagacagaaaagagactatagccagggtccgttccagccacctcgctctgtcttcctgagctccagaaataaccagcttaggctggaggcccaggcctggcggagctctcgtcctaccatggaaaactctggaagccctctgctcaagaagccccttaaataggctatctcgtctcagcaatgccggctttccccggggagggatggggggagcttgaccgcctccctactgcggcctccagcttcgtccctacctgaaccccagccaacacaggtgtctgtgtctggtatgaggatcaaaaccactaggaagaaaccccacaccctgcaggatgacatctatcaatgacaaaagtgttagaaggttcccttgagggagacagaagagcttactctctcaggctcccagtcctttcttgttgctggaaccctaccaca

SEQ ID NO: 480 - protein, 811 aa, Mus musculus
SPGRCILRTAGQEKMAVSLDDDVPLILTLDEAESAPLPPSNSLGQEQLPSKNGGSHSIHNSQVPSLVSGADSPPSSPTGHNWEMNYQEAAIYLQEGQNNDKFFTHPKDARAAYLFVHNHFFYMMELLTALLLLLLSLCESPAVPVLKLHTYVHATLELFALMVVVFELCMKLRWLGFHTFVRHKRTMVKTSVLVVQFIEAIVVLVRQTSHVRVTRALRCIFLVDCRYCGGVRRNLRQIFQSLPPFMDILLLLLFFMIIFAILGFYLFSTNPSDPYFSTLENSIVNLFVLLTTANFPDVMMPSYSRNPWSCVFFIVYLSIELYFIMNLLLAVVFDTFNDIEKHKFKSLLLHKRTAIQHAYGLLASQRRPAGISYRQFEGLMRFYKPPDECKGTLPDFQGLEPEQHASAQAKRNRQHWFDELPRTAFLIFKGINILVNSKAFQYFMYLVVAVNGVWILVETFMLKGGNFTSKHVPWSYLVFLTIYGVELFMKVAGLGPVEYLSSGWNLFDFSVTAFAFLGLLALTLNMEPFYFIVVLRPLQLLRLFKLKKRYRNVLDTMFELLPRMASLGLTLLTFYYSFAIVGMEFFNGRLTPNCCNTSTVADAYRFINHTVGNKTKVEEGYYYLNNFDNILNSFVTLFELTVVNNWYIIMEGVTSQTSHWSRLYFMTFYIVTMVVMTIIVAFIAFVFRMNYSRKSQDSEVDSGIVIEKEMSKEELMAVLELYREERGTSSDVTRLLDTLSQMEKYQQNSMVFLGRRSRTKSDLSLKMYQEEIQEWYEEHAREQEQQKLRGSVPGPAAQQPPGSRQRSQTVT

SEQ ID NO: 481 - DNA, 97505 bp, Homo sapiens
tagctgccatactgcagtggacaatggtgtcttggccttcccattatccagggagtgcagtggcacgatcatggctcactgcaacctcgacttcctgggctcaaacagtcctcctgcctcatgctcccgagtagctgatactacaggcacgtgccaccattcccagctaattattgtatttttatttttgtagatatagggtcttgctatgttgcccaggagaaggaagtgacacttgaagccacaaaagataacttcaactcaccaaaccaaagaacacaccaagagaatggcagggaatcaaagaaacacccaaagtgactaagaacgaaaaagaaaggcaggccagatcaggtgctaaggatgtttagttccttggcaaggcagaatgtattcaatatcaggccaggtatcatggttcacgcccgtaatcccaacactttgggaggctgaggcaggaggatttgttgagcccaggagtttgaggatgcagtgagctatgatcaggccactgcattccagcctgagcaacagagtgagatcttgtctcttaaaaaaacaaaaaaacaaaaaacaaaccagaagcccctttgggagcagaggattgggaattatcttcaatcactttgattcacacacacttcctgctccctaatgaatctcatgagatcctttgaggcttttcctgaagacaaagttttaggaggctgggcatggtggctcacagctgcaatccaagcactttgggaggccaaggagggaagattccttgagcccaggagttcaagatcagcatgggcaacaaaatgagacctctacaaaaagttaaaaaaaaaattagcctgtcatggtggcaggtgcctgtagtccccgctatttggggagctgaggcaggaggattgcttgagccagggaggttgaggctacagtgagccatgatcgcaccactgcactccagcctgggtgacagagcgagatcctatctctcctcttttttttttttttttttaagctggagttttgctgttgtcacccaggctggagtgcaatggtgtgatttgggctcactgcaacctctgcctcccaggtacaagcagtctcctgtctcagcctcccaagtagctgggattacaggcgtgcaccaccacgctagcctaattttgtatttttaatagagacagggtttcatcatgttggccagtctggtctcaaactcctgacctcaggtgatctgcccaccttggcctcccaaagtggtgggattacaggcgtgagccaccatgcccagcctagatcctatcttgtaagtgaaaaaaaagttttagggacagccatggagatttctcaggctctctgaggatgaaggatctttgcccatggctacaggatgaatgtgaacaaggtagttaatgaatgcagtcctctccattgtaccccaaagctctcaggcataaatcaaaatgcctgaattcttcagagagtgcggctggaaacgcaacgttacatgaaatgtttccaatttgctttcagccaaattacctcttttgctttaaagggcaaacttgttttctttgattatgatgacacccatcatttcttgacagctcatttgggtgaacaagataaagcccgtggaactaggattgaggggaaatgcatctgactctgacgacaaaaatgactggagaatctcttttccttgaatcctaatatgatcatttcatgtcctttttaatgccaccaaccttaatatttaaatcatttccaacttaagcatctccgtttaaaattcctgccctgagagtgaagcaaattgttaatggatgggaaactttaattggatattccctttatttgtcattaattctgctgatgaactttataaatggaaatatatctttatcatgcaaattatacctcgtcttcattcaaacaggcttgttggatattttattaattttgctcttagaatattttgaggaaaaaaaagatttgaactaaattatatattttttccccctggagagaaggaaaaaacccaacacttaacaactaccctacaaatccaaactggcaagtggaaaagtcagagggtgctaaaaaaaaaaaaaaaaaaaaaaaaaaaccaaaacaactggagtgtgggaaatggatttctctctctctttttaaattcactcttaatttaggttcgggttacatgtgcaggtttgttatataggtaaatttcatgtcatgggggtttggtgtacagattatttcatcacccaggtaataagcatagtacctgataggtagtttttccatcctcatccggatctcattttaaggaataccattttaacattagctaagtaagttcttgagaacttactgtgtagcagacactgttctgaatgctatatacgaattaattcctttaatccttgcaacaaccctatgaggtaggtgctattattacctctatttcacagatgaagaaagggagacagagagagaggttagatgattctagttagtttacagctaggaagtgacagggcctgcaccccatcagcactattctgtccagtctcttgattttaagattgacttctggccgggcgcagtggcccacgcctgtaatgccaccactttgggaggctaaggcaggttgatcacttgaggtcaggagtttgagaccaacctggccaacatggtgaaaccctgtccctactaaaaatacaaaaattagctgggcatggtggtgggcacctgtggaggctgaggcgggagaattgcttgaacctgggaggtggaggttgcagtgagccgagattgcagcactgcactccagcctgggtgacacagtgagactctgtctcaaaaaaaacaaaaacaaaaaacaaaaaaaccaaggtcttgctatgttgcccaggctggtcttgaactcctgggctcaagaggaattttctttttagcctcagaaagatctcactaccctccaaacctctagctttcttccgaactctgtatgttttatctgaggctttcaagtctagggagggggaaagtgaggggctagaaagaagcaacagattcatgatgaaacctgctatcccaaccaactactatacagtaggtgctcaataaagaaatcactgttgcggttgggctcagtggctcacacctgtaattccagcactgtgggaggccgaggcaggtggatcacctgaggtcaggagtttgagaccagcctgggcaatatggcgaaacatctctactaaaaatacaaaaattagccgggtgtggtgaaacatgcctgtaatcccaactacttgggaggctgaggcaggagaatcacttgaaccagggaaatggaagttgcagtgagctgagatcgcaccactgcacactccagcctgggtgacagcgtgagactccgtctcaaaaaaaaaaaaaaaaaaaaagagaaaaaaagagaaaagaaaaagaaatcactgttgaataaatgagatggcaaacccagatttaccaacaggcttgtctcctcactgggagatgctggcataataggataatgttgttttgcaaaatatatatgtcctgaattggagccagaaaagagagtcatattttcatgatagaactgtaggccaacaattggcctatgaattcttttgcatccctttactcagggcttggaattttttaaacaaaagttttaaatgtaatgaattttttactttttcatagttgagtggttttttttttctttctgtgactaattttgaactattacccaatcctcctctcttgttctttttgagaacctgtgttttatggtttacaactggtctgtaaaagattcccaggctagggctgcagcaatgaatgctggaggtattgacagttgggaccctgtttgtaatgctggctgggtggctgcaggctccaggattatctggtgctttggagacagaggacatgggatagtgactcagattgggagggaacatgccccccgggacagatttctatgttgctggttatgatgaaatactttccactgaccacaagctatatagccttgggcaagtccacttgatcttctgggctttcatttcctcattactgaagtggaaacgaaaaacacatttggaatgcaattccagtgtctcaccacttcctggctgtgtggctttgggtaagtcgattaacctctctaagccttgacgttctacctgtgaaatgggacacagcactgttgagggaatgaaatgaaatccttgctcaaaagtgttacgcttttatgacttttagtactacttcaaaaattatgttaatatcaacactttaatgtttcttaaaatagatgtgcttttccacaaaataatatggtatatgtttttgtatcaaaggctttataaaaagtcaaaacagaagcagtttttactcctttttactattttgtttttaattttgctggtttctgcattattcatgttctcctgttagtgaccgaagaagaccaagttcccttaaatcactccccattgtccagtctcccctccttatcaatcagttcatcaggaattttaattcctcttttggttacagtgtcactttagaaatgcttatttctggttatatctaagtgtagacagcatcactttggcagtttcagacagaaggaagaatttcctagtagtgaatttagattattctataatcaacttctccaacttgaaaaaaatatttaactactacacacctattagaatggacaaaatctagaacaccgacaactccaaatgctggtgaggatgtgaagcagaaactctgtcattgctggtgggaatgcaacatggtgcggccacttgggaagacagttgttttcttacaaatttaaacctgctcttactgtacgatccagtaattgcactccttggtgtttacccaaaggagttgaaaactcatgtgcacacaaaaacctgcacacacaaaaagcttatggatatttatagcagcttcattcacaactgccaaaatttggaagcaaccaagatgtccttcaggagctgagtagataaacagtggggcatcccgacaatggaatacaggattattcagtgttaaaaagaaatgagctgtcaagccacgaaaagacatggaagaaacttaaatgcatatcactaagtgaaagaagccaatctgaagaagctgcatatggtatcactccaactatatgacattctggcaaaggcaaaactatggagatagtaaaaagatcagtgttgtctaagggctgggggaagggagggatgaataggcagaacagggaggatttttagggcagtgaaaatactatgtaccttactacaatgatggataccatcattatacatttgtccaaattcacagaatgtacaacaccaagcgtgaacccttatcccttatgtaaactatggaatttggatgctgctgctgatgtgtcaatgtaggttcatcaactgtaacaaatgcaccactctggtgggggaggttgacggtggggcaggctgtgcatgtgggaatagggggtatgtaggaactctctctacctttctctcaattttgctgtgaatctaaaactgcttaaaaaataaaatcttaaggttgtaaccctttactgggcagtgaaatcagtttgccaactgggactagagttaaaattaaacgaaacagggttgggtgcggtggctcactcctgtaatctttgggattacaggactttgggagcactttgggaggccgaggtgggtggatcacctgaggtcaagagttcgagaccaagcctggctatcatggtgaaacccagtctctactaaaaatacagaaattagcagcgcatggtgttgggcacctgtaattccagctacctggtaggctgaggcaggagaatcgcttgaacccaagaggcgtaggttgcagtgagctgagattgcaccactgcactccagcctgggcaacagagaaaggctctgtctcaaaaaaacaaaacaaaaaacagcctatctcaaacccgtcctgctctcaggcactaatgtataatgttccttttgtcagaaaccaaccccccaggaataatttctccctagattaacaatttctcattctttaggtcttagctcaatggctacccctcctcagactggaacagacagcactttacaacctgtggaaactctctcacctttcctgcatagtactaatcacacgtgtaatttttttttttttacagctctattgaggtataatttacattaccataaaattcacccattgtaagtgtaaaactcagtgactatttttgtaaatgtatctgaagttgccacatcactacaatccagttttagaacatttctatcactccccccaaattcccatgagctaatctgcaaacaatctctgcttccactcacattttttgttgtggttgttttgtttttgaaactgagtctcgctctgtcgcccaggctggagtgcagtggcgtaatctcggctcactgcaacctccacccccctggttcaagcaattctcgtgcctcagcctcccaagtagctgggattacaggtgcgtgttaccacgcttggctaatttttacgtttttaggagagacagggtttcagcatgttgcccaggctggtcttgaactcccgggctcaagtaatccaccttccttggcctcccaaagtgctggaattgcaagcgtgagccactgcccctggcctccactcatatgtaactttcctggatagttcatataaatgggatcatgcagtatgtaattgtttgcatctgactttttgcttagcacagtggttttcaacctggggcaactttgccctccagaagacatttggcaataatcgggagatgcatttgcttgtcacaactgagagaggctactactggcatcttgtaggtagaggctcgtaatattgctaaatatcctacaattggcaggatagttccccacaacaaagaattttctcacccaaaacatcaatagagctgaggttgaaaaaccctgaccttttttttttttttttgagatggagttttgctctcgtttcccaggctggagtgccatggcgtgatctcggctcactgcaacctctgcctcctgggttcaagcgattctcctgcctcagcctcccaagtagctgggattacaggcatgcgccaccacgcgcagctaattttttttttttgtatttttagtagagacggggtttctccatgttggtcaggctggtctcaaattccctacctcaggtgatctgcctgccttggcctcccaaagtgctgggatttacaggcgtgagccaccgtgcccggctgccttttttttttaatagacagggtcttactctgtcacgcaggctagagtgcagcagtgcaaccatggattactgtagccttgacctccccaggctcaggtgatcctcccacctcagccttctgaatagttgggactacaggtgcataccaccatgcctggctaatttttgtattttttgtagagatagggtctcactttgttaccaggctcctaggctcaaactcctaggctcaaactaggatcctcctgccttggcctcccaaattgctgggattacaggcgtgagccactgggccaaaaaccctcaacttaacatgtttttgaggttcatccaggttgtagcaattattagtatttcattcctgaatagtattttattgctgaatagtattccattctaaggaaatatcatgagttatttatttattcacctgttgatgacatttgggttgtttccagttttgggctgttaagggtgatgttgctaagaacatttatatttaagtctttgtgtggacttatgttttcacttgggaggggtaacttcctaagagtggaattgctaggttatgtgtaagtttattttttgttttatttatttatttttgagacagggtctcactctgtcacatagactggagtgcagtggcacgatctcggctcactgcaacctccgcctcctgggttcaggtgattctcctgcctcagcctcccaaatggctgggattacagggacccgccagcatgccctgctaatttttgtatttttagtagagacggggttttgctatgttggccaggctggtctcgaactcctgacctcaggtgatccacctgcctgtgcctcctacagtgctgggattacaggcacgagccactgtgcctggcctatgtttaactttttaagaaactgccaactatatttcagattggtggtaccaattggtattctgctgtacctaccggcaacatatgaaagctacagtttgtttatttatctacatgatgatacttggtattgtctttttgatttttaaatgtctactcaactcttttgcccattaaaaaaattgagttgtcctcttattgagttataagagttatttttatattctatatacaactcttttatgacacatgatttgcaaatatttcctccatgtctgtgtctgtggctgatcttttcattttcttatgaaaatatcttttgaacctcaaagttttttttttatatatttttttgagacagggtttttcgctctgtcgcccaggctggagtgcagtagtgcaatcatggctcaccgcaacctccgcctcttgcgatcaagcaattctcccacctcagccttatttatttatttatttatttatttattttttgagctggagtctcgctctatcacccagactggagtgcagtggcacgatctcggctcgctgcaacctccaccacccgggttcaagaaattctcccgctcagcctcctgagtagctgggatcacaggcacacgccaccaggcccggctaatttttgtatttttagtagagacagggtttcaccatgttggccaggctagtcgcaaactcctggcctcaggtgatctgctggcccaggtgatctgctggcctcggcctcccaaagtgctgggattacaggctgagccaccgcgcccggcccttagcctcatttaatcatcacaagaaactctctgtcttcagtaggtacaatgagatcacatcttaaggatggagatgggagttaaattccaaagttaggataaaggcaaaagtggtgtaataaaaattacctaatttatttatttatttgagacagagtcttgctctgttgcccgggctggagtgcaatggcgctatcttggcttactgcaacctaagtctcccgggttcaagtgattctcgtgccttagcctcccgagtagttgggattacaggtgcgcctccatgctcagctaatttttgtattttcagtagagatggggtttcaccatactggctaggctggcctagaactcctgacctcaagtgatctgcccgcctcggcctcccaaagtgctgggattacaggcgtgagccaccatgctcggcaaaaacaacaacaacaacaacaaaacaaacaaacaaaactacctaatttaaacactgaagtgagattgcctgctcaccgaggaacgtatggccgttgggtgaaatgggaggggacttataaactcccctcccacccacagctcccatgtttgacttgaaataagttaactacgatatgactctgcttgactgttgtcctcctcgttttagggatgagggagtggagccatgaagtgggcaggtagaagggcagaatggaggccggctccctgcaggttgtggagcgaaaggtccagactaaggcaggagctgagggacagggtcctgaagctgagacgagatcgcagcgggggcttctaattcctcagggagccaaaggacagagggctgaaccctattccacatctcccccgatccgcgaccctttcccaactggctactcacctgctctgaccgctccaggtttccctagccacagttaccgccgcggtccctgcgttgctaggttacccgccaatctcagaaggcgagactcggtgtctgactgacctttcttttcaccattcaatttattgttccgctcagttgtccccacctcctgaagtctgaccaatcagaagcaccgccattttgacctttcaccaatggaaagacttgggactccctctgggttggactcaacgagtaaggcggggaacaagggaggagtaaggggcgtggattcttcgtcccgccccttcttaaggaggcgggcagggagtaccgcatcggcggcgggcgagacctgcggaaggacgtgatagttggccaatcagagttcatcacggtagcccagttagccagtaggacgctgtgaaggggaaatggggcggggccagcggggttgagaggacggtaggcggtggataggagagctggcgcagctgccctggtggcagtggctgaagtggcggcggcttcggcggctgcggcggctgcaacagcttcgggctcggggttttggcggcggcgccggcgggctaggctgcgcggtgcggaccccggcgcgcggtccgggttgctggggcggcgcgtgtaagaatccgagggatgcgacggcttggcccgagggagagggcagggatcaggggtcagaggacgcggagtaaggggttgcggcgcagcactctggtgtgggaggtgggccgtacgggcccagagggggcgcagggaagtctccaccgcgcttctctccgtccagcccgggccggggctttgcaccctctctcctcgcccccgacttcttagggcgaccctcacgtgggctcccagccaggggctgggagcacgtggagctggagccagctgtcctgcctccttcttcctccctccctcgctcttctccctggcgcccttaggtgaccccacaggagtcttgtgcctgggtcaggctgccccagcggacagcgggatggtagctgaacctcttcccctaggccctttccccagcgctggccagttgggtcctctgtagaggcagaagcaaagcccgcggagggaacactggaccaggacgcaggagtcccgggttctagccctactcctccactgtgtgaccttgggcaagtctcttcccctctctgggcctcatttttgtctgtctggaaaaatgacgtgtttgaattcaaatcaggggactggttctagtcgtaggtgtatatagggtaatggttaagcaggcagggtccctgattcagactgcctgggttgaaacttataaaaggcaagttaaccactccaagcttcaatttcctcattcctaaagtggggatattagctaagataggatttttcaacagcagctcagttgacattttgagccacataattctgtttcgggaggtctcacctgtgcattgaagcaagttcagtggcatacctggactccacccaccagcaatccccccactcccaagttgtgacagtcaagatgtctccagacattgccgatgtccccatgggggcaaaaatcaccccagttgaaagccagtgggcaaaggcagtacaggcaggcaagcagtcatatattaaacagttaaacaaccgtgttgaagcatttgaatgcgaggactttaatctatggtggcagatatcatgaaaattatgcatgaacaacccccctgcctctttttttttagctcatcattaatggtagtgtattttatgtgtggcccaagatagttcttccagcgtggcccagggaagccaaaaggttggacagccgtgagttaaaacatagaaaccactagccattatgataatggtaacattaagaaacctcttctctgtgagttaataaattctcctgccttcaaagtaaacatgggagataattgtcaaagctgagtaatggatacaaggaagttcacgtatatattctctgcacttttgagaatgtttgaaaatatctgtggtaaaaagttaaaccaaaacgacaatacaaccataattcttaagactgccaaatagtagtgtctcatctgggatttcctcttctgcctttccactgctgagatttaaaagcaaaataaatccccagatctggaggaaacttaagaaaaaaaaactcacaggaagtgtgctgggcagagagctacgggcttagcagcaagtagaatgatgtttactttcgctgccttgtttcaaaacgttgtactgttccctgtggatgcacaaggatttgcttggagttgttccaatgattcgaggaagaagtcagttgctcagctgccattgactaggtcagttgggaggcaaagtgggttgagcccagagcccacagcttgaggaaggaacctgctgctgtttgcaagttcaaaggtctgcagtcagatctgctgagtctttttttttttttttttggttcttctcagcggaaacgggaatgtgcataaataggagctgtaacaggctagctcggagtgttttacttatttagttatttttaaatttttagtttatttattttttgagatggagtctcgctctgtcgcccaggctggagtgtagtggcgtgatctcagttcactgcaacctctgcctcctgggttcaagtgattctcctgcttcaggctccccagtagctgggattacaggcatgcaccaccacacctggctaatttttgtatttttagtagagaccaggtttcgccatgttggccaggctggtctcaaactcctgacctcaagcgatccacctgcctcggcctctcaaaatgttgggattacaggcatgagccaccactcccggctgctctgagtgttttaaattgggagttaaggatgagcacttttactgtattaaaaaatactcaccagttaaaaaaaaatactcttttccccttcctcggacacctaaatctaagagaacaactcctatataaaaatgatataaaaatcatacattttggaagtatgtttctaactgttctgagaggctgcatggtaaagctgaagtgaaagatgtattttaaatctgtatatatgagcaagtatatattgatgattgaagctaggtgctgcctaaatacatggcccagactttgaggaattatagtgtaatggctgggaatacaggtttggagtcacaccgtagagctgaaagcttggcttttatttagctgtgggtccttgggcaggatacgtaatctgtctgtgcctgaaatacccaccacacccatcctgtaatggggggataataagcctgcctatctcatggggctattaagaattttcagttaacttttacttatgaagtgctagtagggtccctcatacatagtacgcactcattgagtattaactattattattattactattttgagacgagtctcgctctgtcgcccaggctggagtgcagtggtgcaatctcggctcactgcaagctccgcctcccgggttcacgcctttctcctgcctcaacctcctgagcagctgggactacaggcgtctgccaccacgcccggctaattttttgtatttttagtagagacggggtttcaccatgttagccaggatggtcttgatctcctgacctcgtgatccgcccgcctcggcctcccaaagtgctgggattacaggcatgagccaccgcgcctggccgcatattaactattattttaatggttgtatttttttgtcatttaatttaattaaattaatttatttatttatttgaggtggaatctggctctgtcgcccaggctgcagtgcagtgcaccatctcggctcactgcaacctctgcctcctgggttcaagtgattctcctgcctcagcctacagagtagctgggattacaggcgcaagccaccacacccagctaatttttgtatctttaatagaggcggggtttcttcattttggccaggctggtcttgaactcctgagctcaagtgatccacccgtctctgcctcccaaagtgctgggattacagttgtaagccaccgtgcccagccttttattttactttattttttagagacagggtctcactctgttgtccaggctggactgcagtggtgtgatcatagctcactataacctccaactcctgggatcaagtgtttccgtcacctcagcctcccaagcagctaggcctacaggcatatgccatcatacccagctaatttaaaattttttattttgtagagatggagtcttgctacattgcccaggctggtcttgaactgctaggctcaagcagttctcccaccttgacctcccaaagcgctgagattacaggtgggagccactgtgcccagcctatttttttctttgaagtctttacaaaacttacaaataaatgtaaagagaagtggaggtaggacatattggccctaatgtcactctccagacagaattacccttaacttttcagtatttgttcttgcagggttccctccctccgtattttaatgctattatactgtaataatgcttttattctgtttttatttatttatttatctttattttatttttttgagacagagtctcgccctgtcacccaggctggatggctctatctcggttcactgcaacctctgccttccgggttcaagcgattctcctgcctcagcttcttgagtagctgggattaccggcacgtgccaccccgcccagctaattttttgaatttttggtagagatgggttttcaccatgttggccaggctgctctcaaactcctgacctcaggatccgcccgcctcggcctcccaaagtgctgggattacaggtgtcagccactgtgcccggcctaattcttttattttttaagagacaggatttcactctgttgcccaagccagagtgcagtggtgcagtcatagctcactgtagccttgaactcctgggctcaagtgagccttctgagtagctgggactacaggtgtgccacctgcccagctaattttatttatttatttatttttgtatgttaaatatttattttatttttttctgtgtgtatgcttacccaaccagctttttttttttttaattttttatagagacaaggtcttgctatattgcccaggctgatctcaaattcctggccttaattgatcttcccaccacagccttccaaaatgctggggttacagatgtgagccaccccaccggccaatttttttaaaaattgagttttaatttaccattttattattttttaaattaagatataatttaccattttattatttattttgagacaaggtctctgtcacttaagctggagtgcagtggcatgatctctgctcactgcagcttccacctcctgggtttaagcaattctcatgcctcagttacccgagtacctgggattacaggcacctaccaccaagcccagctaattttctgtatttttagtagagatggggttttgctatgttggccaggctggtcttgaactcctggctcaagtgacccacccaccttggcctcccaaagtgctgggattataggtgtgagccaccgcgcctggccctagttcaccattttaaagagtatacttgagtggtttttattcacgaggttgtgcaaccatcaccactatctaatttcagaatagattcatcagtcatggctgtattttaataattatcttttatttttttaattcccaaaccctagaagatgcctctaatggaggagtttctgagcagcacccctggcccagtggctttgaaagggagctcaaaccagagactatttcaagccctggatatcatatcctgagggccacaggagaagagaacatggctgtgagtttggatgacgacgtgccgctcatcctgaccttggatgagggtggcagtgccccactggctccctccaacggcctgggccaagaagagctacctagcaaaagtaagatggtggggtgggctggggggaccccagcttttctgtttcagaggctgagaggtgataagcgctttgtggtctgatagtaggggtgtgtaacttgttgcctggccccacatttgagccccaagttctgatacagaaactactcctgggaggctgtgtgtttctccttccacacccccagcttggcagtgtttctgggggcctagctgcccctcttggtgccctcgctaccttctccactgcctgccttgcacctgaggtaccttggcctgcctgtggatgcttggtggggacctcaggccaacctactttggctgccttccctgccccattccttgttaaaaaaagaaacagatttcaacaccagcctccgtctgtccccatctgaaaccgttggcaggaaagcagcactgcccgcgtctctttgctccatctcagtcccttcttgcccaggacagcggggaagagggcgagtgttttgtcatgatccattgatttgagggcttggggttttgctttgtcttcctctgaaccaaagcctagcacaaagtgaacccaagtgcggcaaggagctttaaattttttaaattttaagtgtgtttctggcagaatgagaggccttgaaaacctttctggttctcatcccgaagccatttgtttcagttgctcaggccttgggctcaggagaggcttaaaataactcgccttttctggagggtcctaagacatcaggaagcagtgctttagggtctgcttagcaaatggatgttccaccgtctcccagtgctccccagtcagggcagagatgtttggggccaaggagagacgagccaggctctcccgtctcatttgtccagggagaattcagttgagttgcagggagtttggtggcctcccctgggaactgatgaaggagagcagtgtttccagggatgtgagtgtggtggggagccctggctgcctagaaacaggcctctctttgcttcactgtgttcaccctcatctagggtggcagagctggattgcccagaaggattcgaacataaacttgatttttccccaagtgccactcagggatgagaaagcagtggctctgatttcagactatctgttttctttctgaaatccctttgcaaggctaggcagtattatccctatttacagaggaggaaactatgggtcagagaggtcaagtaacttgtctgaagtcacacagccaggaaatggttgagcagagatttgaacccagcatcatctgactccagaattccttccccttctcctcttccttcttttacttcttcagctgctcctccctctccttttttcttcatcacccttaataaatgtgagcacaggccaggcgtggtggcccccacctttaatcacagcactttgggaggccaaggcaggaagatcacttgagcccagtgactttgagttcaagaccaacctgggcaacatagcgagacctcggctgtacaaaaaaattaaaaacttagctgggtatggtggtgcatgcctgtagtcccagctactcaggaggctgaggtgggaggattgcttgagcccaggaaggttgcagtgggctatgactgcaccactgcactccagcctgggcaacagagcaagaccctgtctcaaaaaaataaaaggtgagtacagacctttagcatttatattatctcctcatataacctcaatatagggttgttattattatctgtattttacagaggaggagacaggctcagagaggttaagtgacttgtccaaggtcacacagctagtaagcagtaaagcctgtctttcctcccacaccacagtggaaggcgctttggggaaagggatgaaagtgattgtggctcagtttcagctttagagaggaatgctgcctagtgagggagggtggttggcctactaagggtgtggcttgtgtctggaaatagccaggcttaagattctaaatgggaatcctggctgtcatcgtgagtgtcacttttaagtccctccaacgtgcctgacctgatggtggggtgtccagctttcctgtgggatgaaaggggcaagagagcaacccagtcctgtgtcaagatcaggctttgaatgttgatgaataggaaataggccagagacacaataagactccccttggctaggccactagcaaggctgcttttatcttggcaaagtcagtggcttgctttggtttgtttctcaagaataaagaaatgtataactaactgctggggtccagggacattgtttttcctgtacagcacattagtatcttagtttcttctctcagcttcttactgggtcattttttaaaacctcaatgacttgtgggtgtaattcaccaagcctggctgggaagaagggtaggacctgtgcaagtaaacaagagttttcagaggaggcctgctctgccttagcatagtaggcctttgatatttcatgcttggattttggccttgaccttctaccccagcgtccccctgtccctgctgtctgaggagcagtccttcagtccttttttttgagacagtctcgttctgctacccaggctagagtgcagtggcacaatctcggctcattgcaacctccgcctcccgtgttcaagcaattctcctgcctcagcctcccaagtagctgggattacaggcgtgagccactacacccagctaatttttttgtatttttagtggagacgggggttttaccatgttggccaggctggtctcgaactgttggcctcaagtgatccacctgcctcggcctcccaaagtgctaggattataggcgtgagccaccacacccggccctgagcagtccatctaaaacacaagcccaacctggttgttgccttgttttaaagcttcctgggactttcccatccctctatgggggttggggagggcaagctcttcagctggcaacgaagccttgcgtgttctagtgccttcttgcttgaccagtcccatttcctgcctcagtccacagcatcatactgcatttagttcggtgaatcccctgtgcattcttaaacctttccaccttgctggcaagtcagtctagaatccctttctcagcctcttgtttgctcgtggcctccagttctgtcttgaaaatcctgctgataacaccatctctttgaagccttcactgaacttccccttcctgacagagctaattactcactacccttttctgcttcggtatcttgattaggcttccattattacaagtagattatagtggggtaattacacatttaaccatctgatcacctactaggccctgagatccattcatctttttttttttttttttttttttgaggtggagtatcactctgtcacccaggctggagtgcagtggcaccatctcagttcactgcaacctccacctcccaggttcaagtgatcctcccacctcagcagctgagactacaggcatgtgtcaccacgcccagctaattttttgtattttcagtagagcctctttccttggctcccaaatggttacctttttgctgtgtccccacgtgattgtccctgagtctgtgtgtctgtcctcttctgataaagacaccagtcctattggattagagctcatccatatgaccttgttttatcttagtcacctttaaaggccctttctccaaacacagtcacattctttcaccatgttggccaggctgatctcaaattcctgacctcgagtgatctatccgccttggcctcctgaagcgctgggattacaggcatgagccaccatgcctggcccatccatttgtctttgtatcacatagctcagtgcccacaatatgcaggtactcaacaaatagtggtcagaatcaacgtacttggatttctggggcctcgcagcccatgggagtggcagtgtaagggcccgagttagaggtgggcagcctccctcctgccgcctctcctcaccattgctttgagtcccattgctctcagcacagctgagtgtcctggtggctgccatcactgacctttgtctttggttgctgtaaacctttgaagtactaaggagttggcagaatgcagatgcaggccatccgcggagttggcaacgacatgagcatgggctactgggaacgaagcaagctttctaaggctgagtcaccatcaagcctggcctttgttttggcccagcagccgctgaggccttctcagcactgtacctccacgctccatgtctggttgggcacccctaacaaaacaccatggactggtggcttaaatgacagaaatctaatttctcacaggtctggaggctggaagtccaagaccaaggtgtcagcaggtttggtttcttgcgaagcctctttccttggctcgcaaatggttatcttcttgctgtgtccccacatgattgtccctgagtctgtgtgtctgtcctcttcagataaggacaccagtcctattggattagggctcatccatatgaccttgttttaccttaatcacctttaaaggccctttctccaaagacagtcacattctgagctactgggggttaggacttcagcctatgaatttgagggggacacagttcaggccatcacactcctacccattcttcagaggcagggactgaggaatctggctgtgctgcctgtgacctttaaccctatgtgagggccttatccctgcaggaaactggagggtttgggtttttctccttatatgggcaattgtggatttaatccaagactcagacatctttgggctctaagtgcggctgctgcagtgctaatgaatgactcacaggcagcatggtgtcaggttgataaaggaggcaggtatgagcagaggtatttaaagcctggaaactaggaataaccttgaaaacagtcagcggggccactgttagagcagtgtagagacagaccacagtccacaccgcgtgacaggcggtggtctcacccaccacattcagggaatcaggacgagtctgaatgtagtgggcagtccaaggaatttcccagggtaactctggtcacactcagctctgccttctccctgcctttaaagccagctgctgcctaagatgggctggaccatgtgccttttctgagtgaaggaaggattgggctcgcgggggctggctgaggtctgagcaggatgctccgtctctgctttggtgccgggttgtttatggttttcaggtgacaggtcctgcagctaaggcccaaggtcacagcgcagagagctgacctctccctccttcacgccgatgcctggcacatcatctggagttccctaggacacagtgcagcctcagcaatgtggaggatccctgccccctggcaggggcccccatgtggcaccctggtccccttttcagggtcttcatgcagccagggcgagttggcaccaggctcagtcaaggtgggccagagctgttggccgcagggccgccgtagccaggaggagttgggagagatcctcgccggctggcaccagagaagaatacaccccgaggtgtgcgctccatcactgatgtctgtgccgtggctctgcctctgaccagatggccccagcatacttgccaaagagtgaagaagcccaaggggcttgcacagcttttgtcacttgtgataccatggtgagtggagtggttgagctgagtatagtgcttagctgctctaagcctcagcctgctcatctgtagaatgtgaccatgatggcatctaccagtagagtcgtcatgggggattgagtgagagcatgtgtgtgatcacatggtcagtgctcagccggtcataggcattattatcatggcagaaactgggcttccttggaatatcctccatgagcagaggtcctgaacccaggccacgattcagatccttcttgcctcactcctggcacagcaggtggcccctgccaagctgggacgcctccgtgtagcagctggagaccaagcagcaattagattttcacaggctcccaccgagcttgggcatttggctccgctggagtcattcccctggctttttcagggcctcaccaaggcagagcgtcgggtgtcaccagaccagcagtggtgccaattaaaatgagtaagcatccagcatgctgggcgagagccttgcagccgagccttggagctttcacttcctcagccctccacatcttcatgggggggatcctgtctgttgcctcaggccccctgccatgagatgccatctcttcccgtccccctttcccgcacacaagacgctgccgctctaaatggcagtcgtggcagctgggtgcaggctgaagcacctgccactctcctccccactcgcctgggggagggctgagttcacgtttcctctgagagcgcttcatgagccagaaccgtgaacttctcagcttccccatcggggaggcaatatgggagggcttggatggctcacagcagcgtgccgctgggggcatcaggttgcagtgccctctgcggggaggtttcaaatgacagcaaggtagcccaggaacaaacctggagtgacgtcaatcttgagacagcccccacgccgccttcctgctccaggagccctgggtggctctccattcttgcccttggctagagtgaatcctctggttcggacatcctctgactgtcacccttctccccgcagtcaggtatgcctggggagaggatgtgcctgggtcagggtatgtgcagtcataatcatggcctgtgggtgttgagccctcgccgtgtgtcaggcggtatccaaagcacttttgtgctgctatcatttggtcctccctcccagcagatttggggggccgttactttcaatatcatctcaaagaagaggaaacggaggctctcagaggttgaaacttatccaaggtcacaaagacactttgacttcctttgaacccatgtctagtgactccagaaccagtctcttacctagtatgcccccctccgtgaggtagagctctgtggaagaggtagcattttaggctgaatttctttgtttcccaaaaggaagttggtttctatctttatcctttttttaaattaaacttttatttcctccaaggcaattattctaaatggagttccatacctagagctccctttcatattgtaaaaatagcacaactgatggcgtttcatggtgaagctgtgttggatcatcccagagaagctccgagacagggcaagtgaacaccagaccacaaaggacagctacagtgtcaccatctgtggaaactaggcttttcccccatgcacgccttttcctgattcttcctctgcatagagacatttggctactttttccatcatggtggttagaacaagaaaatttgggcggaaaatgggagttctcaggagccaagatttgggcctgggaaaggaaggatgaagaggagcagtttggagcggggcatgaggttagactctcaaggccaggtgggcttgctgagggcagtgatcctctgaggttgttgactcccagtggcaggtgaccccttatcaggacttgcctggtagaagtccctggactgagccagataactaaattgggaccattggtgcttgtgttgccttttgtaccgggtaccctttacgccttgtttgctttttgttggagatatttatctccttgtaaaaagtgcagttctttccctaccccagtcatgaggctctggctcagaggaggtacaagattgtagcaaaaaatttgagagctgggccaccctggggcctgccggaccaggggcatactggggccagtgtgcactctctgaagggacaactgtgatttattctggctaatcattgtcgtgtaggatcacaggctgattgctagcacatttgccagtttttcaaaagaaattagaacctatatttttaatcaaaagtcttttgatttgtaaatagtggcaaccaattcatatatgtcttcaatgtatagtgaaatctggtcagtaggctgcccctgctctctctgacgtagaacataccgattcaccctttgttttctgttcagagcagactacttcaaattaaggaaaagagtacaaaaccaacaacaaactctccatggcccttgaggttatcttcctcttccagtggcttccagtgggaatcagaacaggtcaggcagtctcctctttgccactaaatgctttgcccaaagaaagaccagatttcatttggctttgggatcaaagctggggctggagggtggaggtgtcaagccaggccaggcaaagggagatttgaagccagagcaggtgggcgcatctcccaggaaaccctgcatcattctttcctggtgattctttccttctttgttatggttcacatgagtctatggagtgctcattctacattctccgttcttatcttcatcctatgcaactttagaccgctactgttttttaaaagtgatttgatttgggctgtaacctttttttattgttgttagctttgactttgaaatgtgtaataaagattcaagtgagcattagaagtttttttaaaagtagtggtttaaaaaaaaaaaaaagaaaaaagtgatttaatagctggtcttcttttttccttaaatcgtcactttcttgtcaactgaaaaactaagtcgagttactaaaatggccgcacatttaggacttagaacagctgccctggaagttagaagaagtgcgtcaagtatagttacagcttggtctggttggcagtgagatgagtatagaacatgctgcttttgtggtgtataactctagaagggtttaggggaggtggacatggcttcccaagaaggtggaagatgggggcaggaggagatggcgtgcttcctcttggtgaggggttggggtagcatccagattggctttagagatcggattaagcttgagtgtgctgagtgtctaaggagatgaacaggaagtgaaagattctcccagaagaaaggaataggggaggaaaggtatacatgtgctggagtgggtggcatctgagtcagagggttggggagaaaggttagatccaaatcttgagggtctccttgcctgcactcctagagccatactgaagaggagctggaccttcatcctggggtggcggaaaagccccgggcactttaagcaggggaatgaccattgtttttcagggtagtgtctgaacattcattcatgctgccctggcaagagcagttggcaatgatggcaagaccgggcagtgtggaggtggcccagggacacggggtgcctactgtgttttgcctgaactgtgttttaagaggctgcataaccaagcagttgctgtgcacgtacagcttggcatctgagtctcccaccccccggcaccccatgtttgttacctgcctggtgcctgtaggcatttgagtttgtagcccctggttgaattctgacggtacagccctttggctggacaccatgcagctcagccaggggagtagcagaagatcaactatggacaggtgtgacttaggaagaggtggagtttggggtgctggggagagggaccgaacatcccagggaggggaaatggcataggctgaagtaaggaggggggttgcagtgagtcgagattgtcactgcactccagcctgcctgggtgacagagcaagaccctgtctcaaaaagaaaaaaaaaaaaagaagtaggaactcttctgagacccacaccctggacggggccagagactagcatgctgggggcagattggatttgggtgtggttacatgcactctggggtcagacccactgagtttgaatccagccctgacttctcctgctgggactttgggcagatgatgtaacctctctaagctttgatttcctcatccgtaaaatgacactaatattagtattaccttttaggactgttctgaggtttatacaagatagcatgcctcacacaactagcacagtgcctggcttatacagaatgagcattgggtggatgtcagccattataattagggtcaggggtcagagcaggcatatctgttttacagagtgcctaaaatgctgatggcaggagtttggacctggttgagttgggcatgggagctgctaaatgtgtttgggccagaaagcaagtgatgacagagcatcttcctgctgacatcttgccagctcgggatgctgtctctagccaacttgataagccctgagcttagaaaccctggggtgggtcagccctgaataggggttacttttccctctggagattgagaggtggatggagaggaaactgccaggctattctgcagtagtaggagccggatttggcatttttctctctgtgtctgtctccctgaccagtcactgaacttccccaggtcccagaagctcagctcagtagctcagttcctacttcttttttttttttcttgagttagagtcttgctctgttgcccaggctgcagtgcagtggcacagtctcggctcactgcaacctccgccttccgggttcaagcaattctagtgccccagcctccccagtagctgggattacaggtgtgcaccaccgcaccctgttaatttttttgtatttttagtagagacggggtttcaccacattggccaggctggtctcaaactcctgacctcaagtgatctgcccacctcggcctcccaaggtgctgggattacaggcgtgagccaccatgcctggccagtccctacttcttaagaggcactcaggaagcatctggacaatgctgaacagatgaggactttcataggctcacctggcctggggtctggcccaggagggtgctctttgatgagaaacatcccagcggtattgggcatggaggaagcagctagtgaaagaaaagcagagctgatgggaggaagatgtttgactgtgcccagccctgccacatatctcccactttgccctccctaatcccaccacacccagctcttaggatcagaaagtacgttgaagttccagggccactctcctgaataaaaagtgtggcttctgtttccggcagataagttcctgctttgttccagtgcactgacacagtcccctgaacaacccatcttgggttgatcaggaagttcttagtctgttcagatggcagcctacctctcattttatcatcctccttcacgataaagccctgatgttctgcctttcccacttagtggagaaacctatcctcatagccacacttccggtattgaggaattggcatcttggaatacagcttgggtatttggatgacaaattattaaaaatattctgatctctttgcccacatattttagctgtagaagcaagcagagagcatcatgttactgcagcagcagtgccgcttattttttttccttaaaaaacatgatttaggggtcctagttttggtggcttcctgcttcagcagcatttggaagacttgcagatatgtcctgtgagtgccacgtgggtgtgacccctgctccttggcctggcaacaatccagtagctgtatattagagtgtcctttttgctaccttaaatgaccaagtcttccccagagccattcttgctatctcttgctatccacctgcctcggcctcccaaagtgctgagattacaggcatgagccaccactcctggcccttcctgtttatttagctgaaggccttgagagccttccctaacctttgaggatagtggttgtgtttccacagtctctcattctccaggtatgctgtttatacctctttctctgctcttcacggcacagagacccactcgctccccagcaccgggatgtgatcgatttgatgattgaatcagagtttgctttgtgccatgatggattgtgagaaaatggagttttgatgaattaggtaatttaaaatacgggtgggagccaggcgcagtggttcaccctgtaatcttagcactttgggagaccaaggcgagaggatcacttgaggccaggaatttgagaccagcttggacaacatagtgagaccccatttctaaaaagaagttaaaaaaagttagccaggtgtggtggtgcacacctgtagtctcagctccttgagaggctgaggcatgaggattgcttgagcccaggagtctgagactgcagtgagccatgatcacactactgcactcgagcctgggcatagagtaagaccctgtctctagaaatacatatatacatatatatttcaaaataaaatataggtgggagggctaagtttggcaaagaatcctttcgtagtatgaataatacccattctgttcatccagcatcaagcagggttttgtgaatcctgctccccccagctagggcttacctggtttgtgagtttctttcttgtgtctccctgatgcctgtttgagatgactgggcagggcagggcaggaaggtagaggcctaacccagtgtaatgcctgggtgttaatggctgttgttttaggtgctgatgttttacacagctgtgcctctttctggtagtacaagttttgcaaaggcagggatcatgtctcttctacacatattctgggcacaataatagacataatagaagttgcatatctgggagtgagtcaccggtttccaaaaacatccagggtcccaggtgactgtcacagctaaaccagcccctggagccactggagggtgacaaggagactcattcacatgtgatcagaccagaagtagcccagcagggcatggcgttgctgcccctaggaacagcctactttttggatgtttgggtctctgcttccagcttcgaactccccaggagcccacacatgtccaatcccaaccttccttccatctaagcttccccgtcgccgccctaccatttgtagactgcctgtctctcttttttatctctctttttgttagattgggattttattatttttttttcctaattctttcagcacttgctgaaaaccagcttgggcagagcgacctgtgcttagtgctggctaatggcttggagctgctccaagctgccggctgcgctgcctttcacttgtgggtggtcgtcgacaagcatgatgtcttctctctgtgactctcgaggggcctctcttcttgcgggctcggctgttcacacttggctggcctgcctggttgtttggaattgcagtttttactgcacagcctcgagccagtctggtagcttcaacagggcgcagattttatgagtgctaaagtccactcagcctccagcctagttggcccatttgattttgttgcatgttgttttttgctatttcctcttggagaccagacgccgtccagagtgtatggggacacagaagtctataaatggaggtggcttgggagattcttaggctgtgatgaatgtgtgtctattgaggagtgatggtacctgctggtgtctacaacggttgaacattttctgagtgtcgcgcagtctgcaaaggatggggttgaatttctggcatcgtctcttgatagctgaacatccttgaatgaggagctgagcttgttttttcctaagttgcagtttcttcattgtaaaatcagtatatgattgtctacagtcagagtctcaacccatgagtaggtaattgaaggactttctgcattgaggatgtgaacctttcctccgttctcacattcttccggttcctcttaagggatgtgagttggtagtttgcattttctgaagtgttgtagcagttgagggacagtagttaacttccttgactaccattcctgttgtgttgcagggagaattaaaaatcaagcagctccatctcctgcccattcttttttttttttttttttggagacagagtctcactcttgcccaggctggagtgcagaggcacaatttcggctcactgcaacctcggcttcccaggttcaagtgattctcctgcctcagcttcccgagtagctgggattacaggcatctgccatcatgcctggctaatttttgtatttttgtagagatggggtttcaccatgttggccaggctggtcttgaacttctgacctcaggtgaactgctcaccttggtgagcctccctaagtgctgggataacaggcatgagccaccgctcctggccactcctgctcattctttagggtggcttcttgatttccattgtattttcctttattcacaatgctccttttgggctgccttccccaccaacagaaagggaaactgaagcaaaaggaagggaaggccgaaagcagtgcctggccattgactgcataggaattcagggccctggagaagtggcaggcctaggccatcaagctctctgtgggatgtagctgtcctccagctgtcacttccccaatgtgcccatgcttgcttcatggccgcctcacctcttgttactcttcttctgaacaaagccacctgcagcagcagcagcagcagatccaggtgctggggcgtggccagtgttcatggaagccgggtccagccagcccccaggtgtttctggttaaggactagagcggacttttgatctgtgctgagtggatgccatcagctgacacatcagtagccttcatgcagcttgagtctcaagccaaacttgttcttccgagcactggctttctgctgacctcttgcaggggaaccagagcgcaccagtgcacagtgaaaaatgcctttaatctccatttgctcttctccggctcccttccttgtccctgggtgtttcacaattagcatttcagatgcttccaagtgaatatggaacagatgttcgcacaggtgctgtactcttcactgggtaaacagtggcgtttgcgtgcctctgcgtgtgtgtgtgtgtgtgtgtgtgtgtgtgtgtgtgcgtgtgtgtgtatgagacagcaggaagcatagggcctttacaaatgttttttaaagcgtctaaaacactttacacatgacgggtactcaataaatactttgtgagtgagtgagcagtggcagggaaagccctttgtttcataataaacccagtggcatgggagcaggaagtacaattccaagttgggtcttgaaattcatggactaaagaagaagtcatgtcctgcctcaccaagaaattacccgtggacatctggcaaaccggggggcatgctgtagggacaagacacagttctccatctcaggaaggaggattagacaataaaaatgaccgtggcggcccctggcaatttaatctgcctcacgaatgtgagctggccacggctgtgctgggaaaaggaacttgcggttttgcccatgcagaatgtttgcagatgggttagggagttagccaggactgacctccttggctgtgtttttccaagtagcacacctgatcaggttgctccacaccattagtccccagtggctcaagtccaggccctcagcatggctttccgcctggcctacacccccagccttgcggaaacagtggagggaaaggtgagggcttggctgcccgtcgtttcctccctctgtgaccttgggcaagtcactcagcttctctgggccttagtttcaccctctgtaaactggggataataatcaagtcttgtttgtagggcctttgtacacttagaagaattaattaacgtaaagccctttcaaccgtgtctggtgtgtggtaagtactgaatgcgaatcgtggctgttacctttgcccactgcgtcatcctggtcactggtctctggcactttaagcttcagaattacagaaccctctgcagtttctcagacgtgccctgctgttgaagtctctgtgctctctgaatgactatccttgtttctagaatgtgccactcaccccatccccatccaccctgtgaatacctcctcatccctcatgcttgaaatgccagccctggcattcccctgagttcctccctgccactggccaccagcccccacggagggcccttgtcatcccagcccattttagatctcagtgcaccagagtcacgatccttcattacctactgatggagagttccatgagggcgagggccatggtttcaccttttctaatccaacacctagcacaatgcctggtatacagtaagtgctgaataaatgtctcctcaaattaaaccatatgtgtttgcatgtaggtggtcagtcttttaaaactacatctggccgggtgcggtgcctcacacctgtaatcccagcattttgggaggctgaggtgggtggatcacttgatgtcagaagttcaagaccagcctagccaacatggtgaaaccccatctctactaaaaatacaaaaattagccaggcctgatggcgggcgcctgtattcccagctatttgggagactgaggcacaagaatcacttgaacccgggagatggaggttgcagtgagccaagatcgtgccattgcactttagcctggatgacagagtgggaccctgtctcaaaaaaaaaaaaatactacatcctccctttttctccccaaaattatcatgtgatttattaagactagaggccaggcacagactcatgcctgtaatcccactccatgggaaagcatggctcatccctataatcccagcactttgggaggccgaggtgggtggatcacctgaggtcaggattttgagaccagcctggccaactttgtgaaccctgtctctactaaaaatacaaaaaattagctgggtgtggtggcaggcacctataatcccagctactgaggaggctgaggcaggagaatcacttgaacttgagaggtggaggttgcagtgagccaagattgtgccactgcactccagcctgagcaacaagagtgagactccatctcaaaaataaataaataaaaataaaaataaaataaaaaaagtttagaaaggtgttctcaaggcaatgtttgcaaccttaggatgtctgttgtgtgttcctcatgtggacggttaggaagtgggcatctcaggctgcagtcactgcccccgatgattttgatgtgctcatttcccagcccctctccctgcctacattctcctctgtcccctaactcccaaaagcctgtttctgatctgcacccctcctgcctttccatgtctttcacactccatttatagaactgctctccgcttccttgccccatcccctgccagttccaggctccctgggcctggcctcatggatgacagtgaacccctctggacttggccacttaggtccctttcaggtggccggaaacagagttagaggagacacagggcattatcctgaccactttcacaccagagtccctccctctagaacagggcttgacccgtggtactgccccgttgagcctttctttttccctttcctcctttggcttaagcctttggcaggacagattttgggctggaggccagcaattcaactgggagggctctgtgccagttcttgcctttctgaaggttggtacatttgcccagggctctgcttgggtttggagcctttactaacgtgtgtcaataatgcgggtccaccttccataccatcttgcaaccaattatcagaaagagaaggcctgagcagggggatgtgcattttgctttctttcggcgtagcatctcatgctagatttttatctgggggcctttgaagagccagccggcacagaagcatggtggcaacgctgtgcctggaaaactcatcagtgtcactctggtttattttcctctcctctttgagctctttcccatggtgtggggctctcagtgacaactggcaagcggcggggcggttgctcgttgtcattctggtaggcgctggtttccggagggctccgagtgctttgtgagtattcgcatttgtttctgagatgctgggagcacggttggcactggtcccagtttctggatgaagaaactgaggctctggggattaagatcgtgaactgtggggagtggaggaggcacagctggagtgaacttgggtgtccagggttctgtttcgtctcacagaggatgtgcgagggtgtatgtgtgcatttgagaatgtgtgaggttgtgtgtgtttaagaaaatgagaatgaggctgggcacagtggctcatgcctgtaatcccaacactttgagaggctgagctgggtggatgacttgagcccaggagttcaagaccagactggggaacatggtgatgaaaccctgtctctacaaaaaaatacaaaaaattagcagggcatggcaatccatgcctgtagtcccagctacttgggaggctgaggtgggaggattgcttgaacccaggagataaaggctgcagtgagccatgatcgcaccactgcactccagcctgggcaacagagtgagaccctgtctccaaaaaaagaaagaaagaaaataaaaaggagagaggttagaaaagggggctgggcgcggtggctcacgcctgtaatcccagcactttgggaggccgaggcgggcggatcacgaggtcaggagatcgagaccatcctggctaacacggtgaaaccccgtctctactaaaaaaaaatacaaaaaattagccgggcgtggtagcgggcgcctgtagtcccagctactcgggaggctgaggcaggagaatggcgtgagcccgggaggcggagcttgcagtgagccgagatcgcgccactgcactccagcctgggcgacagagcaagactccgtctcaaaaaaaaaaaaaaaaaaaaagaaaagaaaaggggtaggcccctcagtatcacccttcctgagaacagtcattctctgctttttctgatcagagctccctcccaggaggggcccttttatccaaagcgatctctggcccaggcaccaaagaaaggccccagtggtttacgcagccgggctgccccctgcgcctgctgggtgaggggtgggtcgtggaagccttcccctcctgcctgttctttcctgctcctccccagtgcatctttatagctggcatatggaaactgtttctatttatctggcaccaccaggacgctgctgcatgctgtgctccagcaaacagaaaccttggattccctgcagggtcatttccgatgtggcgtgcaaagcagccagctgtttcgagggagcgtctgggccctgtgacatcagcatgtgggagtgttaccgtgtgtgcaaacaggtcattctggtttgtctgcctgtcctctgcaccgggatgtctctcctgcttcgagtcagagtttgcgttgttgttttgtattctcatgcctgtcagttcagctgtttctttccactccttcccgtcctctgagtggttttacgttctctcctccgggctgattgccaggattcagggagggaggttaaggggctggtgccacataaatctttagtggccaaagtctgcaggcctgcaaggctgcgcctgtcctcttggtctggttttcccaagagagctgtctgcccagggcaccagaagggcaggacaaaatgtttcccttcgtggaactttccccagaggcccagaacagagatgcagaatacagtcttcctggttgccaagagtgttcctggtcagcctcctctggtcctttctgaaacctgcatgtggagcttgctggctgtgggagccagggagactgcaaatcctgcccgcctgcccacgctgctgctcatctccctccctcctatgtccggcccggttgcctcccaggaaaggtaaacatgcagaggcaagggctagctgccggccttctggaggaggcagtggagggccagcttcctgacagccccgtggtgaggtcgtcctgtcttctcaagctgggcccctgcgacgtgccccagttcctgcctttccagctggcctggaagaacccgttctgctctgggcaagaacagtgccaaggtcagaggccaaaggtgttgcttcttccgtggtccgtaatgagcaccagttggagagggccagccccggcacacagaggaaggggctggactggggtgatgcggggtgagcctgcccggtcactttgttggctaggatgcttcctgtgctttctgtgcctggtactccaaagatgcgagtgccagtcattgacctggaggttctgcccagggtctgtgggcagtaggaggtcagaacaaggcaccaggccactagagcaggtgggtgtaaacaactgttggcattcgaggctgcccaggtagaggtcctggagtgaacccagtgggcacgatgggcttcagtggggcagagtgtcctctagcttcacacacagtgctgatgactcaggccagctgggggcccctgcacatgctcttagttcccacgtggagggtattcattttgaggaagctgggcctgccgggattggttccccagcaagcaggggctcattctcccagaaaccactccatctgcactcacaccctgactcaccaggctcacatcctgacttaccaggacttggctatcagcctgtcccctttgatctgccccttctgccccctgccttcccgctttctgggcctgaaatgtcctcctcagaaagctgccgagccttcgagcataccttctgcgggaacaacgcagcactcggagtgggagcatatccattgtcccttcagccacttctgcaacctcttaagtggggaagagggttagacagcagacagggcaggggattagcactccacgaggtggcccagccccacccggcccctgccgtgccctcgtcttggctggtacagctgcactgctgcgtgaaggccacgtacaaaaggaacagaatggaactgtggctcctcgccttccatttgcaccctttctataatccctaaatatgtagcccagttgctcgtgccttgatgtgaaggaggccctttgcgatcacctgtggctttcttgaaaagtccctgagtggccagtgtcaccccaggccttccatccctctctccgtgtggagaaatgagcgatcatgctttgccttttgggaccacatgagcactccaagtcctgttttctgaggttgagtggttagaagcacagaacaaagtccgtcctgggagggggagaattcgctgttctttcaccttagctcttgagtcttattctcccctttccctttcaaggttctaccctgaattactcttaacacaaaacagcccctcttccgcagatccttaaaagaaaggtttttacaaatacaaacttaccacatcacaccccttcctaacaccctttggcgctgcccactgcaccccgggtggagcccgccctcttgcccgaggcctgccaggccccacggatggctccttgttctccgccctccaggccctggccatccttaagtgccccacgggggtgtgtggaatcttcagggctagcaagaccttctatttcacttcagttcagacatgtttgctgaccacttacacattgtgtacaacgctgttctggggcctgggaacaccacagtgaccaaaacaaaagtccctgccctcttggagctgacattccaggcggggaaacaggcccacgattaaacagataccctgtcaggtggtgacagccccaggaggaagcctcagcgctttgaggggacggagtgatgtggtctcaccttgtaggggaggccaagggtagcctctgataaaatgtttgtggaaactggaaggtgtgacaaagcagccaaagatcggggaggcagaggccccaaggcggagtgttccaggcacgtttcagaacaacaaggaggttagcatggcggcagcgaggggcaggcaggacgaggtgacttggagaggttgcgggtcaggttccacgagaccctctgatcaagggaggctggggcacgtttggggcagaggagtgataccatttggcttagtgttctttaggatttttgttatattaaacaaaaaagttacctaaaaacacacacacgcacacacacgatagaggatttctctgactggtgtcaagaataggccacagagggaagaacagacagtaggaagacagagaagggattgtgctagtctaggggagagctgttttgggccacagtgtggcaggggagctggtgagagcgaggtcttgtgggccaggtgcagcacctatttgtgggcctttcagctgattgtgggagaggaggagcctcctgattcctgaggcccctcctgccccaagattctctgttggtgcagctgttccattcagcaccggtatggccaggaaaatgtggtctcagtcaccccagggccttctcctgcccccagtcacttgtggcccataagagtgcatcccaagagccctggccaatggagggaccgtctgtgcgagaaccggccacgtgttctctttgatttgggtcatagatgctaagcctgtttcacagctgtatgctgtccatcagaagagacagtggccggcgtaccgcacggcagacagtgggtcagcggagccaccccctacatttctctagtgagaggtgagtggcagatgattgtatgaaggaaagctctggatggggagccaggaagcctggatgctagacctggcgctgtaaccaattggccctataccatggggacatcacgttccctgccctcagtttccccatctctaaaagctgggcaatgaattaggtggtctctaggatctgctcctgacctgacagtcgttgcttctaagacaacagcagaaagtgcctacaattcacgcaggagagctacgcagcagcgcttcccatactctgcagcagaggacctctacttccataaaacacaacaaaaacgaagtactaggagaaggaagtgccgcacagtgccacctgcggtgatggcctctacacgctggctctggttcctggatggttctcatccccgaccatggcacaccattaatggactgtgcagaccatgtggaatgacaccgcccacagttagagtggttccaagcacagacctcatttattctccagctccgtcactttctaaatgtgggagcccccggacaagctgaccaatctctgtgcttctgtcccatcacccttcttctgaaatggggatgctgatggtatccacctcctaaggttgatgcgaggatgaagttatttcacctataaagtgctgagactagtgcctgcctcacagaatttgttccgcaagtgtttgtgtgtgttattttagcggaagctgagctgctgagattggggctagatttgggggctgcagttaatcgggaggtgggagagggacgcgtgtgctaaaaaaagatgccattgccctccctaagcagcaaggaagtgtttgtggaaggcttttggcgccagcaggatctaggcagctgggccctgctcagattgtggcactgccagctctctggggcagctctgcagtttggagctgcttctgaagccatctgcacccacctgcctgctccccttgaagtcaccatatacctgtaaacatgtagatgccacaagttgcaggggcagctagttcagctgctcactggctggtgaacctcttctctattgaaatgtccataaccaatagctgtggagcctctttttgaggccacgtggtgatggggtactcactgcctctgtggacaggtgcccctggagggcaagggctgcctagttcctacagtccccactaagggcccagcacctaggagctgaccttgggcagggacaaccctgggaatgtctgctaaacaaaggagtagatgaacaggccagttgttggtcttagaatattttcattaagaattatttcccggccaggcgcagtggctcacgcctgtaatcccagcactttgggaggccaaggcagttggatcacttgaggtcaggagtttgagaccagcctggccaacatggtaaaaccccgtctcttccaaaaaatacaaaaattagccgggtgtgttggtgcacgcctgtgtgttggtgcatgcccagctactcaggaggctgaagcacaagaattgcttgaacctgagaagtagaggttgtagtgagatgagattgcactgctgtactccagcctgggcgacagagcaactctgtctcaaaaaaaaaagaaaaaatacataaaaattaaaaaataaaaatagaagaattctttccggccaggtgcagtggctcacacctgtaatcctagaactctgggagggcgaggcaggtggattgcttgagcctaggagtttgagaccaccctgatcaacatggcaagaccccatctctacaaaaaaaaaaaattagctgggcatggtggcacatgcctatagtcccagctactctggaggcttaggtgggaggatggcttgagcctaagaggttgaggctgcagtgagccatgatagtgccactgcactacagcctgggctcaataaaaagaattatttccaaatggaggccaaggggagaggatcgcctgagtccaggaatttgagtctagcttgggcaacatagtgagaccctgtctctaaaactaaagccctctgtgccggtccctcatttctagttattacaaagccctttcagatctagcagaaacaccctgtgaagtccattcccgagtcctcgttccaccattggcaacactgctacgtgtctgccctcacccaccagccatgtgtggtctgtggccacggggcgcatgttttgtctctgtgttgctcgctgtcccgtgggggggctccagccagctccctgcatccttggtgctccatggtcacctgttgccttcggcggccagcccgtgaggcccaggccacagccctcctgcctgttaggagtttggtacaggaatagggaaaagggagagggatgtagcagcagccagctctaaagatcctctcccattgttccaaggagtcagtctttttctgcaggcaagccatggaaggattttaagtagtggagtgacaccgtgagacttcggccttacccgattgattcatcctgcctcaaggcgtctgggtcaggtggtcaggaaaggcctggacagtgagagtgagtccaggttgctgcaggcttttaggtgaaagacaagaggccccaaagacctcttcagtagagatgagagggacgagacctttccagacctggtgagttacaggccatgaggagtgaaaaagaagatcgggttaagatttctggctctgaggactgtcctcccagggcagccagaagcttggtccttcctgtctcagtggtccttgtggatttcagttgaatggaactgtcctttgtggctttgaagggttatgtatcggggaagagggactatctctcacccaaaccaggacacctaaagattagcaaaggttacctgctcccaggagaaacctgttgctgggagtgtcattgaggcttgttagcaaggaatggcctgcaccgtgggacgcgtcgggccacctggtcccagggatgctgcggtataagtggtaagggataggggagcttttgaggaggaccagacgttgtctccccaccaggaacgggctgagagagcctcctgagcacaaggaggaagctcctgtcaattcgaggagacccctgtgtgagaagaagggcaggaaggctccaaagggggtcttcacggcagccgctcacatagacactcgtgtctagtgtcaagtgggagggtggcactaatggctgctgccatctgtgccagctagcagctgcctgctccgctccatcattgttatttatgttacctaggactcttctgtgttgccggtgccagcccctgctggggcatgtggaggtcgtggaggacagggcatgggctcacgaggacgcagctccatccagctgcttgcctgtggctttttctgctcaggagtcacgttttggctcaggcttccctgatccacatgagcagattgaggacggtggtttgaccttcttctgtctctgcctagggcttagttctttcagaaatgagcattgggatcagggtagggaatgctactctgttgctattgggaagagaagggtcagaattaccaagttcaaaccgcacccagatgtcccacctcctacttgcaactccactgtagtgatggaaatgctagtgtatttttggtccttttggcactaactaccctgtcacgcttttggagtttctgattcttgagaggcaagtagtctaccgattgggagctaggcagcctagtttgggatcccagcccctcttctcactaggagcatgacccggggaggttacttagcttctctgcaccttagtttcctcaagtctgaggtgggaatagtaatattacctacttgggagggctgttgtaagaactaagtgggttaacagatagatacaatgtatttagataggtatcagttatctgttgataataatattacctacttggcaggattgttgtaagaactaagtaggttaatagatacaatgtatttagataggtgtcagttatctgttgcccttgtatcaaatcactgccccaacatagtgccttaagatagcaacatttattttgcttgagtttgcagtttgagcagggcttggtggagttgtctttttgctgttgtacgtaacatctgtttggacagcttaactggggctggaggatctatttttgagatggctccttgatgtggcagagaagttggtgctaccccttggctgggtgctcagctgggctgtgaactggagccttgagtcttctgtctgcaccagctgcttgggcttccttacaaaatggttgctcggttccacaagtaagtgccccaagagaataaggtgaaagtatttttataacctcagaagtcatgaggttccctgttctctgttagtcacagcagtcataaaggctcacctgatttcaagaggaagaaacacagcttctacctgtgtgtggagaagcagcaaggttccagaagagcatggaaggtgaaagataatgcggtggccatttatggaaaataaaatctgccgcaggataggttttggcatacagtaaacctcaacaaatgtttgctaccagtagtttaaaatcatcatctgcattcctcatccccgactcctcttccttagagagatggtagtatagtgcagtggttaagtgcatctgctctggtggcaagctgctaggggccaaagcctggctcagcccttatagctgtgtgatcttggacagattgtttagcctcttggcaaatttcttgaaagataaacaaaccaccaaagctttctcaataagaatagaaaacctgagtggccctatatgtactgaagaaggttaatatgtaataaaaactttcccagaaagaaaacttcaggcccagatagctttcctggtgaacggtatacattagggaagaaataataccaatttgacacaaattcttccagaaaattgaaaaggaggaaatattttctagcccattttatgaggccagcattaccttgatacccaaaccagcaaagacctcacaaggaaagaaacctcggaccaacattctacacggatgtagatgcaaaaaatttaaacaattttgcaaatgcaataatatataaaaaggataatacatcatgactagggggacttagctcaggaatgcagggttggtttaatgttcaaaaatcaatcattgtaattcactatattaaccaaaggaaaaagaaaaaccatatacaggttgaatatcccttatccaaaatgcttgggtccagaagtatttccgatttttaatttttttcagattttggagtatttgcgttatacttactggttgagtatttctaacctgaatatccagaatgctccagtgaacgttttctttgagtgtcatgttggtgctcaaaaagtttggaattttggagcatttggatttcagattttcggattagggattctcaagctgaaatcatctcgaagtagacacagaaagtgtttgacaaaatgcaacacccattcatggtaagatctcacaacaaactaggcacagaaaggaatttcctcagactgataaaggatatctacgagaaacttctagcttacatcatactgagtggtgaaaaactgaatgcttttcccctaagatcaggaatgagacaaagatatcccttctcatcatttttattcagtattgtaagggagcttctaaacagtgccataaggcaagaaaaacgaaaggcatctggattagaaaggaagaaataaaactgtccttattctcagacaacatgatcttctgtatagaaacgcccatgacatatttacaaaagaggccactagaccttttaagtgagtttatcaaggttgcaggctagaaggccaacatataaaaatcagctgtatttctgtatcctaacaacaaacaattggaaattgagattaaaaggcaacttcatttgcaacagcatcggaaatataaaagacttagtgataaatctaagaaaagatgtgtcaggtctgtatactgaaagctgtaaaatattactaagaaaatttaaaaagatcaaaataaactgacagatataccatattcatgggtttttaagagtctccccaatagatctgacataatttcaatcaaatcccagcagacttttttttttaagtagaaattgactaattattattattaattaattttttttttttgagacagagtctcagtctgtaagccaagctggagtgcagtggcgcaatctcagctcaccgcaacctccacctcctgggctcaagtgagtctcatgcctcagcctcctgagtagctgggactacaggcgcatgccaccatgcccggctaattttttgtattttagtagagacgggcggggtttcactatgttgcccagggtggtctcgaactcctaagctcaggtgatccacctgccttggcctccctaagtgctaggattacaggcatgagccactgtgcctggcctgttattattattgagacaggatcttgctctgtcacccaggctggagtgcagtagctatgatcatagctcactctagccttgacctctcaagctcaagccatcctcccacctcagcctcctgagtagctgggactacaggtgcaagccaccatgcccagctattttttatactttttgttatgaggtcatagtatgttacccagactggtcttcaactcctgacctgaagcgatccatccacctcagcctcccaaagtgctgggattataggcacatgccactgtgcttgcctaatttttttacttaaaaaaaattttttttttgtagagatagggtctcactatattccccaggctaggtttctattgattgattgattgattggactcttggattagggacaaagaaattgactaattctaaagttcatatggaagttcaaatttttttactttttaaattttttttttttgtagaggtagggtctcactatattccccaggctgggtatgcatgtatgtatgtatttatttatttggactcctggattagggacaaagaaattgactaattctaaagtttatatggaagttcagaagaactgggctagccaaaacaactttgaaaaaaatatgaacaaagttggaggattaacactgcctgattttaagacttataaagcctcagtaaccaagacatcgaggtattgatgtgaaatctttgtttttatttttcttttttaaagacagtgtctttctgtgttgtccaggctggcttgaactactgggctaaggtgatcctctcacctcagcctcctaggcactgggactacaggcttacaccactgtgccttgatgtggaatcttttttattttaatttttttgtagagacaagatctcactgcgttgcccaggttaatcttgaactcttgggctcaagtgatcctccccaccttagcctgatgtgaaatctttatgaccaggggttaggcaaagatttcttagatatgatatcaaaagtattaatccataaaaagaataaatggataagttggccttcatcaaaatttgtaaaacttctgttttagtgacctttgaaaggcactgttagaaaagaatgagaagacaaaccacaaatgggaaaatatttgcaaatcatcatgtatctgatagacttgtatccagagtgtataaaagagctctcaatttaataataaaaaaaaagaaaaaggtgaaagatctggacacttcaaagaagatagatggtaaataaacatatggaaagttgtgcaacattattgttaggaaaatgcaaatttcaagcatgaacatgaaaaacaatgatataccactacccatcttttgaaatgcttaaagttggccaggcgcagcagcccatgcctgtgatcccaacactttgggaggccgaggcgggcagatcacctgaggttcggaattcaaggccagcctggccaacatggtgaaacgtctctactaaaaatatttaaaaattagccaggcatggtggtgcgtgcctgtaatcccagctactcaggaggctgaggcaggaggatcacttgaacccaggaagtggaggttttagtgagctgagatggcaccactgcactccagcctgggcgacagagtgagaccgtctcaaaaaaaaaaaaaaatgcttaaaaagagcgagcatatcaacagttggtggagatgtggaggaactggaactctcatatactgctagtgagaatgtaaaatggtacaatcattttggaaaacagtttggcagttttgtaaaaagttaaacatgtgatctagctatttcacctctagctttaccaaaagaaacaaaaagtgtacatccacacaaagccctgaatgaatgttcatagcaactttgaaataacccaaaactagaaacaatcttagctgttcatcaacaggtgaatggataaactgtggtatatttattactcagcaaagaaacagaatgaactgttggtacacagtgcaatgtggatgagtttttaaataattattctgagtgaaagaatccaagcaaaaaaaaagactacatactgtattattccatttatataatacatcatgtaaatatatatattatatgtaataatagatgcagattcatctaatagtaacagaatgcagctcagtggttgcctgggcatggatgggcaaggaggcacgggagggttatggatatgttatcttgattgttgtgatgattttacagatatgcacgtaggtcaaaatgtatcaaactgtattcttaaaatatatactgtttattgtggcacaacttagcgaaactgtttttaaaaatgggtagggttggccaggcacgatggctcacatctataatcccagaactttgggaggcccaggcgggtggatcacttgaggtcaggagtttaagaccaacctggccaacatgctaaaccctgtctctactaaaaatacaaaaattagctgggcatggtgttaggcacctgtaatcccagctgctcgggaggctgaggtgggagaatcacttgaacctcggaagcagaggttacagtgagctgagatcacgccattgcattccagcctgggtgacagagtgagactccatctcaaaaaaaggaagaaagaaaaaacaagggtggagtggctgggcacagtggcccacacctgtaatctcaacactttgggaggccaaggcagaagaattgcttgattccaggagttcgagaccagcctgggcaacaaagggagactccacctctataaaaatacaaaaattagccaggcgtgatggtgcatgcctgtagtcctagctgctcaggaggctgaagtaggaggatctcttgaactcaagagtttaagactgcaatgagccatgcttgtgccgctgtactccattctgggtgacagagtgagatcttgtgtcttaaaaaaagcagggagctggggaagtaagttgcatgtggctggacctcattgctcatgactggcaattcaagatcagaaggaccttttgcaacccagcaggcctttgagccctgtcagtctcctgtcccttgcatggttgtaagccttacacatttgctttctgccaactgtgcaaatcccagtatcaaaacattagatttttttttttttttttgagacggagtcttgctctgtcccccaggctagagtagtgatgcgattttggctcactgcaacctccgcctcccaggttcaagtgattctcatgcctcagcctcctgagtagctgggattacaggcaccttccaccacgcctggctactttttgtatttttagtagagttgaggttttgtcatgttggccatgctggtcttgaactcctgatctcaggtgatccgtccaccttggcctcccaaagtgctgggattacaggcgtgagccaccgtgctcagcccaaaacattagattctttatcttccttcgggtggatcatttacaatgcagatttacagatttctctcagattcacttcttcccaatgaatgcgtcatttcttggtgccgttgtttactgtgtgtaaactactgaatttcaggattattgtgacaaacccaactcagactcaatgggatctgtttatcagcttggattttggaaattaaggggtagatttcaggcacagctggattccagaggtgcagctggtgttagtgttatctattggttattgttttgttgtctgctgacttccttctcaggcaagttttccccatgtggtggcagaggcagccgccagcaacaacagggaaagagcccctccttcctaattggcctgggaacagtttcaagttcagctgtcactggctggacttgggtcagcagctatgcctgaatgcccaagggagatgaggggcttattgccaggcccaggtcacctgcctgggaaccaggggtggagttggccagagccaaacaatgtggacagagagcaaggaggggatgttctacagagacagatggcccagtgttgctgggagaggagggcgtggctgtcagcagggaagagcaacagatggccctgcaccaggggacaaatccagttgtttttaatttttaactaagtaggatattaatatgcttccaaaagtcaaaggattcaaaaagggtctgtctaccctattccttatagcccttgtagggcgactgatttcattgacttctcatttttccttcctgtgtttcttttggtaaagataagtcgatgtatttatgttttcttgtttcctcccttttgtacacattagagagcatactatttgtactcttttgtacttgcttttttcacttatcaagagaaaggaaaacatttgtaaccagctgtgctaattcttgccattatcagtacacagcatggaggttgatttgaagatgacgggatgtccatgtgagcatatgaagggactgccaggcttttcttctgccaaacggtgtctttttgctcttaagcctgggtgccaagtgaatctctctcctcttccaatgcagatggcggcagctatgccatccacgactcccaggcccccagtctcagctctgggggtgagagttccccctccagccccgcacacaactgggagatgaattaccaagaggcagcaatctacctccaggtgagtatctccagtcaggccctggcagttgtctgcacctgttggtggggtggggcagccaagactctgttaggtgcccagaaattcagttccagcatcagttcatgctgctgctgctcgtgtgtgagcttcaggttcataagatgggctgacctgactgtgctcataggggaaaactgctgtgcaccagcttgtcttcagacccctgtttagggctgtgccaacccccacaatttccggagtctggccactcggccttccctgccaccctccctcttctcagggcacactgagaggccacgttctcaggagggaattctttacatactgaatgcggtagctttattcctgtttaacttgttgctgctttcctgtttgctattttaggaatttttttttttttgaaaaatatatttttggccaggcatggtcgctcatgcctgtaatcccagcactttgggaggccaaggcctgcagatcacttgagatcaggagttcgagatcagcctggccaacatagtgaaaccctgtctctactaaaaatacaaaaaattagctgggcgttggtgggcgcctgtaatcccagctactcgggaggctgagacaggagaatcgcatgagatggaggttgcagtgagccgagatcgcaccactgcacttcagcctgggtgacaatgcaagactctgtctccaaaacaaacaaaaaattttgtatttttgtgtgaaagtaatacatgcttattacaataaatttagatacaaagaggaatgaagaaacattcacctaaggcagtcactgtcaacattatttccttccaggtttaaaaaaaatgtattataagaataatatatctgttttccaaaaaagtcatatggtatgtgcaattttatagtctgcttttttttttcatagcataagctttttttttttttttttttttctttttttggagacagtctcactccatcacccaggctggagttgaattgcagtggcttgatctcggctcagtgcaacctctgcctcccgggttcaagcgattttcctgcctcagcctccggagtagctgggaccacaggcacgtgccaccatgcccggctaatttttgtatttttagtagagatggggtttcgccatgttggccaggctgatctcaaactcttgacctcaggtgatccgccgacctcagcctcccaaagtgctggggttacaggcatgagccaccacacctggctatttaaatagctttaaattatatcaggtaaattattctaatttacttaacctgataatcttgaatattttcccttattgtaaattatagtccaaggacaatctatacgtagcaccccccacccccttacatctaggattattttactaggaaagtaaaagaaatggaaattctaagaaatggaattaccgggtagaaggaatcaacaatttttagggccttgatgtttcagcatggaatcctctgcacaggaagtatttcctctttactgagggccccactggcggtgacattttaaccttaatcttgccaatcttgtcactatcagatttcagtttctggtttgcattgagtaagagcttggatgaggaaatagactttttcttaaatgcattcgaatcataattttccctaatctttcttatgtgaagcagctctccactgcaagtatttgttttgtcatttaaaaaggatttagtgaaattcaagcctgggcaacatggcagaacccatctctggtaaaaatacaaaaattagccaggcgtagcatgtgtaccctctagttctagccacttgtgagactgaggtgaagggatcgcctgagtctgggaagttgaggctccagtgagccgtgtttgtgtcactgcacttcagcctgggtgacaaaatgagaccctgtctaaaaaaaaaaaaaaaaaaagatttaatgaaatttagacatttgtttgatggttgttcaatcatctgtttctcatatgttcatgcagcatcatatacacctaaatgatcatgttttgtttcaaattaaggcaacagaatgttttagggaaattgtcccaagcgcaggcatacttgttaatgatctagcagggacatcttatgcacatcaccttctctgaggccggataagagcgtgggataggtcagaacacagactcagaatggttgaagccctaaggatcctgatcattccttcctttcctaagcaggtgaggacattggtaatgaacataggaactttaagggggcacctgctaatctttgtaacaagcctctgaggctgtagtgatcatctcccactttacagatgtggcaactgagactcagaggggccaaatgatgcccaaggccacccagctagggagttgcagagctccacatttaaactgtttagcctccagatgatgttttttattctgtgtgctattgcatcacttatgaactgaccttgtgcatctccttgaaaatgggccatgtacttgtgggaaaaagcagttatggaacagctggtgttgtatgatcattttaaattgatgtcatacagcagcatgtgcatgtgggtatgtatgtgtacagatatccatacatatctcaaaaattgtttaaatattaaaggtgattatctctggctgatggaatttttactaccttacaaatttatattgtttaaattattttaccaaaaatgcattatttttaaaaaaattaaagaaaaacttggatttcacagtcattcacggctgtttctagaggatgagatggcctgtttttcttgagacagactctcactccgttgcccgggctggagtatagtggtgcgaccttggctcgctgcaacctcctcccaggttcaggtgattctcctgcctcagccacccaggtagctggaattacaggcacctgccgccacaccaggctaatttttgtatttttagtagagatggggtttcaccatgttggtcaggttggtctcaaatttatgacctcaagtgatccacctgcttaagcctcccaaagtgctgggattacaggcatgagcctctgtgcccggctcaagatggcctgccttttcacgcttgcagccaagctgcgggtcctgcagtgagccaggttgctggtgtgcatggataattggccctcgctgctttgagggtgtctggtgcctgcagtttcccctcttcccacattttacctgttaactcactcatcctctggagccacgtgctcagcagtcctgacgcctttgaaacagtactcatttctgtgtggacttggaccccagggagcggagagcaaaggcctagaaatcgctacaactggccttccttatttttccaaatctagtttatgatcagccaggaaacagggccgatattctctggggttttcatcagaatccagtgccatgggtgatatttccatctgttggtggagacctcattacccccatctcttctgggacaactccaagtcctagagttaaaatctgagccccatgtcagtggttcttctagcgagaccttcattcctggttatttgttggaagaaattgcccaagaaatacatttttttttttggttattgaaaccagaagctccccaggccactgtgtgtggccccctgcccactgctgtggtcatggaggtggtagtgaaaaccacagccctgcacagagcacagaactgtgttcaacttaccttctgttgactgccaaggtgtttgctccctttgacatgcctgcccctgccgggtttgctgctgggtctgtggtttgtctcgattttttgctaatggggcgagcagtttatccagcttcagggaagtgactcactcacagtcactctgcaaactgcaggcagggcctttcccagaataagtttgtgagaatgggccgagcatggtggctcacacctgtaatcccagcactttgggaggctgaggtgggcagatcacttgagctcaggagttcgagaccagcctgggcaacatggtgaaacaccatctctactaaaaatacaaaaattagccaggtgtggtggtgcacgcctgtcattccagctacccgggaggctgaggcaagagaattgcttgaacccaggaggcggaggttgcagtgagccaagattgcaccactgcactccagcctgggtgacagagcaagactctgtctcaaaaaaaaagaaaaaaaaaagttgttacataacatataaatatatcaaaatatcacattgtaccccatatacaattattatttgtcaattaaaacaaagtagggtatggggaatcctgaattaagtaaatgtatagtagcaatacgccactgtgcagctctttttgtttatttttttggagacggggcccaggttggagtatagtggtacaactttggctcactgcaacctccacctcctgggttcaagtgattcccctgcctcagcctcccaagtagctgggactacaggcgcatgccaccatacccagctaatttttgtatttttagtagagacgaggtttcaccatgttggccaggccggcctcgaactcctgacctcaggtgatccacccgcctcagcctcccaaagtgctgggattacaggcatgagccactgcacctgttttgggtagctcttgatgggtgttaaagggtctgactaggcagggttattggcttctttttttctggtaatgttcatataacttacgataatagcaaatacctgtagtgagctgactgtgtggcagacaccaccctaactgcctcacaaatgtcctcacctttcctcttcacaacagctccaggaggaagcactaatgttagttcctttatcgttgaagaagctcagcctcaagggtgaaggaaccttcccagcattcctcagggaaggagtagaaagccagggttcagcacgtgtggttcctcccaggcccctgagctctttacactctgctgggcactcctagagggagaacttggcctctgaggggattggacatgcctgtttctctttacctcctctcaggaccttttttctttttctttcttttttttttttttttgagaccaggtcttgctctgtggtccaggctggagcgcagtggcacgatcttggctcactgcagctttgacctcccgggctcaagtgattctccaacctcagcctcccaagtggctggcaccaggggtctcaacatgttgcccaggctggtctcaaactcatgggctcaagcaatcctcctgccttggcctcccaaagtgttgggattacaggcatgagccaccgcacccagcccctcccctcttttttaagagatggtgtcttgctgtgttgcccaggctagactcaaagtcctggctcaagggatcttcccgccttggcctccggagtagctgggatgtcaccacacctggctgtctctggacccttttagtctttggttcctccgagtggtttttaagaagcagcaaatctcttgagcccatcagcaggcaggagtgagacctgaccaccgtgagtttcgcgaagatcattttgattttccagcatcttctgtctctggcctgaatctctcctcgcctgcctggggccttcctttcctcccctgcccgcggctcctctttggcgttggatgggtctccaggcttacatgcccacactactctcatcttttcaggaaggcgagaacaacgacaagttcttcacccaccccaaggatgccaaggcgctggcggcctacctctttgcacacaatcacctcttctacctgatggagctggccacggccctgctgctgctgctgctctccctgtgcgaggcccccgccgtccccgcactccggcttggcatctatgtgagcgcacatgctcctcatacggggggctgggagccacggctttcagggcaagcgatggaactccaaaaaggaacattctgggagggcaaacactgcaaacggacttaaaacagagagatacgaggtggtcatagaggccttgggagcggaaatgcctgggtgtccctgctggagtgaatggccttcacccagtctctctgggattctgcccaccagtaaattccagggaggggaagtgtcccaggccctgctcaggaccagtgcccacaccttggctccgggtggggagggcacccagtggacagtcccactactctgtctccagcctcaaaggagaaggcagttcggtgtggtcaccatgggaggtgggggatgtttcctgggcagccccagccccgcagatgtccctacacccaggcccagccatcattcagtgggggccagaacaggtgtggagctgtgcttgtccccttctcaaggggtgtgtggtaggcatggaagcagggaagggagcctgtgcctgttgagttaggaagcgctcatccagcctggcctccaaggccctccatgactcagtttcccttcctgtttctccttcttcatgcctggaactcacagctccagccagtctgtgtttctttctgtgcacacctcccccatgccgtcacctgtgctggagtccttcttcctgtcccttcactttgtcaattcctgcccactggaatgtccacaggccctggacctccctacccccaggaggaggagctctcctatgtctgtttcccagaagcacttgacttccctgctgggaaggttttccatctaagggttttccatgtcttgtccttttgtccaaaatgaggatgagagttttaggggctgctctctgcttgacagtccttgtttctttgacaatcggattttatttcttaagttcctaattgatgctttcttagtgtcttttatagatcttttgtaaattacatgaaatccctcttagaacaagactagatattaaattttatcttatcttgtttttcttactttttttttttttgagactgagtctccctctgttgcccaggctggtgtgcagtggcaccatctcggctcactgcaacatctgcctcctgtgctcaagcgattctcctgcctcagcctcctgagtagctgggattacaggtgtgcgccaccacgcccagctaatttctttttcttacttttaaacttcaggctccttcctgatttttcatcatttgggccagcatgtcagtttcatggatatcaagtttatgtttagttgttctggggaaagctccgtgaccaaggctctgtctttaggcatgcgaggccaggtttttgtaactctgatatgtgttgggaggatgtcctggggcactcccaggtcctgggagggttgggcaaagaggagtggccatgggctgggctggccatgacacatctccacaccctctggtctcaggtccacgccaccctggagctgtttgccctgatggtggtagtgtttgaactctgcatgaagttacgctggctgggcctccacaccttcatccggcacaagcggaccatggtcaaggtgatgtgtccgcccatctgtccctcccctcacagccttttctcccatgtcaccttcaaacctgtctctttggtacaattcagaatccaccatgggcccagtccatgctcagaggtgtaaccctagggtccctgtcctgaccgtgccctcagccttgtgggtgccctggatgtcgtgatgccagcagtagctaatgtgattgggtgtttggtacctgccaggcactggcgcagtcaccttcgagagagatgtgctgctctccgtggtttacattcatctggagacatggggctcacacccagctctgcccactgcgcccggctcacctgtccctagtgttgcgcatattctctctgtgccacagagagtggcatgagtaagagcacgtcaaggtggcattttgtagtgtgtggagcatgtgcgctactctaggagaatatagccaagtaagcagagctgaagaggagctgcaggccccgggatccctgatgtgagtggcgagggctgatcgaggggtcctggcagagtggcggttttgcctcctcagtggataccagcagtcacacagcccttccattcttctggtgccacacacctgtgccagcacctggagttttttttcttctggggctgcctgatgttggcaggaagtgtgagagggctggagagaggagaaggcctcccgaggccagagtgggcactgcctctccagccccccgttccaggtatgcaggatgacggctgggctgcaggggctgacggtgctccatgcctgccacccacagacctcggtgctggtggtgcagtttgtcgaggccatcgtggtgttggtacggcagatgtcccatgtgcgggtgacccgagcactgcgctgcattttcctggtggactgtcggtattgcggtggcgtccggcggtaaggcccgggtggggagctgggcagtcactatcctggcatggcctgacctctgggccagtggggcaggagcttgtgagtcagttagtgatgaggtcgaccctgcatgctggtggagtacacgcagactcactctccctctgccattccatccacgcacaggagaaagcggtattcctaccgcagtgtaggtttgctgcctctgggtccagggctttttcccatcttatccgcagccttccagagctgcttcctcgctctaggcatgttatctacccaaatgcaggcagctcagcagcgtccatgtgacacaagcagactctcctgccacctccatcgaggctgtaggaccaaactcaaaccagaccaagcctcgactgagatttattttgggagactcaatctggaaaattccttggctgggctactgttgctgagagtgggtttgcaattcattctctgtgcccatctgcaaagctagaaacaggactcagtgtccttgaaacaggcccagtgtcccaggactaagtggccttgaaatgtcttcatgccttccacatcctgctcatggaaactgacctttgcacccaaggtcatgcccttggccttctgctgctctgttccctgcttgcatggcactcacctccttggggcctcaccaggtggaggtggctgtgtgctacgcctgccctagttcttccctgccatccgctgagtgggggtctcaagccactttaggaaaaaatgaagcatgatgtcacaccagagtgcgtcagggtttagtatttcgagtcagaagcactaggcctccatctcaacaaggaggagtcccaggcagcccgccccagctggtgcctcccctgagctggcccatctctccccagcaacctgcggcagatcttccagtccctgccgcccttcatggacatcctcctgctgctgctgttcttcatgatcatctttgccatcctcggtgagttcccgcctctcaggcccaggtgcgctggaaaagcaagttcacggtggatgaaaaattattttgggcctggctcagtggctcacgcctgtaatcctagcattttgggaggccaaggtgggtgggtaacctaggtcaggagtttgaggccagcctggtcaacatggtgaaatccagtttctactaaaaatacaaaaattagctgggcgtggtggtgcacacctgtaatcccagctgcttcggaggctgaggcaggagaattgcttgaacccgggaggccaaggttgcagtgagctgagatcgtgccactgctttccagcctgggcaacaacagagtgagtgagactttgtctcaaaaaaaaaaagaaaagaaaagaaaaattatttagacagtgccttagtccttttggactgctgtaacaaaatgccatagactgggcagcttataaacaacagaagtttatttcacccctttctggaggctgtgagatctggaagtccaagatcaaaggccagctgtgggtgtctgttgagggcctatttcctgatccataggtggtgccttctggctgtgtcctcacgtggtggaaggtgggaggcagctctctgaggcctcttttttgtttgttttgttttgtttttttttttttgagacggagtctcaccctgtcacccaggctggagtgcagtggcacgatctcggcttactacaacctctgcctcccaggttcaagtgattctcctgcctcagcctcccgagtagctgggactacaggcacccaccaccacacccagctactttttgtagttttagtagagatggggtttcaccatattggccaggctggtctccaactcctgaccttgtgatccacctgcctccgcctcccaaagtgctgtgattataggcgtgggccaccgcgcccggcctctgggacctcttttataggggcactaatcccattcgggaggacgtcacactcatgacctcttcacctcccacagccgccacctcctaacaccctcaacttggggattaggatttcaacatagggattaggggcaggggacacaaacattcagaccagagcaggtagttttataaattcagaaagattttaaaaatacgccaggcatggtgtcccacgctgattgtcgcagcattctaggaggaggaggcaggcagatcgcttgagtccaggaggtcgagaccagcctgggcaagatagggagaccccatctctacacacacacaaaaaaaatatacaggaattagctgggtatggtggcatgtggcgtgcacctgtggtccctgctactcaagaggtgaggcaggaggatcacctgagcatggggagacagaggttgcagtgagctgtgacagcgcaactgcattccagcctgggcaacagagcaagactctgtctcaaaaataaataagtaataataacatgaacacccatggacctaccatccagcttaggaaatgaagccttagaaataaaatggaaggcatgtttgtgacctttagtgattgtgattcccgctttccccaaaggtaccccctgtcctacgcttatcattcccatgcacgtctttatattttacttcacatttacatttccccaagtgacaaagaaatgataatgctttgcatacttaaaaaagtctctaagtggttatataatatgggtgtccgcttctacacattgccctttcgctcagcactgtgtttttgaaatttattcctgttgatacatgtagatgctgtttattcattttcactggagcggagcaagtatgccaaagcttgtttatctgctcttctgtcggacgtttttcttatcacaaatcccaccgcagtgaacactcctgtgtgtttcccggtgctcacgcttgagagtttcccaaaggcgcttgcctgggccctgagagacggcaagcttcagcttcactgggtacagcatggtcacaggctgctcactcaggagggcttagtttttcaggtggggctgactgtgacagccacacaagagtcacagggcatagacatcggaagccgtggcactcagctgggaaagccgaggtcctttcaccaggactccgcagatggtgaagacagtggaactccagagccctgactctgaggctagagccagggccaacccctcccggccctcgtgactgccttgtcctgagtcatggctctcacttcctcccacccaccaccccactcttggtagaattttgtttgtgcttctccgggggtaggggctgatttcccctgagggcagagttcctcccttttcccactcaggatttcagggactcagggagtggtccattcctggagggaggaagtgaatggcattcccaccctgggaccctggctgcagggagcagcggatccctttggaatttagtcagctgtcatgttctcagaacctaagattgcgaaacagcagcctggattccagatccagcctacagatgggttttgtttggtctgaaaactttgagccagcattttaaaattagattttacacaaaaatacagacttccagccttttgaaagaacagagccgatagtgcccggcacattgctgtagggcagcaagcgtctggtgccagcagccctgctcccttccaacagagcatgtgttctcagggtgctgtggtccccagcagtccctgctgctcttcctgacctgctgcgttcatttgcatgtatttgtccagtccttttgacaccaggttttgggacctctgctctaatccttttgtttatctgtttccacccacttctaggtttctacttgttctcccctaacccttcagaccccgtaagtaatcagcacatttgtccgtctcttcttttatggagggcttttccctcagacagggtcaccggcgtgaccctgtggccatatggggaagggggggcctgcctggtttctcatcatagcttgtgtgtgcattgcacctgggagttcccatcactcagacttgaccactttcttccttgagagctggggatccccttttctgttcttgaaaggagtgccgccaggatcaggtttggaccattggaatattttggcagaggagcagtgggggagagccaggcgaatggcccagacatgtgactccctagaaaaaagtccccccaagtcaatagtttgcttctgccggaagcatcaggtgcaggaaaggggaggcctctggactgcatgtttgctctttcctctgcctccctcagggattccttgagagatgcaagagcggtcaaggcagggcatgccaggtggcccatcacagcctgttcctgatggccgtgtgctcttggctggtcccgacttctctgccctctcttcccttgcagtacttcagcaccctggagaacagcatcgtcagtctgtttgtccttctgaccacagccaagtaagtgcaggctctgccttgcctttggtcctctgctgccgccctggggtctctttctcttttctgccaagtatattccacatcccagcacaggcaggtgctgtggtgctattgggagacagggttggcccactgagcacggagcccagggatgagagtaggggaaccagggttggaggctgggaaggcagacaaggagctgtcctctgcaaggcatgtgctctgagaggatggagacaggcagatacagcacgccgggtcaccctctgcaaatacagtttcccagatgtgatgatgccctcctactcccggaacccctggtcctgcgtcttcttcatcgtgtacctctccatcgagctgtatttcatcatgaacctggtgagtgactatgcctcaggctacgctgaagcagcctgcccctacccatgcagcactaggcactgtgggagtggagaagtggggactgtcttctgcctctcagggcagaacgttggggcaggaagtcccagattcatagtcaggtgcggtgttgcagggaatgccctgtcgggacttcaggagttcagccagttgctgggggtggcgtcctcaccaaggcaatgctgctgatgctggtagtgctggatgtgaaacccaggcaaccctgggaccttttcattcttacatcagaaataagcagttgaccctcggtgtccacagggattgtttgcaggaccccctgtaggtacaaagatccacagatgttcaagtcccttatataaaatggcagagtatttgcagataacctgtgtacattcatcctctcatatattttaaattatcctgcattacctataacacctaatacaatgtaaaagctatgtaaatagttgttatactgggctggacatggtggctcacgcctgtaatcccagcattttgggaggccaaggtgggtggatcatttgaagtcaggagttcgagaccagcctggccaacatggtgaaaccctgtctctacttatgaaaattagctgggcgtggtggtgggtgcctgtaatcccatctactcaggaggctgaggcagaagaattgcttgaacccaggaggtggaggttgctgtgagccgagatcatgccgttgcactccagcctgggcaacagcacgagactctgtatcaaaaaaaaaaaattgttatactatattgtttagggataatgacaagaaaaagaaggctgtacatgttcagtacagatacaaccatccttttctttttggaatatttttgatttgcggttggttgaatgcatggatggagaacccacagataaagaaggccaagtatattataataaccataaaagctggcatttagtaagccttagccacttggcactatgcaaagtgctttacatatgaggatgaaataatttaataaataaacacaaccgtggaggtagtgagtatggttctccatgtgcagatgaagagactgagggtcagagtgacagtgtgatttgcccatggctacatagcttggagtggccaggccaggctcatcccagagccctgttcctaaccactctgttcagttgcactcacgtgccagaaatgtcttgtgtatttctacctcacttatcaggaaccatcagaaaatccagtatagaacacgttctgtgaaggagaacgtaaagcctctgtgctcaaagaactttgagggtgtttgtggaggtgtggacagcctccaggagtgtcccagccatcacagatcacatccgacaccaggctgttaggccggtgcccagaccacacatccatggcagagctaacggggagaggcttccgatcgagtcctgtgtttatttttatgcttctgcagagcattctcacaccagtcaccacagtcaggcccagtatagaaatgaaaatcatcttttccaggtagacttgtgaaatctaaaaaattttaagtccttttctcttttttgagatggagtctcgctctgtcacccaggctggagtgcagtggcgcaatctcagctcactgcaaccgccgcctcccaggttcaagcgattctcctgcctcagcctcccaagtagctgggactacaggcacatgcacatgccgccacacccgactaatttttgtatttttggtagagacagggttttgccatgttggtcaggctggtctcgaactcctgacctcaggtgatccgtccgactcagcctcccaaagtgctgggattacaggtgtgagccacagtgcctggccaaaatttaagtcttaaaaaggagaaaatatttcctttttttttttttgagacagagacttgctctgttgcccaggctgtagtgcagtggcgcgatctcggctcactacaacctccgcctcctggattcacaccattctcctgcctcagcctcccgagtagctgggactacaggcacccgccaccacgcccggctaattttttttgtagttttagtagagatggggtttcgcgctttgttagccaggatggtctcaatctcctgaccttgtgatccacccgcctcggcctcccaaagtgctgggattacaggccaccgtgcccggcctgagaaaatattttcttgttttaattcctcaaaaccaagaagaaatatgttgagtacttctttgtatttgatttaattcataatatatttagagctgtgaaaatttagggcagcagtcaacaaagtacgacctgctggccaaatttggcccatggcctgtgtttgtaaataaagtttcattgggacagagtcatgcccatttgttcatgtatagtctgtggctgatctcatgatatgaccacaggttagtagtcgcagcagagatcatttggccttcacagcctaaaacagttgctgtcgaaccctttacagaaaaagcatgctgacctttgatccacagggaaaaaatgggggaccagtttgagggaaaggaccagagagtttcccttaaaacatttttaaagacagagaaagtgtttctaaaaaggattctttcaagttcttccccggccttccatccccctctgataagctaacttttggtattagccaactctagaacgttatttccttgcatgcagagcctctcactcccctttttcctgggccacacgtgaagcagtgactcacaaggagaagtaacaaaggggcagggggaggaagggtccttctggatcggaggtcaggagggcagtgggcaggcagcctccgcctgccactggctggagtcggactgggctcagaatccagatgcgcccctcttgctactctctcctcccctggcttgcccctgcgcagcctgggacaagctgtagctggaactggggaaaggagtgtgggaaagtggaggggaacctgggaaagatggagtaacaatgccttcatgtatctgaagagggaaatttacaagcggaacaaagggccttcctctgttgagacttgggagactgacttcctaccccatgaggtgcaggcgagagggtctccccagggcctctctggggtgactgggtaagagccttgcctagatgatgaactcatacccccctgcactccctgccctaaccactcaaggtcctgagctagggctctgtgcttctctcccacagcttctggctgtggtgttcgacaccttcaatgacattgagaaacgcaagttcaagtctttgctactgcacaagcgaaccgctatccagcatgcctaccgcctgctcatcagccagagggtaggaactatgggccagggaggggcttggtccctgtcctccctcccttgcccagagcagcccctaagcatggccaggccagccactttagaaaccaggaaccctgcccttggaagaatgaacagagctggagtggatctggagtgggtgccccaagggaaggggagtagcctgggttccacactgctcttccctctcccccagaggcctgccggcatctcctacaggcagtttgaaggcctcatgcgcttctacaagccccggatgagtgccagggagcgctatcttaccttcaaggccctgaatcagaacaacacacccctgctcaggtaagagcagatgcctggtaggggcagcatggccagacaaggtgttcacgtctagagtgaacgggggcatgtgaaggcccttgaggtgggcaggcctataggcttgtcagagacttcctccacagatgtttatccatgtagacttacacactggattcatcaggatgccttttgcaagtgacaaaagtccaacacaaatccaattcaagctgacttgagaaaaaaggagctcatgaagtggactggcccagctgctggccctcgaacccccagtggggtgggatagtcccatgtgagccaggtggacagacaggggtgaatatacttccccaatcccctgcacacacctggctcggccgcagagaactgacccgagatctccaggggtaggattggtcttccaggctgttgatgaccaagccctgtccacagcagcctgctgtggagctgagaacaagccctgtttgagctgaacttgcagtcccaggtgttgcattaaggcccctgctaaaaagtgaagtttccgtcctcctaagaatcctagtgctccagcagctgcctctccagggcactgacactgtccgtagttagtgccatcggtggagacttaagtggattacatatttgtagtacctcaaggtcagaggagatccaaacgcttgcaggtaaaggatcccccagcactgctgtgctgggactcacatggtgtcccctctcttcctccctcaccccataaaggtgtccataggcaggcaagtaagagaagcaaagcacagtggaactatgttctgatattttgtccctttttattttgcttttggtagcctaaaggacttttacgatatctacgaagttgctgctttgaagtggaaggtgagttcttctctgagaccatagaaggagtagacagagaggtccccacgtggggcagtgaggagcaggggcaccccgagatccagctctctccctgctagagcagctcagcccccagcttggcatggtacacttcagggatcacaggtggccccagcccccaaatctgcccttacatttgtgatacagtgtcatcgttaacagcaccgaatcttacttagaccccattggttattgtgtgacatcaggcgggttactgagcctttctgaggcttgtcttacctgggaagtggcgtaaggataatccctactgacaaacctcatttcaggactatactaaaataaggcctctgcatggcacattgtaaacgctcggtacacactggctggctgtgttgtcatgtagatccctgaaggttaacattgttccccagtttagcagggtgaacaggaaaggaagccagcatcctggctccaggcagggccctggtccctggccctgacaccctccctcttggtcctgttgtctaccaggccaagaaaaacagagagcactggtttgatgagcttcccaggacggcgctcctcatcttcaaaggtaagtgggcttgagtatggcaggtgttggcagctgggggccgatggaggttttcagagaccacagataagcgtctgaggagaggttcagaggggtgtgtgtgtgtgtgtgtttgtctgaatgcctgtgtgaagagacagtgtgattaccccagcagggacgtaagggtggtaggaagcagattgggagagaaatgggtaacttaacccaaccaaaatgggtaacttaacccaaccaagacatttggggtatttttcttttttcatacaaaagcaaagatgttcattgaagaaacttgaaagtgagataattagaagtaaatggaaatttaccacccagataaccactgttagttctctgatgtgtttccctctgtgccatttttctatgcatttttaaaacagtagggtgacattatatattccattctgtaatctgccttttcatccaataacacatatgtgtgtgtgtgtatatatatatgtgtgtgtgtgtgtgtgtgtatatatatgtgtgtgtgtgtgtatatatatatatatatatatatatatatatattttttttttttttttttttttttttgaggcggcgtctcgctctgttgcccaggctggagtgccgtggtgcgatctcgctcactgcaacctccgcctcccagattcaagcgattctcctgcctcagcctcccgagtagctgggactacaggcatgtgccaccatgcccggctaattttgtgtgtgtgtgtttttagtagagatggagtttcaccatgctggccaggctgatcttgaactcctgacctcgtgatccacccacctcggcctcccaaaggcctgggattacaggcgtgagccactgcgcccgaccccgataatatatttttgccctcctcttatggcaggatgtatactttgcatgaccccttgaataatgcttgtgtagtgtaaagtttgaaaatttgaaattgggtgctcgtattatttacctgacagttgccccttaatttcatgccagtttcagcagtgatcaggagagctttgtcctgctctatcttggttccaggttgctcaggctccccccagagcagctgtagtcagtgcagtcttgtctgggggtctgagcagaagcatgggtaccactctttgagcaggaccctcctttcttcacctctggggtaaagaccatgcttacctgcatgcacgaagagtgtggtaggtggttgcacctgcccagaaagagataataataattaaggatacagtagggggaacaagtgcgtaaatttacattttaacttgtcttttcttcaaataggtattaatatccttgtgaagtccaaggccttccagtatttcatgtgtaagtgtgaaatatctccactctaggccactttccccctgagtcctttgctgttctagaagcgggagaggcaagagattggtcctagagtcctgtgtttgactttttattgtggggaattcccagcatgtataaaagtgaagagaacattaccacacgcatccccgtgcccatcacccatctgtatcttcactccggctcatcatcctctctagacctagattttttggaagcaaattccagaaccacagagttgactggtcgatatgtctcttgagtttgttttaatctataggcttctcttcctcacctcatttaggtgaggaagcaggatttgggttttgtatgttcctctgttgccttttcctggaatttggtagttctgtctagagccatgctgtgcagtgtggaagccactggccacatgtggcaatttacatttaagctaattaaaatgaaaaattcagcttagctgtcacatttcaagtgattaatagccacaaatggctaatgactaccaattggattgtgcagataagaaaatttgtattgtcacagaaaattcccttggacagtactaacctagaggcttgatccaatttggtctttccaaggagctctggttccttttagtaggaaatggtgttagagacacaattcgaggtgctgggtgctcattgcttgggttggtcattgtttctaggcctttccatggacagaactagggttttgttttttttaaagataaactgttgtgcgttcatgctaatacttcacattcaggcctacagcaattttaagattaagaatctagatgtgtaagactgatttcatcaatcttacacgtctagattctcaatccttttttttttgagacagagtctcattctgtcgcccaggctagcgtaatctgtgctcactgcaacctctgcctcccaggttctaagtgattctcctgtctcactcacctgagtagctgggattacaggtgtgtgccaccacgcccagctgtttttgtatttttagtagagatggagtttcaccatgttgaccaggatggtctcgaactcctgacctcaggtggtccacctgcctcagcctcccaaagtgctgggattacaggcgtgagccacgtgcctggcctagattctcaatcttaaaatccaggttgtctttgaagacaatcagacaccaacaaagaaaaaaaaataaatatccaggttcccaactacactggcacagttattcatttgctttgtctcacagtcccaggataacaattgcaaagcaatcccaatgatataattactagaaacatcattccaatgatgtacattcagattactgtgggtttttttgtttgtttgttttgagacaaagacttaggtctggtgccctagtggcatagtcatggttcactgcagccttgacctcccaggctcaatccatcctcccacctcagtcttctgagtagctgggaccacaggtgcatgccaccacacctggctaattttttaattttttgtagagacggggtagcctcatgttgcccaggctggtctcaagctcctggcctcaagccattctcctgccttggcctcccgaagtgctgggagtacgggtgtgagccagtgtgcttggccttgtgttttaaggtcatgtgggatagttcctctccatgtggacatgtcaccaactggatacacatttggatttcttttttttttttttttttttgagacagagtctcactctatctctgtcacccaggctgtggtgcagtggcatgatcttggctcactgcaacctctgcctcccaggttcaagcaattctcctccctcagcctcccaagtagctgggattacaggtgcccaccaccacacccggctaatttttttttttttttttttttgagacagaatttcactctgtcacccaggctggagtgcagtggcgtgatctcggctcactgcaagctccgcctcccgggttcacaccattctcctgcctcagcctcccaagtagctgggactacaggcacccaccaccacgcctggctaatttttttgtatttttaatagagacgggatttccccacgttggccaggctggtctcgaacttctgacctcagttgatccacctgcctcggcctcccaaagtgctaggattacaggcatgagccaccgcatccggcctacacatttggatttctttatgccatgttattttttattttgggggattgcttttggcatttaattttgttttatggccgggcatggtggctcagacctaaaatcccagcacttcaggaggccgaggcgggtggatcacttgagcccaagagtttgagaccagcctgggcaacatagtgagacccctgtctctacaaaaaaaaaaatacaaaaattaactgggtatggtggctcacacctgtagtcccagctacttgggaggctgaggtgggaggatcacctgagcctggggaggttgaggctgcagtgtgccatgatcgcgccactgcactccagcctgggcaacagagtgagacccccctatctcaagaaaaaaaaacccaaattttgtttcataattatgtaaattaggcctgggcatggtggcttatgcctgtaatcccaacactttgggaggccgaggcgggcagatcacttgaggtcaggagttcgagaccagcctgagcaatgtggtgaaaccccatctctaccaaaaatagaaaaaattagccatgcacgcctgtggtcccagctacttgggaggctgaggcaggaggatcacttgatcctgagaggcagaggttgcagtgagttgtgatggtgccactgcactccaacctgggtaatacagtgagactccatctcaagaaaaagcaaaaaaaaattatgtaaaatacttacatggttccaagtcagatctaccaaaaaaagtatattgaaggaagtttagtttatatccctgtcacttcccacagtgggcaacttttatgtatggcttctccttccattgtttaaaacctgtaagttggatacctatcaatatatctgtcttaaacaatagcatattttatgcacttttttctgccacctggctttttgcagttaacaatatgccctggagaccgtaatatgtagaaatgaggctgggtgtggtggctcacacctgtaattccggcactttggaaggcagaggcaggtggattgcttgagcccaggggttcaaaaccagcctgggcaatgtggcaaaaccccatctctacaaaaaatacaaaaattagctggcgtggtggtgtgcacctgtgttcctagctactcaggaagctaaggtgggaggattgcttgagcccaggaggtggacgttgcagtgagccaagatcacgccccactgcacttcagcctgggtaataataaaaccctgtcttaaaaaaaaaaaagtaatatgtagaaatgtacctcatttcttttctttcttctctcttagagagagggtcttgctctgtcacccaagctggagtgcagtggcacaagcatagctcactgcaaccttgacctcctgggttcaaacgatcctcccacctcagcctcctgagtagctgggcccacaggtgcacactaccacacctggctagttatttttattttttgcagggatttggtctccctgtgtgcccaggctggtttcgagcccctgggctcacgcaatccacctgccccagcctttcaaagtgctgggattacaggtgtgagccactgtacctagcctgtgtttcttttttatggttaaagtatgccagtttatgaatgtatcgtagtctgttcaaccagtcccctactgatgatcattgagattgttgccagtgttttgctatcacaatagtgctgcggtgagtagctttcagatacatcttatatttttgctagtgtgtcattgggatggtttctggaaagtgggattgctaggcgaatggcttaatgcatatgcagtttttctaaagagttcatgcaattattttaaaattagaagtctctaggggaaaacaagtgttttcaatacttgaatgcctggtatattgtccctcttttacctcaatttggaataatctctacatcataactggtattcatacagtgacagagggagtgtttttagaaatttatagctgtttctaggtgaaaacactggttgatttagctcccttggtaagagcactgagcagaaagaagttccctatcaaatgggtgtgtggagcagccctgttctccccatcccgtagagctccaggaagttaaccagggacttcagctgcgacctgcagatttctaagcccccctgttatttctctgtcttttacgggcctgtgtatttcagacttggtggtggcagtcaacggggtctggatcctcgtggagacatttatgctgaaaggtgagccccgctcagggactggccgtgtcctggccggcacacctggcttacctgtgagctgctacttctctgtcttacaggtgggaacttcttctccaagcacgtgccctggagttacctcgtctttctaactagtacgtttccgacatggctttgctggactgcttgttttaaaattgtctgggagaactttcattcagtgtagaacctcatggttcttctctaaaacaggaagctataaagagacggagtaatcagtctgattccatctcgtccccgtttaaaactctttcgtggttgtccgctgccctctggatggagcccagatcctaggcgtgtgtgaccctccactcggctctgcagccctgctgtttgccagcgccgtgtcccccgctgcacactgttgctctcctcagcagcctctgctccctgctgctcttgcctgcctctgggctgtgcacaggggtttcctctgcctggtggtgtcttcctctaacctctgcctgactttcctgctctttccatcaagtctgagcacactgtgttgtcattccctgttggcgtctttcctcccacctagctgataagctctgtgcccccagggttgccctgcactggtcacttttgcacacctggtacccaatgcaaggcccaaggtagaaggggtagtcaggacacacctgttggatggacagatggttagctgggccctgcccagagacaggcagggaggatttctctctctttttttggggcaggatctttctctgtcacccaagctggagtgcagtggcgtgatcatagctcactgcaacctcaacctcctgggctcaagggatcccgagtagcctcagcctcccaagtagctgggattacaggcacacagcgccacaatgcctggctaatttttgtattttttgtaaagatggggtctcactatgttgctcaggctggtctccaactcctgggctcaagtggtcctcctctcttggcttcccaaagtgctgggatgataggtgtgaacccctatgcctggccagtttctcttaagcagattacccagttggccaccatctaggccctctcctggagcacctgctctcacgctgggacatgagtgaggcctgggctcagcctggagggcttatggccagcagggaggctgcagactgtggaggagcctcaaagaggagaccgagcatgggggaggatgtggcggggctgctgccgatggattccttctgtccacagtctatggggtggagctgttcctgaaggttgccggcctgggccctgtggagtacttgtcttccggatggaacttgtgagtggacagcatgtttctgacccaaagctgagactcttgaggatggccccagacccttctctgcacaccctgatcccgggccatttctggaatcgcagagggagggtctgaggatgggctgaggcctatgtctccctcaagcagccctgcccacagcccaggaactccccagggtcaggcccttgtctgaagcctctcagaccacccacaccgtccttctggaaacggcctcttgaggtgccatagactgattggctcttcctgactcattaaacttttttctcttccataaaagccacaatgcccacagaaaagaatgctcccccccttccttgatcagcagtaatgagaccccatgtggcccttctccctattccccagagcgttggaggtcacttccctgccctgttcaagttaaccggcctgtgaagtcaggctgcactcatgaggtcttgggccgcgagggtgagcgggttaacacgcagagcggagttgggaggagccgacagcacgtgtgtgccctgcgtgtctggagaggagagagggtcctctggcttggggcagggcgagctgttctcccgatgggaatctcactggaagggcctgctctcttccctcaaaaagttccttggggtcaggctggtctgcagtgtgtaaccagatgtctgttgagcggaagacgaggcctgtctccagggctgcggaggccagggctgcagaggccggggcttctttccttcttgtcgttagaccagcatggggccctttgtaggggttcccgggcatttctggccttggggtcagagcactgaggcctgacccgtgagacgcatgctgggacagggcctggccaccttgaaaccccagggtggcaggaagttcttcccgcagccggctggttcctgttggtgttgctgtgtctgggctctgtgggagggtggctgtgcacagggccagggaggggagcaggcgcaggtaggctcagggccacagggtggaccttggcctctcccctactgcaggtttgacttctccgtgacagtgttcgccttcctgggactgctggcgctggccctcaacatggagcccttctatttcatcgtggtcctgcgccccctccagctgctgaggtgatgggcagggcagagccggagacagggagaaagagagggaggacgggaatgccccaggattgatccgggaagtgacccagaatgagccagaaggttcacaagccagagtcacagatgtcaccccctggagaatcaccatggggtcaacatccccacccctgagggtgtgcaggctgcctgtgcccttcccctcactgcaccaggtgcctctgggcagagaaacccagcccatgactcatgtgcaccccacctgaggtggcattgcaccagcgacaggagcccatatgctcaagtcacagatcacagagccacaggtctgagggttggaagggcctttcaggggccctgcgtgcttttctggctcagcgtcttatggagaaaaaccctcgtgtgggtcccactggtttcccagggacactggagaaagtcccagacgagcctgccccactgacggtgtctcttcctaatgaggggtcccgaggtcctgtgccctcagagcctgggcttgcctcctgaccctccagctgcaaccccatccacgtccgccccatcctctcccaaggcgggacaggcggggcaggtgcggggaggggtggtggcgtctatggaggaaaagcctacccccttggcgtgtgggggtggcctggggctgctcctgagtgtccgcctccgtcccgccccctgccacccttcttcactggtgagctccattgcccccgctccccggggcacatgggcttctccccgctctttcccaggagcaaggccttgctcctgtctgagcctgcagctctactgcaaggagatgtggcctggccctgctcctcttcgtggaaggaccccgcccagccggtgtcctggggctgccaccatcccttccctcatgcatgaatcacctgagcccagctcagggttggtggcgcccaagggagtggacgcaggtggaggagaggccctcacctgtcttcaccgcatggcgtgtggaaggcggggccggcatgttctgagggcgggggctgaggcgtgcacctgtgtgtggaggtgacgggtgtcctcctcgctcaggttgtttaagttgaaggagcgctaccgcaacgtgctggacaccatgttcgagctgctgccccggatggccaggtactgccagcccccaccctggcctgcaggtccaggtgccgtgtggcagtgccccgtgggggcgggagccgagtggcagtcgggggaaaggagttccacaaaggactgcaatcgagggcctgacggggctccaaggagcctggaatcttgaccaccacaggtctcctgggcaccatttttctccactgacctgtctgacatatttagtagggagggcagggagctgtcaactcgcttaccacctgtgtctacattcacaggtaaggggtcacctgtgagtctaccttcacaggtaaggggtgaatctctgggaaaggggcatttgttcatagcgtcctgacttgagctgtttttcaccccagagctgccccacgaggccccttccccgcaggcactttccagttggtgaaccgaccaggggcatggccctgcagtcagccccacgggtccgaggaggccggggctgcagaggagccgttccctcctgccggccccgcgtcaccctgcccctgtcgccccacagcctgggcctcaccctgctcatcttttactactccttcgccatcgtgggcatggagttcttctgcgggatcgtcttccccaactgctgcaagtgagtaggccccacccagccccaggcagcctgcatttcccgggcagagggctggccagggccaggattggtgtccttgtggccttggggtcctcggggatgttcctgtctaagcaaccaccttgctttgctttcagggcttagttgagtgcagtgagctaaatgaggggcctggactcggggtccctgtttctccatcccccaggcagggttgggagctgtcagctcaccctctgccgagggctggaggccacccccacagtagcctgggtcccaaggtcaagtcccatggcttcctcccacttctctcctggagtggctggggacctgggccaagaccagtcttctagggacagcatcgtaggataagacagacggacacgtgcaggaaggtcatggtgctcagggatggggagcagagagtgaaatctcccatgagcactccctttctcctgagccgccacagtgaaatcactgcacactgccattcattcatcctcaattcagagagtcctcttacatttggtctttacagcctcaagcaccgatgaagaaacagttttacaaagacactggtagctttgagacccagtttgagtgtcaagcttggtctggaaccagaagcctatagcagtgggtcccagactttagagcccattgcagtcaccagggagcttagtgcaagctccagacctcactcttgtgtctgatgcatgcgtgtgggaggaggctccctggtggcccaagcactagacttttataaacattagcatggatattaacagaacagccataaaagattggaaggaaagtggcaaataagagctcctcaaaacagggccaaccttttcaaatacttgctcaggccaagtattggggaagccccagtagggaattccttccctgggactgtggcctagtgtccagcctcaagagcagatcctagatggggcaggtgcagaggaggcccttgcctctcctccctcccctgcaagcaacggtgagagagaaggccctgcctgcagcagacaacttccaggtgacagaggtgggtcaggctggccaggggatcccgccaagcccagcaggcaggaatagccaagggcattccttcagcagggacccaggcatgaggtggagagggttaggcaggaaaccaggctgcgggcagaacagaaggatccttggccagaactcggtttgtttcagacttctgtcctctctggaggtgactgatcgccttgtgaccctccctcctttctcccttgtgctccggccagcacgagtacagtggcagatgcctaccgctggcgcaaccacaccgtgggcaacaggaccgtggtggaggaaggctactattatctcaataattttgacaacatcctcaacagctttggtgagtgggaaaaatcacagggggcacattccctggggaccccacccttgtcacccttgtcaccacgggtcccagaggtggtgtagcaagtgtctgggccacactttctggaagcctccctggcccaggtggaggacttggtctgcccagctttggcagtacagtccaggctggatcctggagctcactcagttgcctgattccactctttcctgatattttctcagtaccggggaggacaagagttgcaagccttagctgggcggggtcccctcatcacagtgccacttgcagaatgggacccagccacaccactgctgctgcagctgcactgccccctggctcagactgcacacagccctctgcccactcccatgaagaggcgaacacagccaaaccgcctctccagaaaaagggtgtgcccccatgacaccccagatctgcacccagtaagatccagatagtctgatgtggcacaggctgctgaggcagagggtgtgttctcttgggggcaggccatgatgtcctgtggagccagcgccctaggagtgccttgcctggtctttcctggagctcacaacccaagcggtcatatggtgaccctctcatcttagcacatggcacccaggataggtggcaagaggccacttgaaattgactttgaagtggggtctcatcaggatgcttctttctctcttccctcggcagtgaccctgtttgagctcacagttgtcaacaactggtacatcatcatggtaagagctcgggcagctctgggggtatcttcccgccagccctggggtcggccctgggtctcccccaacccagagtatataattcttcccgtagcttgcagggctgggggtcttgagtcatgctgtgttggtgttcagtggggaggccacaggatggctgggccccaggagccacccctcccagtgttggctggactcggctgttactcccatctccctgcatgtccccagcagccaggagatgccacttagactctgggtctctgtcctgtctcgcccactgtagagatgacttttccctctagtgacaaagtggcgagcattgctgatctctttattccattccttaaactttcccgactcccagccctactgggataaaggctgccctggttctggatccagtcgtccaggggagtggccagggctccttcagcagtcaggaattagtgttaggcccagaggggcaagcttcctctcctccatctctcacaaccagccacaaatcacggtggggtctgcgaagagccggggccatggagcagcctgtgtagacggggacctgccctgcatgggcaccccctcactggctgcttcccttggtctccaggaaggcgtcacctctcagacctcccactggagccgcctctacttcatgaccttttacattgtgaccatggtaggtcccggaccacagaacgctctttgtccttcgtcttccacatcaccagctgcccctgctcttcagcctgcagcgtcagggagtggggctgggtcccatctggccggactctgttgggcgtgggctgcgcagccacggacacctacccaccctcctcccctgcctctgcccctccctccctatccctggccaggtggtgatgacgatcattgtcgcctttatcctcgaggccttcgtcttccgaatgaactacagccgcaagaaccaggactcggaaggtctgtgcagggatgatgccttgggcatttgatatctgccgcctacccagctctgtctgtctgtctgggtggctgtccagccagccatcaggctgtcatttttctgctgtctggctgtccagcttatctatctggcttgtctttctagatcttgtatttgcattgattttcaaatatttaatgtcagaaaacgtaatctaactttaaaataagacagagcatgtcatagttggagaaaaatcaagaagtagagaaaggcttatgtggcagcagcagcccctgccctgcctttccctcccgtcctccagaggcttctccttcttggctatttcttctgttagtcatctccacgtttctcaataataggttcacactacggttcttgatttaaatggtgtaaatattgcttatggcacaggcgaatcgtattcctgctgcaactggatggtgctggctttagtgactgcctcactcttcccagattgcacagctttctgtgtgctgaccctcccttcttcccaaattctccatcaaaactgtctgcacttgatctcttgagcccaggaggtcaagactgcagtgagccatgatcacaccactgcactccagcctgggcagcggagtgagaccctgtctcttaaaagaaacagaaaaccctgtgcccacacttgttacctctcatcctcagatctctgtgctatcagaccatctgaccattttctctgtgcttagaggccccttcctgaaaccctctggccctgtaacagctgccagctagacctgcgctcctgacatcacagcagagggaggggaagggaaaggagggccaacgaggagagcaggacaccaatgcagtgtcggtttagagagagaaccttaagaccccctgcggaagggggcaaggaggtacgagacccagccaggttggcagctgcagccccgggcccttcccacacctgccttccatccctgcagttgatggtggcatcacccttgagaaggaaatctccaaagaagagctggttgccgtcctggagctctaccgggaggcacggggggcctcctcggatgtcaccaggctgctggagaccctctcccagatggagagataccaggtgaggagcccaggccctggtccgaaggagggaggcaggtttcagtgtgggtggcataatcccttccctcagatattggtaacattttgagtgacacagttgcaaaagccagagaagtgggagacgccaactgtggcaccaggggtgggacctgaatatctgcagccgagccctgcagcctctgctcttccttagcaacattccatggtgtttctgggacggcgatcaaggaccaagagcgacctgagcctgaagatgtaccaggaggagatccaggtaggagcctggccgaccacgctgcgaatcctcccccaagctatgtcctgggaggggcagggagctgctctctggccctctgagtagagggagaaggctggtagagagatgcagaccgtccatcgggaccactgctggggttgtgtgggacctgagcggggctcacttagccttgaacccttgactcgtgcccagcagaggcagctctccagcctgcctgccgccatatgtccctgccccttatgaattctccagaacctcctctccatctcttactctgagtcagctgcaaactcaaacatgtgtactaagaaacacagtgagcaaagaggaaagagcggcgaccgtggtgaactggcaaggatgtccctgtccaaaggagacagtctcctcccagctccaggatgtgcctgtccaaaggggacacagcctcctcccagccccagcgagtgctgcccaataggaagaaggccctactgcggtcgggctgcttggtgttttgttttgagatggagtctcgctctgtctcccaggctggagtgcagcagcacgatctaggctcactgcaacctccgcctcctgggttcaagcgattctcctgcctcagcctcccgagtagctgggattacaggcacacgccaccacacctggctaatttttgtatatttagtggagacggggtttcaccatgttggccaggctgggagtgcttgggatttttcataattgggtgttttttgttttgttttgttttagagatggtatcgctctgtcacctgggctggagtccagtggcgtgatcatagctcactgtagcctccaacccctgggctcaagtgatcctccccactcagcctacccaagcagctggaactacaggtgtgcactgtgacaccctaattaccttatttttgtagcagtgaggtcttgctggggtctcaaactcctggtctcaagcaattcttccaccttggcttctaatttaagaaaaggcaggccaggcatggtggctcatgcctgtaatcccagcactttgggaggccaaggcaggcggatcacttgatgccaggagctcgagaccagcctggccaacatggtgaaaccctgtctctactaaaattacaaaatttagccaggcctggttccgtgcacctgtaatcccagctactgaagaggctgagtcaggagaattacttgactccaggaggcagaggttgcagtgagccaagatcatgccactgcactccagcttgggtgacagagctagactctgtctcaaaaaaaaaaaaaaaaggcagaatcagatgtttttctttttttgcatgacctcccaatctttacatattggcagctaaggaaaatatctcacaaagcaccgtgtgggctggcatttggcacggtgccttccagaccatgggccaccagcccatgagccctgcagagtcttctcaaccacctcagggttgccagggctccggggagcctctcccacaccagctatggtggctttgctctgttttctggcattctaatagcttgaagcccttctgtttcactaaaacagtgacaaccagggtccatgcctgaaaagcggggggtgctgtccccaaagcagcttacacattctccgggaacacaagagactcaggcagtgttctttgggctgatgtgtagtggctcactgaacttggtgtcacagaaacatggaaataatagaagcgtttgaccttgggcagtcactccatgcctccctgtctgtgcaaggggatgactgtgcagcagcacccattcaggtgtggttggaaggaggtgtgctgcccttggcctctgcccttctgcctgtccatctgctccaggcctcagtttccccctctgtaaaacaagggggccagaactaggccatctcgaagctctaaaagtctatggttcagtcttttaaaaagtagggtagggtatggtggtgcacacctgtatttccagctgcttgggaggctgaggcgggaggatcatttgagcccaggagtgggaggctgcagtgagccgtacctcgccactgctctccagcctgtgccacacagtgaatctctgtctcctaaaaaaaaaaaaaaaaaaaaggaaatgtggggtatacttaattccttaattacctgaatacctcagtccctgaaaatgtcagagtttataatcatggccttaggcaggtgaggtattcagcacaatacagctctaagcctcggtgtctcgggtgtgaaacagggacacaattcctgccaagctcaaaaggggtcactcggggggccctttagtgaaggacaaaaggttatgctcacaaacaaggggtgagggttgttcctgcctgggcctgttagagagctgttatgcgcaaacctccagacactagggaaagatttcattgtcatttttgcctctggggccacattcaaaattcccagcatttctgggcctgtgacgggggtttcagtaccagctgggtgaggctggcagccctgccccttccagcctggatgctgtgggctgtgtgaccttgtggggtgggcggggcagggggtggggtgcagccctcagcaccccttctgctctcttctccaggagtggtatgaggagcatgccagggagcaagagcagcagcgacaactcagcagcagtgcagcccccgccgcccagcagcccccaggcagccgccagcgctcccagaccgttacctagcccagcgcccgaaagccgtctcttctatgcaataacacaatagtattactctactgcgatgtacggaactgcggtgtgtgtacacatactcacgtatatgcacatatttatatacaggaagaaaaaagacagacaagatggggcttggtttataaccaccttgccctgtcttccttaactccagaagccagtttggtgaggggtgggggtgcggccaccaggtctgagctcttcctactgtggaaggctccagaaggcccttcacaaggagacccctcacctggatccagtcgactgcggggcttgcccctcatgtgggctggcctccatcggccacgtccaaagctgtcactgctactgcttcaggctcacatccccccgacctgatggcgtgcccgccccctctccctgcggcccatgccacaggtttctgtgttttgctttagggacagaaccacttaggaaggaaagaactcccggtctccagggtggtatttcagtgtctgtgataatgtcacgcaacacctcttcggggaccagtgcccaggatctaatggaagcggaattggggcaactgggcccatgtggccagagctcagttagccagtgccgggcggccacagattacactgaccaatctcctcccttggctctgcaagcctcccacccagccttctctggcttaacccttgttggcgaaaactcttccacagtggcctccttggggacccagaacccggaggaaggggcatgaggcaggaagtggggccgatgtctgcaacccagaccacttcgtggaatgggctcttgaccaaatccctttttttgcgatttacccgttcaagcaaaacaacgttttggttaactaaggattgtgctaaagccgataccaggtccttcacacgtgtgcactaggaacaggagcgaacagcacagagagacgctccctgtgggacgcagcagccccgtggccccggcccagttcccagccaccctccctggctctgctcacaccagagatttccatagcaggagcggttggtgcagaagtaggttcagatgaacctcagttaacgtcgccacccctcctcccaccatggtaccctgtaggagccctgtatgacatctgagcgtggtggaggtaggagggttgccagctgcagtgaccctgccacagaggcagggtcagtgcagaggtcgctttggttccgcttccctgggccacagaacggaacacagcataggttctgcagcaggagccgcagtggcaggatggagggtgcgaagggcaaggagtgcactgctgggcattcctggccagccccggccctctggtgcctgcttcctgtgacttcagaaggcaggtggacagagcctccctctggccttgtcctcttcccagccacagaacgggcagggtggcacccgaccccaggggagcagtacctggtcccccaccccctcctcccaaccacctccaaggccaagctgggtcccatagccagcacggcatggttctccccttccccccttcccaggtcaggggagttggacaagtagcaggtgtttgtttttaaagcacagccctttgggaaagcaacacattattgagactcactgtgattcccccgggagtcagactggctttgtcctcttcctctctggagggccatgggccatcagcaggagctccacatcgagccccaggccagaaccccctccctttcacagagagggaactttattgcacaattgggtgccttttagcttttgtgtgttgaaatgggcgttttggaagcaagggtcaggggacagcttctaaaggtgtgagtctctgacctgagcatctgggcctcgcctgggcccttcttcctccccaggggtggaaacgtggaggggccagcagcaccccggggtctgcccaggggagtcaaggccccgaggtgggggggcctattccaggaggagtgggatctcggccctgtccagagcgagttaatgtgtccatctgcccaaccctgtcctgagaaaggacctggttttggccaggacctgacaaatacccaatggcagcagtgtcaacagacgggagtccagccagggtgggtgcccttgtcattgaggttagggacagctatccccaggttatgcctggccccacccagcagggagttggggtccccccacaggctgtgagctctgtgggccctgggatgtgatctagctcagatgccttctcatccttgatgtcatagttgagtgcacccaagtggcacccactggcggccaggggcacagcctggtggtggtggcaatagaactgtgcccctcctcagctcctcgcttcccctcccacagccccagccttactccaccatgcggacaatcattttgtacggatcacgggagcaatgctgtacggttttgtacactggtggtttgtttcctagaaaacccattgtgtctctggatttctagcacattactaaaagagcctctgctttgtaaacatggctgctgcctcttgacttctgtggctttgggtattgtcgggagagtggccccatccaaggccatggccattcctgatcctgcctcagccccaccccgagctgtgccctggggtcagccacttggcactggccccaggtgaggaagaactggtaaaagttgggggtgtcattttctctacacttgaaattttgactttttttttatttggaaaagagacagttgaatcccttttctttaccagcataaggcagtcaggcaaacctaagagttgcttatttcggcaacataaggcggggtcattgcatgacagcaagaaggcacgaggtcccctcatctgtcctttcccagctcgcaggccttggaaccccgcccagggccccgctgagggaggcacaggcacagtcctaccgactcctgcctggcagctggaggagcccaggttccagcacaaaggagtctgtggacaggcaggggcagaatcctggagggagcgcctgagccaccatcccatgtggcagctgctggcgtagcagtgcctcgggctggcatcgttttggaagcaagtgggttcagtgaagtgtgttgccacgaatagcacccgctgcttttggctttattaacgtggcaaggagaaattcaaaattaagtatgtctcgaattctgtttgtggcagatggtgcggctctggagctcagccctcggcggcctgattcccaggggtccaagccaccctcattctctgagtcagggttgggcagccacttgtgtcctgagaaggtgccagaaggcctgaagcccaggcaaggggaacgggcagtgcctgtgcctcgggggtacctccagcatggcctggagcacatccagccatccccttcccccaaactccagcccttctcagaggggctctgggggtcattcaagggggacttctagcttctctctggaaccctttgtccagagcaaagccaggtttccaaggtccccacggcaaggctgttgggtgctggcagcaagaggtacacagcagttctcccagctcacagcagtgacctcagatctccagcagcaagggccgcactctcgtgcccacaagggccttgcagaaatgctccggtccctgggcctcccccggcaggaggggcggggctcctgcctgcagtgaggccacagcactaagcggcttcagtcacatgcttttcaggtgaatcactccaaattcagtgaggagggccacgacaaggaagttcaggtagaagaggagcaggcagaagccatagactctgctgagctggaagcactgcaatgggactgagaccagggagaagacgaggctgagccccagggcgcctgccaggacccacaccagcagtccgtctggctccagctgtggaagaatgaggggagagaggctgagtcactgcccgtcacaggccccgccccgtctgtggccaacacaacaatgcagcctcaacaacaatgcagcctcaacaacaatgcagcctcagcaacaatgcagcctcagcaacaatgcagcctcaacaacaatccagcctcaacaacaatgcaccctcaacaacaatgcaccctcaacaacaatgcaatctcagccgagcacagtggctcatgcctgtaattccagcactttgggaggctgaggcaggtggatcacctgaggtcaggagttcgacctgtattggccaggagttcgagaccactggccaatacagtgaaaccctgtatctactaaaaatacaaaaattagccagacatggcagtgtgctactggggaggctgaggcaggagaatcacttgaactcaggaggcggaggttgcagtaagccgacatcgtgctactgcactccagcttgggtgatggagtaagactctgtctcaaaaaataaataaaataacaacaacaacaacaacaacaatgcagcctcaacagtgtttgagggcaccagctgggggccacttaaggaagactggcctgcagcagcccggcctgccctgtgggatggcatgccccaccctgaagttacccagacgtggccccagaagtttccagacgcagaaacagcagggaaaaggaaccttctcttccaacttcagccaggtccacctgcctgggtgcctctcccctgcctcgagtcagatgtcattataattccctctgtttttaatgctgaactctagtcaacgacatgcacaagcggatgttcaccacttactgtgaaatgcatcaagaaacaatatggatgcgttaggccgggcagggtggctcaggcctgtaatcccaacactttgggaggccaaagcgggcagatcacttgaagttaggagttcgagaccagcctgaccaacatggtgaaaccccgtctctattaaaaataccaaaattagccaggtgtggtagcacatgcctgtaatcccagctactcgggaggctgaggcaggagaatcacttgaacctgggaggtggaggctgcagcgagccaagattgcaccactgcactccagcctgggtgacagagcaaaactccatctcaaaaaacaaaagaagaaaaaagaaaagaatagatggaggcatggacagacaggcatggacaaacagacaacaaagcaaaggcagccaaacataaacagtagagtctgggtggtgggaatatgtgtgtctatcatacaagtcttttaactgttctatgtttgagttttcataataaaatggaaaaaatctttataaggcttttttttttttttttttttgacatggagtctcactcttgttgcccaggctggagtgcaatggcgtgatctcagctcacagcaacctctacctcccaagttcaagtgattctcctgcctcagcctcccgagtagctgggattacaggtgtctgccaccacgcctggctaatttttttgtatttttagtagagatggagtttcaccatgttggccagactgttctcgaactcctgacctcaagtgatctgcccaccatggcctcccaaagtgctgggattacatgtgtgaaccaccgcacccagcccataaggtttttgaagaaatggcagctataagtatctactgagtgcctgctctatgccaggcattgtgcgaagggcctaacaggcactgtcgtctttgatctaacaatagtcttgtatggtgggtactaggatggactccattttacagatgaggaaaccaagacccttagacttgactgacttgtccaaggtgctcagcagcactgggcctggcacctctgcctgactctgaacttgggaggatgccgccttctgggtgaaggaggggatggatgaatgataaaggagtggcagcagcagaaatgaatgagcgagagccaaagtgtcaggcacaagacaggctcctctgcgggaggaggagctgacagcaactcccgttctctagaactggggaggagcctgcagatttcagctgcaggtttttatatgtgtagtaggataagtagtgccccacccccaacaaattcacgcccatccggaagctcagcatgtggccttacctgaaatagggtctttgcaaatataataagctaagggtttcaagatacaatcatcttggacttagggtggcccctaaatccaatgactcatgtctccgtaagaagaagagagagatggccatgggaacacagaggcagagactgcagagatgggcccactgggcaaggaacgtcaggagccaacagcagctggaagaggtgaggaaggatcctcctctggagcttggaggtggcactgcccggctgatgccctgattgcaggcttttggcttccagaactgggagagactcaatttctgctgttgtcagccccctggtttgtggtcagttatggcagcactagggaactaacactatctatggtatacatgtcacacatggttgctgacatattttcaagcagtacagaagagtaaaagggactgaaatgtcccctccccgcttctcttccttccacacttagcaggtatatccaacacgcagtgaagacatgaggtaccgtgtgggctgtttctaggcaccgtggcgtttcgtcttcccagccacctgcatcctcctcgtctccaacccacagatgaagaaactgacagagtaagtgacagagcccaaatccaagtgcaagctcttaaccaatgcctatcctcctccccatgggatgccatattacacacgcctgtggacacacacacctctagacatgtacatcaattctgaaaacagagatgggaccgtacaataggtaagtgtttcaaagcgacttgtggttttcaaccaacggtacaccatggacatccttccatgttgatgtctcatgccatttaacggcaggagcgtttcctaaactcagcacaaaggtggtagacacacgcgcacacacacacacacatttcctaaactcagcacaaaggtggtagacacacacacacacacgtacacacacacacacacttcctaaactcagcacaaaggcggtggacacacacacacacacacacacacacacgcgcgcgcacaggagaaaagaggaaataggtcccctgaggagccaaccctaaagcctcattacctggaactaccctagaatctatcatgaaagggaacctattaaacccataaagagggacaacaaagtttgcagagggtgtttacctttcagaaaagaaaatttcaagccctaagtagctgtttgcttgtgggcatggccagtgtgaaagaaacaccctgcccccggctaacaggctctgccgagagcctattcaacaactcgtgcctctgggagaaacgggtgactttattcagcttcataacactcaaagagctttcccatggcgaggcttaaaaccaacccccaggccatctcttcctccccagcctacgtcttccttgctgagtctctggactcaagtcctccagaatagagatgcagggatgggactgccagcggctcaggggtccaatctgcctcatatgcacagggttttgtttgcatgtgaggcagattttcgaatagaaaaaaattcacttaggaatcttgatttcttctctagaggacctggaatatctggccacatgctacctacccaaatcacccacacatctctgtcacctcccctgtgggcagtgctgggatatggtgctcagtctggcccttccgctgcgtgcttatccaggaagctcagctggtgtcatcaatctcattttataggggaggaaattgaggcccagagatgtcctaactccattttttccctttttttctgagatgaagtctcactctgtcgcccaggctggagtgcagtggcgcaatcttggctcactgtgacctccacctcttgggttcaagtgattcccctgcctcagcctcccaagtagctgagattacaggtgtgcaccaccacacctgactaatttttgtatttttagtagagatggggtttcaccacgttggccaggctggtctcgaactcctgacctcaagtgatcctctgcctcagtctcccaaagtgctgggattacaggcatgagctaccacacccggccaagatgtcctagctcactcaaagtcatacagccagggacttaagtgatgggacccagatccaaagccagggccttcctgccccttccccatcaagctacatcttggttatatacacttgtaaacttacaaggaatactcaccttcacttctgtgtggcttcgggagatctggagcaggcagcccagccccacacccacgaggatgtctgcagcccagctcaggaagctttgctggaatggcctgcacataacccaaccacatagcccgttcctcctactgtgttcatccccagggcttgggatgccactgcaagaatgaacttgggccaggcgcagtggctcatgcctgtaatcccagcactttgggaggccaaggcaggaggatcactagaggccaggagtttgagaccagccttggcaacagagtgagacccgtctcaaaaaaaaaatttggtgggggttggaggtagagaagtgcagtggtgtgaacacggctcactgcagcctcgacctcctaggctttgtgattctcccacctcaacctcccaagtagctgggatcacaggcatatgccaccacacctggctaattttttaatttttctgtagagacagggtcttgctgtgttgcccaggcaaatctcaaatcactggactcaagtgattctcgtgcctcaggctcccaaagtgctgagattacaggtatgaaccactgtgcccagacttacaaaaaaaaatgaatttacttggctttctttatgatgtatgcccaactcccccaaacaccatatctgaggagaccctatctttttaggcctttaagaagatgggtgctgagtaagtgttgcagtcagtctctaaggatcgaacaccttagggtgccaggaatgcttggcgcatgtaagcactcagtaggtggggaaaccgaggccaggagagatgaagggactgcccccagtccctagagggaactggtgatagtgtgtgggccgaggccatctctaggggtcgttcagggctccctccttcccagccaacctgggaggtcaggcgaggctgcagcccgaaagccaggagtaggcctcagtgggcgcaaaagggccaccaagggccttgctcagcctgggagttaaaagggcaggcatcactgtctccgcagttagcctgttttgccggccaactgctcacactgcagcccctggtgaggctctgtcatcgtggagcctggagagagcggcccttcaggcactttgtgatcatctttctttctttagcagccaacagtatccactgctggccgaatgcctgccgtgcgccaggcactgtctggaacccacaaccatctggtttcaaagctctttctcttcatagccccaggctggctatatccgtcttttctatatagaccaaaagttggcaaacatcagccctccggccaaatttggcccactaactgcttttataaataaagttttattggaacagagccatggccattcacttatgcactgtctgtgcctgtttctgcactatagcagcagagttgagtagctgcaaaaccgcctgcatggcccccaaagtctaaaatatttattctttgggccaggtgtggtggctcacgcctgtaatcccagcacttggaggctgaggctggcagatcacttgaggtcaggagtttgagaacagcctggccaacatagtgaaaccctgtctctactaaaaatacaaaaattagctgggcgtggtcgtgggcgcctgtagtcccagctactcagaagactgaggcaggagaattgcttgaacccggaaggcagaaattgcagtgagccaagatcacgccaccgcactccagcctgggcaaccgagccagactccgtccccaccctgcaaaaaaaaaaaaaaaaaaaaaaaaaaaagaattctctggcccttttagaaaaagtctgccaaccctaacatagaccatgacatgtcgctatgagcaagagagagagggtcttccataggacacataagctcatcctatgggcacctgcttatcacaccactcactgtcctaacaataatagctgctgtctgctgagcccttaccaggggccaagaatttcattcacctcactggatccttacaacaccacttggaggttagcactccccaaatccctattttaaagccttggagcctgaggctcaggcagccacattacctgccccaggtgttacaccgagaaccaatccccagggtggggcatggagcacaccccacccacggctgtgacaccagtgctaaggccaagaacagaccacaaaggatactgaagatgatgccgccaaagcaggcggagaacgccatccgtgggtagccctggcgagccagtgtgaaatccgagaaggcatctgcacaggaacaagaggggcctgcagtggtgagtcgcttcccccaccctccctggtcatccacgccttcattctcacccacggtcattcaggcaacaaacacagatggatgcccaagtgtgcctgggcactagctggtggggtgctgtgtgagggggcacagcatctgggaagacacacttccctccttaattcctttaccccactctttcacaccaggaacaactttgcaggtgtgaaaaacgcggctaccagctgggcacagtggctcacacctgtaatcccagcactttgggaggccaagatagatggatcacctgaggtcaggagttcgagaccagcctggccaacatgatgaaaccttgtctctattaaaaatacaaaaattagctgggcatggtagtgggcgcctgtaatcccagctactcgggaggctgaggcaggagaactgcttaaacctgggaggcagaggttgcagtgagccaagatcacaccattgcactccagcctgggcgacagagcaagcctccatctcaaaaaaaaaaaaaaaaaaaaaaaaaaaaaaaaaaaaaaaaactacggctaccaatttttcaaagtctcatctgctggtaacatgcacagcacctccacatgaataagaagaaggtgctcaaaaaggtaagtggaaggaggggctagatttcagctccctcatcctcttgtctggatgctctggagcagtgcataacctggccaaccacacctggctgctacagctagggaagggtgtatgtatgtaagtgtgaatgcctgcatgtcacacacccgtgtacacatcaagcacggccggctgcaatgggctccatgtcctgcctgaactctgggagccaccgaccatccccgcatcagagggtggggaagaggcaggggcctctatagagtttcttggtccaactgcagtcagggccatctcaccccaatgctggccactccacagtgacaggggacactgcacaggtgcagagggcagacaccctggacactcctgcccagatgcgactctggctgggggaggaaagagctaagatgtggccgcactcacccccactcaaccccacccagccctgagtcacctccaatgctgttcccccaggccagcagcgtgagccccagcacagtgttgctcagccggaagaccacacccagggaccgcaagatgttcaccacctctgtggcggccgcgttgatccacagggcgctggtcagaaagcccaggaaagcaaagagctgcggagggaatggtttgctgtgggaccaaggccagccccaacaggaacacagcctcagttcctcacctgtgaaacgggatgataacagtatctacctcatgagcttattatgagtataaaacacgttactatatgcattggtgcctgtgcaaagttagtgctcaataaaacgtgagttcaatattattttcttttttccttaataaactccctttcaggccgggcacggtggctcaccgcctgtaatcgcagcactttgggaggccgaggcgggcagatcacctgaggtcaggagttcgagaccaacttggccaacatggtgaaaccttgtctctactaaaaatacaaaaattagtcaggctggtgtcacacacctgtaatcccagctactcgagaggctgaggtgggagaatcgcttgaacccgggaggcagaagttgcagtgagcctagatcatgccagtgtactctagcctgggcgactgagtgagactctgtctcgaaaaaagaaaaaaaataaaaacaaaaaaacctccctttcatatactaaaaaaaaatattattttgtctggaaagggttccttatcactttcatcagatttccagtctatgaaccaaataccacccatcatcccaataagtatccctgtactcattagcggtcactccctagccccaccccaccagcccaactcgaccactactctgctctctgtctctctgaatgtgcctcgtgga

SEQ ID NO: 482 - DNA, 2746 bp, Homo sapiens
agatggtatcgctctgtcacctgggctggagtccagtggcgtgatcatagctcactgtagcctccaacccctgggctcaagtgatcctccccactcagcctacccaagcagctggaactacaggagtggtatgaggagcatgccagggagcaagagcagcagcgacaactcagcagcagtgcagcccccgccgcccagcagcccccaggcagccgccagcgctcccagaccgttacctagcccagcgcccgaaagccgtctcttctatgcaataacacaatagtattactctactgcgatgtacggaactgcggtgtgtgtacacatactcacgtatatgcacatatttatatacaggaagaaaaaagacagacaagatggggcttggtttataaccaccttgccctgtcttccttaactccagaagccagtttggtgaggggtgggggtgcggccaccaggtctgagctcttcctactgtggaaggctccagaaggcccttcacaaggagacccctcacctggatccagtcgactgcggggcttgcccctcatgtgggctggcctccatcggccacgtccaaagctgtcactgctactgcttcaggctcacatccccccgacctgatggcgtgcccgccccctctccctgcggcccatgccacaggtttctgtgttttgctttagggacagaaccacttaggaaggaaagaactcccggtctccagggtggtatttcagtgtctgtgataatgtcacgcaacacctcttcggggaccagtgcccaggatctaatggaagcggaattggggcaactgggcccatgtggccagagctcagttagccagtgccgggcggccacagattacactgaccaatctcctcccttggctctgcaagcctcccacccagccttctctggcttaacccttgttggcgaaaactcttccacagtggcctccttggggacccagaacccggaggaaggggcatgaggcaggaagtggggccgatgtctgcaacccagaccacttcgtggaatgggctcttgaccaaatccctttttttgcgatttacccgttcaagcaaaacaacgttttggttaactaaggattgtgctaaagccgataccaggtccttcacacgtgtgcactaggaacaggagcgaacagcacagagagacgctccctgtgggacgcagcagccccgtggccccggcccagttcccagccaccctccctggctctgctcacaccagagatttccatagcaggagcggttggtgcagaagtaggttcagatgaacctcagttaacgtcgccacccctcctcccaccatggtaccctgtaggagccctgtatgacatctgagcgtggtggaggtaggagggttgccagctgcagtgaccctgccacagaggcagggtcagtgcagaggtcgctttggttccgcttccctgggccacagaacggaacacagcataggttctgcagcaggagccgcagtggcaggatggagggtgcgaagggcaaggagtgcactgctgggcattcctggccagccccggccctctggtgcctgcttcctgtgacttcagaaggcaggtggacagagcctccctctggccttgtcctcttcccagccacagaacgggcagggtggcacccgaccccaggggagcagtacctggtcccccaccccctcctcccaaccacctccaaggccaagctgggtcccatagccagcacggcatggttctccccttccccccttcccaggtcaggggagttggacaagtagcaggtgtttgtttttaaagcacagccctttgggaaagcaacacattattgagactcactgtgattcccccgggagtcagactggctttgtcctcttcctctctggagggccatgggccatcagcaggagctccacatcgagccccaggccagaaccccctccctttcacagagagggaactttattgcacaattgggtgccttttagcttttgtgtgttgaaatgggcgttttggaagcaagggtcaggggacagcttctaaaggtgtgagtctctgacctgagcatctgggcctcgcctgggcccttcttcctccccaggggtggaaacgtggaggggccagcagcaccccggggtctgcccaggggagtcaaggccccgaggtgggggggcctattccaggaggagtgggatctcggccctgtccagagcgagttaatgtgtccatctgcccaaccctgtcctgagaaaggacctggttttggccaggacctgacaaatacccaatggcagcagtgtcaacagacgggagtccagccagggtgggtgcccttgtcattgaggttagggacagctatccccaggttatgcctggccccacccagcagggagttggggtccccccacaggctgtgagctctgtgggccctgggatgtgatctagctcagatgccttctcatccttgatgtcatagttgagtgcacccaagtggcacccactggcggccaggggcacagcctggtggtggtggcaatagaactgtgcccctcctcagctcctcgcttcccctcccacagccccagccttactccaccatgcggacaatcattttgtacggatcacgggagcaatgctgtacggttttgtacactggtggtttgtttcctagaaaacccattgtgtctctggatttctagcacattactaaaagagcctctgctttgt

SEQ ID NO: 483 - protein, 144 aa, Homo sapiens
MTSGGGRRVASCSDPATEAGSVQRSLWFRFPGPQNGTQHRFCSRSRSGRMEGAKGKECTAGHSWPAPALWCLLPVTSEGRWTEPPSGLVLFPATERAGWHPTPGEQYLVPHPLLPTTSKAKLGPIASTAWFSPSPLPRSGELDK

SEQ ID NO: 484 - DNA, 5214 bp, Homo sapiens
cgagactcggtgtctgactgacctttcttttcaccattcaatttattgttccgctcagttgtccccacctcctgaagtctgaccaatcagaagcaccgccattttgacctttcaccaatggaaagacttgggactccctctgggttggactcaacgaagatggagtcttgctacattgcccaggctggtcttgaactgctaggctcaagcagttctcccaccttgacctcccaaagcgctgagattacagaagatgcctctaatggaggagtttctgagcagcacccctggcccagtggctttgaaagggagctcaaaccagagactatttcaagccctggatatcatatcctgagggccacaggagaagagaacatggctgtgagtttggatgacgacgtgccgctcatcctgaccttggatgagggtggcagtgccccactggctccctccaacggcctgggccaagaagagctacctagcaaaaatggcggcagctatgccatccacgactcccaggcccccagtctcagctctgggggtgagagttccccctccagccccgcacacaactgggagatgaattaccaagaggcagcaatctacctccaggaaggcgagaacaacgacaagttcttcacccaccccaaggatgccaaggcgctggcggcctacctctttgcacacaatcacctcttctacctgatggagctggccacggccctgctgctgctgctgctctccctgtgcgaggcccccgccgtccccgcactccggcttggcatctatgtccacgccaccctggagctgtttgccctgatggtggtagtgtttgaactctgcatgaagttacgctggctgggcctccacaccttcatccggcacaagcggaccatggtcaagacctcggtgctggtggtgcagtttgtcgaggccatcgtggtgttggtacggcagatgtcccatgtgcgggtgacccgagcactgcgctgcattttcctggtggactgtcggtattgcggtggcgtccggcgcaacctgcggcagatcttccagtccctgccgcccttcatggacatcctcctgctgctgctgttcttcatgatcatctttgccatcctcggtttctacttgttctcccctaacccttcagacccctacttcagcaccctggagaacagcatcgtcagtctgtttgtccttctgaccacagccaatttcccagatgtgatgatgccctcctactcccggaacccctggtcctgcgtcttcttcatcgtgtacctctccatcgagctgtatttcatcatgaacctgcttctggctgtggtgttcgacaccttcaatgacattgagaaacgcaagttcaagtctttgctactgcacaagcgaaccgctatccagcatgcctaccgcctgctcatcagccagaggaggcctgccggcatctcctacaggcagtttgaaggcctcatgcgcttctacaagccccggatgagtgccagggagcgctatcttaccttcaaggccctgaatcagaacaacacacccctgctcagcctaaaggacttttacgatatctacgaagttgctgctttgaagtggaaggccaagaaaaacagagagcactggtttgatgagcttcccaggacggcgctcctcatcttcaaaggtattaatatccttgtgaagtccaaggccttccagtatttcatgtacttggtggtggcagtcaacggggtctggatcctcgtggagacatttatgctgaaaggtgggaacttcttctccaagcacgtgccctggagttacctcgtctttctaactatctatggggtggagctgttcctgaaggttgccggcctgggccctgtggagtacttgtcttccggatggaacttgtttgacttctccgtgacagtgttcgccttcctgggactgctggcgctggccctcaacatggagcccttctatttcatcgtggtcctgcgccccctccagctgctgaggttgtttaagttgaaggagcgctaccgcaacgtgctggacaccatgttcgagctgctgccccggatggccagcctgggcctcaccctgctcatcttttactactccttcgccatcgtgggcatggagttcttctgcgggatcgtcttccccaactgctgcaacacgagtacagtggcagatgcctaccgctggcgcaaccacaccgtgggcaacaggaccgtggtggaggaaggctactattatctcaataattttgacaacatcctcaacagctttgtgaccctgtttgagctcacagttgtcaacaactggtacatcatcatggaaggcgtcacctctcagacctcccactggagccgcctctacttcatgaccttttacattgtgaccatggtggtgatgacgatcattgtcgcctttatcctcgaggccttcgtcttccgaatgaactacagccgcaagaaccaggactcggaagttgatggtggcatcacccttgagaaggaaatctccaaagaagagctggttgccgtcctggagctctaccgggaggcacggggggcctcctcggatgtcaccaggctgctggagaccctctcccagatggagagataccagcaacattccatggtgtttctgggacggcgatcaaggaccaagagcgacctgagcctgaagatgtaccaggaggagatccaggagtggtatgaggagcatgccagggagcaagagcagcagcgacaactcagcagcagtgcagcccccgccgcccagcagcccccaggcagccgccagcgctcccagaccgttacctagcccagcgcccgaaagccgtctcttctatgcaataacacaatagtattactctactgcgatgtacggaactgcggtgtgtgtacacatactcacgtatatgcacatatttatatacaggaagaaaaaagacagacaagatggggcttggtttataaccaccttgccctgtcttccttaactccagaagccagtttggtgaggggtgggggtgcggccaccaggtctgagctcttcctactgtggaaggctccagaaggcccttcacaaggagacccctcacctggatccagtcgactgcggggcttgcccctcatgtgggctggcctccatcggccacgtccaaagctgtcactgctactgcttcaggctcacatccccccgacctgatggcgtgcccgccccctctccctgcggcccatgccacaggtttctgtgttttgctttagggacagaaccacttaggaaggaaagaactcccggtctccagggtggtatttcagtgtctgtgataatgtcacgcaacacctcttcggggaccagtgcccaggatctaatggaagcggaattggggcaactgggcccatgtggccagagctcagttagccagtgccgggcggccacagattacactgaccaatctcctcccttggctctgcaagcctcccacccagccttctctggcttaacccttgttggcgaaaactcttccacagtggcctccttggggacccagaacccggaggaaggggcatgaggcaggaagtggggccgatgtctgcaacccagaccacttcgtggaatgggctcttgaccaaatccctttttttgcgatttacccgttcaagcaaaacaacgttttggttaactaaggattgtgctaaagccgataccaggtccttcacacgtgtgcactaggaacaggagcgaacagcacagagagacgctccctgtgggacgcagcagccccgtggccccggcccagttcccagccaccctccctggctctgctcacaccagagatttccatagcaggagcggttggtgcagaagtaggttcagatgaacctcagttaacgtcgccacccctcctcccaccatggtaccctgtaggagccctgtatgacatctgagcgtggtggaggtaggagggttgccagctgcagtgaccctgccacagaggcagggtcagtgcagaggtcgctttggttccgcttccctgggccacagaacggaacacagcataggttctgcagcaggagccgcagtggcaggatggagggtgcgaagggcaaggagtgcactgctgggcattcctggccagccccggccctctggtgcctgcttcctgtgacttcagaaggcaggtggacagagcctccctctggccttgtcctcttcccagccacagaacgggcagggtggcacccgaccccaggggagcagtacctggtcccccaccccctcctcccaaccacctccaaggccaagctgggtcccatagccagcacggcatggttctccccttccccccttcccaggtcaggggagttggacaagtagcaggtgtttgtttttaaagcacagccctttgggaaagcaacacattattgagactcactgtgattcccccgggagtcagactggctttgtcctcttcctctctggagggccatgggccatcagcaggagctccacatcgagccccaggccagaaccccctccctttcacagagagggaactttattgcacaattgggtgccttttagcttttgtgtgttgaaatgggcgttttggaagcaagggtcaggggacagcttctaaaggtgtgagtctctgacctgagcatctgggcctcgcctgggcccttcttcctccccaggggtggaaacgtggaggggccagcagcaccccggggtctgcccaggggagtcaaggccccgaggtgggggggcctattccaggaggagtgggatctcggccctgtccagagcgagttaatgtgtccatctgcccaaccctgtcctgagaaaggacctggttttggccaggacctgacaaatacccaatggcagcagtgtcaacagacgggagtccagccagggtgggtgcccttgtcattgaggttagggacagctatccccaggttatgcctggccccacccagcagggagttggggtccccccacaggctgtgagctctgtgggccctgggatgtgatctagctcagatgccttctcatccttgatgtcatagttgagtgcacccaagtggcacccactggcggccaggggcacagcctggtcttactccaccatgcggacaatcattttgtacggatcacgggagcaatgctgtacggttttgtacactggtggtttgtttccta

SEQ ID NO: 485 - protein, 892 aa, Homo sapiens
MERLGTPSGLDSTKMESCYIAQAGLELLGSSSSPTLTSQSAEITEDNGGVSEQHPWPSGFERELKPETISSPGYHILRATGEENMAVSLDDDVPLILTLDEGGSAPLAPSNGLGQEELPSKNGGSYAIHDSQAPSLSSGGESSPSSPAHNWEMNYQEAAIYLQEGENNDKFFTHPKDAKAAYLFAHNHLFYLMELATALLLLLLSLCEAPAVPALRLGIYVHATLELFALMVVVFELCMKLRWLGLHTFIRHKRTMVKTSVLVVQFVEAIVVLVRQMSHVRVTRALRCIFLVDCRYCGGVRRNLRQIFQSLPPFMDILLLLLFFMIIFAILGFYLFSPNPSDPYFSTLENSIVSLFVLLTTANFPDVMMPSYSRNPWSCVFFIVYLSIELYFIMNLLLAVVFDTFNDIEKRKFKSLLLHKRTAIQHAYRLLISQRRPAGISYRQFEGLMRFYKPRMSARERYLTFKALNQNNTPLLSLKDFYDIYEVAALKWKAKKNREHWFDELPRTALLIFKGINILVKSKAFQYFMYLVVAVNGVWILVETFMLKGGNFFSKHVPWSYLVFLTIYGVELFLKVAGLGPVEYLSSGWNLFDFSVTVFAFLGLLALNMEPFYFIVVLRPLQLLRLFKLKERYRNVLDTMFELLPRMASLGLTLLIFYYSFAIVGMEFFCGIVFPNCCNTSTVADAYRWRNHTVGNRTVVEEGYYYLNNFDNILNSFVTLFELTVVNNWYIIMEGVTSQTSHWSRLYFMTFYIVTMVVMTIIVAFIAFVFRMNYSRKNQDSEVDGGITLEKEISKEELVAVLELYRERASSDVTRLLETLSQMERYQQHSMVFLGRRSRTKSDLSLKMYQEEIQEWYEEHAREQEQQRQLSSSAAPAAQQPPGSRQRSQTVT

SEQ ID NO: 486 - DNA, 5978 bp, Homo sapiens
cgagactcggtgtctgactgacctttcttttcaccattcaatttattgttccgctcagttgtccccacctcctgaagtctgaccaatcagaagcaccgccattttgacctttcaccaatggaaagacttgggactccctctgggttggactcaacgaagatggagtcttgctacattgcccaggctggtcttgaactgctaggctcaagcagttctcccaccttgacctcccaaagcgctgagattacagaagatgcctctaatggaggagtttctgagcagcacccctggcccagtggctttgaaagggagctcaaaccagagactatttcaagccctggatatcatatcctgagggccacaggagaagagaacatggctgtgagtttggatgacgacgtgccgctcatcctgaccttggatgagggtggcagtgccccactggctccctccaacggcctgggccaagaagagctacctagcaaaaatggcggcagctatgccatccacgactcccaggcccccagtctcagctctgggggtgagagttccccctccagccccgcacacaactgggagatgaattaccaagaggcagcaatctacctccaggaaggcgagaacaacgacaagttcttcacccaccccaaggatgccaaggcgctggcggcctacctctttgcacacaatcacctcttctacctgatggagctggccacggccctgctgctgctgctgctctccctgtgcgaggcccccgccgtccccgcactccggcttggcatctatgtccacgccaccctggagctgtttgccctgatggtggtagtgtttgaactctgcatgaagttacgctggctgggcctccacaccttcatccggcacaagcggaccatggtcaagacctcggtgctggtggtgcagtttgtcgaggccatcgtggtgttggtacggcagatgtcccatgtgcgggtgacccgagcactgcgctgcattttcctggtggactgtcggtattgcggtggcgtccggcgcaacctgcggcagatcttccagtccctgccgcccttcatggacatcctcctgctgctgctgttcttcatgatcatctttgccatcctcggtttctacttgttctcccctaacccttcagacccctacttcagcaccctggagaacagcatcgtcagtctgtttgtccttctgaccacagccaatttcccagatgtgatgatgccctcctactcccggaacccctggtcctgcgtcttcttcatcgtgtacctctccatcgagctgtatttcatcatgaacctgcttctggctgtggtgttcgacaccttcaatgacattgagaaacgcaagttcaagtctttgctactgcacaagcgaaccgctatccagcatgcctaccgcctgctcatcagccagaggaggcctgccggcatctcctacaggcagtttgaaggcctcatgcgcttctacaagccccggatgagtgccagggagcgctatcttaccttcaaggccctgaatcagaacaacacacccctgctcagcctaaaggacttttacgatatctacgaagttgctgctttgaagtggaaggccaagaaaaacagagagcactggtttgatgagcttcccaggacggcgctcctcatcttcaaaggtattaatatccttgtgaagtccaaggccttccagtatttcatgtacttggtggtggcagtcaacggggtctggatcctcgtggagacatttatgctgaaaggtgggaacttcttctccaagcacgtgccctggagttacctcgtctttctaactatctatggggtggagctgttcctgaaggttgccggcctgggccctgtggagtacttgtcttccggatggaacttgtttgacttctccgtgacagtgttcgccttcctgggactgctggcgctggccctcaacatggagcccttctatttcatcgtggtcctgcgccccctccagctgctgaggttgtttaagttgaaggagcgctaccgcaacgtgctggacaccatgttcgagctgctgccccggatggccaggtactgccagcccccaccctggcctgcaggtccaggtgccgtgtggcagtgccccgtgggggcgggagccgagtggcagtcgggggaaaggagttccacaaaggactgcaatcgagggcctgacggggctccaaggagcctggaatcttgaccaccacaggtctcctgggcaccatttttctccactgacctgtctgacatatttagtagggagggcagggagctgtcaactcgcttaccacctgtgtctacattcacaggtaaggggtcacctgtgagtctaccttcacaggtaaggggtgaatctctgggaaaggggcatttgttcatagcgtcctgacttgagctgtttttcaccccagagctgccccacgaggccccttccccgcaggcactttccagttggtgaaccgaccaggggcatggccctgcagtcagccccacgggtccgaggaggccggggctgcagaggagccgttccctcctgccggccccgcgtcaccctgcccctgtcgccccacagcctgggcctcaccctgctcatcttttactactccttcgccatcgtgggcatggagttcttctgcgggatcgtcttccccaactgctgcaacacgagtacagtggcagatgcctaccgctggcgcaaccacaccgtgggcaacaggaccgtggtggaggaaggctactattatctcaataattttgacaacatcctcaacagctttgtgaccctgtttgagctcacagttgtcaacaactggtacatcatcatggaaggcgtcacctctcagacctcccactggagccgcctctacttcatgaccttttacattgtgaccatggtggtgatgacgatcattgtcgcctttatcctcgaggccttcgtcttccgaatgaactacagccgcaagaaccaggactcggaagttgatggtggcatcacccttgagaaggaaatctccaaagaagagctggttgccgtcctggagctctaccgggaggcacggggggcctcctcggatgtcaccaggctgctggagaccctctcccagatggagagataccagcaacattccatggtgtttctgggacggcgatcaaggaccaagagcgacctgagcctgaagatgtaccaggaggagatccagagatggtatcgctctgtcacctgggctggagtccagtggcgtgatcatagctcactgtagcctccaacccctgggctcaagtgatcctccccactcagcctacccaagcagctggaactacaggagtggtatgaggagcatgccagggagcaagagcagcagcgacaactcagcagcagtgcagcccccgccgcccagcagcccccaggcagccgccagcgctcccagaccgttacctagcccagcgcccgaaagccgtctcttctatgcaataacacaatagtattactctactgcgatgtacggaactgcggtgtgtgtacacatactcacgtatatgcacatatttatatacaggaagaaaaaagacagacaagatggggcttggtttataaccaccttgccctgtcttccttaactccagaagccagtttggtgaggggtgggggtgcggccaccaggtctgagctcttcctactgtggaaggctccagaaggcccttcacaaggagacccctcacctggatccagtcgactgcggggcttgcccctcatgtgggctggcctccatcggccacgtccaaagctgtcactgctactgcttcaggctcacatccccccgacctgatggcgtgcccgccccctctccctgcggcccatgccacaggtttctgtgttttgctttagggacagaaccacttaggaaggaaagaactcccggtctccagggtggtatttcagtgtctgtgataatgtcacgcaacacctcttcggggaccagtgcccaggatctaatggaagcggaattggggcaactgggcccatgtggccagagctcagttagccagtgccgggcggccacagattacactgaccaatctcctcccttggctctgcaagcctcccacccagccttctctggcttaacccttgttggcgaaaactcttccacagtggcctccttggggacccagaacccggaggaaggggcatgaggcaggaagtggggccgatgtctgcaacccagaccacttcgtggaatgggctcttgaccaaatccctttttttgcgatttacccgttcaagcaaaacaacgttttggttaactaaggattgtgctaaagccgataccaggtccttcacacgtgtgcactaggaacaggagcgaacagcacagagagacgctccctgtgggacgcagcagccccgtggccccggcccagttcccagccaccctccctggctctgctcacaccagagatttccatagcaggagcggttggtgcagaagtaggttcagatgaacctcagttaacgtcgccacccctcctcccaccatggtaccctgtaggagccctgtatgacatctgagcgtggtggaggtaggagggttgccagctgcagtgaccctgccacagaggcagggtcagtgcagaggtcgctttggttccgcttccctgggccacagaacggaacacagcataggttctgcagcaggagccgcagtggcaggatggagggtgcgaagggcaaggagtgcactgctgggcattcctggccagccccggccctctggtgcctgcttcctgtgacttcagaaggcaggtggacagagcctccctctggccttgtcctcttcccagccacagaacgggcagggtggcacccgaccccaggggagcagtacctggtcccccaccccctcctcccaaccacctccaaggccaagctgggtcccatagccagcacggcatggttctccccttccccccttcccaggtcaggggagttggacaagtagcaggtgtttgtttttaaagcacagccctttgggaaagcaacacattattgagactcactgtgattcccccgggagtcagactggctttgtcctcttcctctctggagggccatgggccatcagcaggagctccacatcgagccccaggccagaaccccctccctttcacagagagggaactttattgcacaattgggtgccttttagcttttgtgtgttgaaatgggcgttttggaagcaagggtcaggggacagcttctaaaggtgtgagtctctgacctgagcatctgggcctcgcctgggcccttcttcctccccaggggtggaaacgtggaggggccagcagcaccccggggtctgcccaggggagtcaaggccccgaggtgggggggcctattccaggaggagtgggatctcggccctgtccagagcgagttaatgtgtccatctgcccaaccctgtcctgagaaaggacctggttttggccaggacctgacaaatacccaatggcagcagtgtcaacagacgggagtccagccagggtgggtgcccttgtcattgaggttagggacagctatccccaggttatgcctggccccacccagcagggagttggggtccccccacaggctgtgagctctgtgggccctgggatgtgatctagctcagatgccttctcatccttgatgtcatagttgagtgcacccaagtggcacccactggcggccaggggcacagcctggtggtggtggcaatagaactgtgcccctcctcagctcctcgcttcccctcccacagccccagccttactccaccatgcggacaatcattttgtacggatcacgggagcaatgctgtacggttttgtacactggtggtttgtttcctagaaaacccattgtgtctctggatttctagcacattactaaaagagcctctgctttgt

SEQ ID NO: 487 - protein, 698 aa, Homo sapiens
MERLGTPSGLDSTKMESCYIAQAGLELLGSSSSPTLTSQSAEITEDNGGVSEQHPWPSGFERELKPETISSPGYHILRATGEENMAVSLDDDVPLILTLDEGGSAPLAPSNGLGQEELPSKNGGSYAIHDSQAPSLSSGGESSPSSPAHNWEMNYQEAAIYLQEGENNDKFFTHPKDAKAAYLFAHNHLFYLMELATALLLLLLSLCEAPAVPALRLGIYVHATLELFALMVVVFELCMKLRWLGLHTFIRHKRTMVKTSVLVVQFVEAIVVLVRQMSHVRVTRALRCIFLVDCRYCGGVRRNLRQIFQSLPPFMDILLLLLFFMIIFAILGFYLFSPNPSDPYFSTLENSIVSLFVLLTTANFPDVMMPSYSRNPWSCVFFIVYLSIELYFIMNLLLAVVFDTFNDIEKRKFKSLLLHKRTAIQHAYRLLISQRRPAGISYRQFEGLMRFYKPRMSARERYLTFKALNQNNTPLLSLKDFYDIYEVAALKWKAKKNREHWFDELPRTALLIFKGINILVKSKAFQYFMYLVVAVNGVWILVETFMLKGGNFFSKHVPWSYLVFLTIYGVELFLKVAGLGPVEYLSSGWNLFDFSVTVFAFLGLLALNMEPFYFIVVLRPLQLLRLFKLKERYRNVLDTMFELLPRMARYCQPPPWPAGPGAVWQCPVGAGAEWQSGERSSTKDCNRGPDGAPRSLES

SEQ ID NO: 488 - DNA, 24634 bp, Mus musculus
  misc_feature (1)...(24634): n = A,T,C or G
tccatcaagaagctactacgaatgtaacagacatgtgcccagtttcacagaagaaatactattagatgtccaatcccagattaactccaaatcagaggtcgtaggtaacttcagagtccaccctcatcaataatcagattcatctagacaaagattaaacagaaagacattgaattttaagtaacatcataaataagacagagttaataggcatctacagaccattccactcaaacactaaatatgcattctaactagactgtagtggcacacacctttaatcccagtacttgggaggcagaggtagtcagatatctgtgagtttcaggccttcctgctctacagagcaagcgtcagaacagtcagagatgttgtgtaccaaacaaagaaacaaagaaaagaccaaaacaaacaaacaaacaaaacaaacaaaaaatgcattcttctcagcagaccatgggactttctccaaaactgatcacatattaggacataagacatgtctcaacaaatacagcaaagttgaaataacaccttgtattctatctgggccccatgggataaagctagacattaacattatgatgttaacactacagaaaatttgcaaactcatggaaactaaagaatccattgttggagtcacttaagaaataaagaaggaacgataactactcatgtgttctcatgagagtcctggcttctagtcctttgtgtcttcagcttggagtacatgtgaaaacaagaaactattgccaggccatgggaaagtgcaagaatgagggagatagtcgaatatgggggttttattacaaaggttgagaagggggatattgggagttgaaaagttcaagcaaggagtgaaataagaggaaagaaaaatgaggggccagaggaaggctcaaccactacaaatgcctgagtcgtatgagaaaagtgtatggaaacctacggtcttataacctaagtaaaaaaccataggcagaggcattgcaacacaaatgctatgaaaaatcagtggaaatcctgggccgtcaaggtttaagtgggtatggattacactactgtaatcccaccacctagaaggcagaagcaggtggatctccgtgattgtgaggccagcctggtctgtatagtgagttgcagaacagctaaagctacatagagagaatctgtctcaaaacaagacaaaacgtgtgtgtgtgtgtgtgtgtgggtgtgggtgtgtgtgtgtgtgtgtgtgtgtgtgggtgggtgtgtgtgtgtgtgtgtgtgtgggtgtgtgtgtgtgtgtgtgtgtgtgtgtgtgtgggtgggtgtgggtgtgtgtgtgtgtgtgtgtgtgtgtgtgtgtgtgtgtgtgtgtgtgtgtgtgtgtgtgtgtgtgtgtgtgtgtgtgtgtgtgtgtgtgtgtgtgtgggtgggtgtgggctaggattggtgggtaatggagagactcataactgatcaaaatgctaaggaagagtgacgatgggtgctcaaccatagatcaagcatctatgctgacctcccagccttatggctcaggaaacatcacagaaggggatcggggtagaaagacttgggggaatgaggaggagtgctgtcctttggatggaacatggttgctgtgtgcatgaacttggagcagtagacatgcataagaccaagccaggtttaataccattatagacaagggacatgctcctgagagctcaccctcagatgagaggcttctggcaactggtggctgacaggggaggaagggtcacatttgtttagggtataagtactgatgtgttacccatgccccgggggatggcccttatacccgagagcatgaaggtagtgctaattgaacacagtgggtttcataaaaacaaacaaacaaacaaacaaacaaacaaataaatcaggcacaaggttggaagggagatgtgctaaggaagcttagagagagctgaggggctttgggagtggatttgatacataatgttgtgtatagcttttcagagaataaatagtttaaagcaaaaagagactaaaaactcaataaaaatccctggttttattttgttttgttggtggttggggagggcactggagaagtgaaagcctataatcttaacatttagaaaaggtggagcaagaggactaggagttcaaggtcatccttggctacccaggtgattaatagctagcacaggctacaaaagaccctgtctcaagacaaacacaaagaagcagcttgactctttcatattcagccatgtgaacacttagcatttgcccctttaactatctgaagacttatctgaagaggtaccaacttggaaacaaagatccaacctcacccccatgtccttcatactccatttgcttgcttgggtccatccatccatccatccatccatccatccatccatccatccatccatccatccatcttctatctatttagaaatataatttcattatttatctttatctgggatggaactagcaatggagactaggctagcctcaaactcacagagatccttctgccttttcctcctgagtgctggggttaaaggcatacacatgtctagctaaatttggcagtctcttgatattggacatcacagtgtatagaactggtatatatttgtgttatttgaaaactactcactctaatgtactttgttacattaccaagaatagtctaacacaatcctaatctcaattttgatgaagtgagagagaacaggtggtatcatagggttttactgctgtgaacagactccatgaccaaggcaagttttataaaggacatttaattgaggttggtttacaggttcagaggctcagtccagtatcatcaaggtaggaacatggcagcatccaggcaggcatggtgcaggaggaaccaagagttctacatcttcatctgaaggaagctagcaaaatactgacttccaggcagctaggactagggtattaaagctcacacccacagtgacactcctattccaacaaggtcacacctctaaatagttccactccctgggctgagcatatacaaaccatcataggtaggaagagagagagagagagagagagagagattatttttcatgacttaccctgaaaatcattagtataatttcttccttatgctggttagaaaaggtccaggttcaagtagaggctccacagagtccagctctggtggtcaagtataacatttatatgtaagaagggggcatggggagaaagggagtcagatacagtgttcacagacgggaaagaacttccccctagagagctacattctgctgaatgcttaaagtgtgaacactggctgaagccgctttcatacaagtaacttctcaaggaattaatttttccatatgcccttagctagaaaacttctagacagttccaccagcagtgtagcacatatacgatgataaagagccaggacatgaagctccaatgaggagagagataaggggaacctcaggatgacaggcaggtagcagccaggactgcagaagtcaaggcctccagaaaggtgtctgcatggatttggtgtgttttctcatgtatttgaaggaatactctatgactgtgtattaactgattgtaagtatacaggaaattgagcaaatacaagaagatgcagggtcagcaaaatgtctcagtgggtgaaggcacttgctgacatgcctaaccacctgggacccacatggtggagggatagaaccaactttcccatttactatctgacttctacttgttctccccattacagacagacagacagacagacagacagatacacacacacagaactaactaactaaatatatcttttaaagggaaaggaatatacaaaaagtatattttgtacatactcatggtagcacatatccatgtttacagcaattgggagtctgaggcaggaagactgctgtaagcttggatgctggcctgggctataaagtaagtatcaggcctgacagagctgtataacaatttatttttcacattaaaacaaaaaggtatatgtcttccacacgcctgtgagagcagtgtttgtgagggggaggggggatagaaagatcagcaaagttgaaacagacattcttctacccgaataataggagttccggagatgggaagatgaaaataacaaagacatgagttcagacagtgttcagaactgaaaaggtgaaaggggctggggaaaagttacattattctggaacactgagaaaagaagaatccacctatagacaagaagtaaggtagatatgtcacattctgcattcgggaagctttaaaactagacattaaagataaaatgaaaccttcaattctcagggatatagatatagttatagatatggatatggatatagatatcagacatgtaggctttggaacatttacagcacaagtattgtctttaagagtaaattagtcaacatttcatcatgaaactttttttagacattacagcatggcaaaaataaaatctataaataacattaaatactactaatacaactatagacatataaacacaggactaagggatttttcccaatagccatcagaagcatcaacaggtctctgcctacgggaggtggggagctgaggaccagcgagcacccaagaagagacactcgtttttacgaatcaagtactctttcatgttctctaaatgatgtgcacatattggcttgttgaagaatggttttgtcaaggccggagacaagactccatggctacaagtacttgctgctaagtctgactaatgagtttgatccccaggaatgacttggttgcaaggaggcaattgccttcctcaagctgccggctgacatccctgtgcatgctgtggcatccttgtccttcccaacaacatgcgcatctaagaaaggtaatgaaacgactgttctaaaatcagaaagaagtgaatgagaagttggagatgcgatcatgacagcaacaggagatgcgaagatgctttctctgttgttgaggttgccataggaagccctaagtcttaaaatgacttaaagagaaggaatatcaccctccgggaagttgatggaggagctgtggtgtgactcactggcagagagcttagttaacatcagagaaagccctgagtttgagcacagcacagcttcgcttaccaccaactgtagatacagtaagtaaaggaaaccgtgcagagacataggcatgtagcacaaaactggcaacagtaaggctgagcccaagtctgttttcagggctctaccatacttatctatgcagtttggagtgttggcaagcaagaaggtttatggtgaacccttggataagcagaagacaatgaggttttggtataagaaacacatagatgttgatacaacttgaaggctaaaagtcatcagaaaccaatctagacatgctggcacattcctgtaaccccagcactcaggaccgaggcaggaggcactggaggctggtgtaagaatctgtgtcagaagaaaagaacacacacacacactctctctccacccccaacacacacacacacacacacacacacacacacacacacacacacacacacacacacacacacactcacactgagagcgagtaagcgagcgagcaggagagagacagagacagagacagagacagaaacagggagagagacacagagacacagacggggagatagatagagacagatacagagaaactaaaaatattagaaagcaagctgtgccagaggtctggggagcaggctcagtggttaagagcactcactgctcttccagaggacacaagttctgttcccagcacccacgtgggacagctcaggacatcctgtaactccagctccaggatatctgatgcttttctctggcctccgtgtgaacccctacatacgtgtaaataaaaccaaaaataaatctttgggaaaagaaataaccaaaaactgtttacaagagggattgcgcaatggagccgggtcttagggtcttagaaagctttgagggagccagtgaggtggttgatagggaaagactttgcttttaaagagtgaaatgggtttcgcttgtcaagcaggtagaacagacctgctgggggcagctctgttaattgagagtcagagagtcaggaaagggaggttgtcatacagttttctctgtgagaaatgggagactggttgtttgcctatgaataaatgagaaagaactcggttgcatttccctgggtcttgagaggcgggatgagttgaaaatcaaccagaataaatagaaaagagagtagtcagaaattaacaaagagaaggcataatcaactcctttaccttttattccccagatggacgagcatttacttattgatctatactacatagcttaaggatcctgtgtcatttcatctgacagctcttaaggaaaaacaccgaagggcagggaagccaccttgaaattagtaccctgaagtgaagccaccttaacgggaacaggacatacagcggaagtgtgtccttaagtttgtccttagtaaggtaggaatgcagggagtagcttccagccagaaaaagggctagacttctggccaggaattagctggagggcatagttcttagagctgtcttctacctgtgggtcttaaagggcgtggtgctagaaacctggaatttaccagaactcgtcgtctaggaacaagccttgctggattttaccatttgcccaacggtcttacacattttacatcccagagatgtataataatggtgaccattaccaaatcaccgtctgcaagacatctgtgctctttacaatacttggccaggcctgcatgttgtcctcagtgatggtcagaaaagatttcccacaagtaattctttagtacacttgaggtttatctaagtggtttggtagtggtggttatgattctacagtctgtctatggtcatgtctcacattaaccaacacgtttaatatatctggagcccatgtttttcttgtttataaaattagaataataatagtatgtaactaatatatttactgaaagtataagttttctctaggtctgtaatgtgggcactgagaagcgtcaaggaggtagctaagttggtagagtacttgcctagcttgcataaagccctgggtttggtcccctgttctgtttaaacataaagccaggtgtgatggtgcatacctgcaataccaacactagaagtagaagaaggagtatcagaaactgaaattgtgtatggtgaatatgagtgcattttgaggccatcctgggctacataagattctaatacctatagttatgtagacctatatctacacatgggtcatatggactcttggttgtcaatctggaatcagctaaaacccaagcagctaggcatgcctgagaggggttttcttgacaggatcatttgaagtgagaagacccaccccaaatttagggcataccgtttggtggcagcccccctaaaccgacatggaagaaggaagcttttgctttttgcctgctcaccttcactctagctgacaagttcatctgctctgctgcggaggcatcccttccccactcctaggacctacctcttcaagacttcgatggaggctgatgagcagcagttctctaggactccagaaccagactggggttgatgaaccgattggctactggatgcttggcttttctgtcaggacatagccattgttggactagccagccagaccaccattagttctgttccttcaaagaaacctgactatacaatgtcagtatttttcagtatttttttcccttctttctttttgtttgagacaaggtctcactatatagccctggctagcctggatctaactatatagacaagtctggcttcagacttacagaaatctaccccacacttgcctctggaatgttggaattaaaggcatttgtcactatgcgtagcctatctttttcttttcacagtattgggaactgaatccaaggtattgcacttactaagaaaacagtctacctctgcaatatacccaagcctttgcttgtgtgtgtgtgtgtgtgtgtgatatacagtctcaagtatctcaaggtggtctccaattcactatatagctgaggataaccttgaacttctgatcttcctgcctctacaaattcctagattacagacatgcaccattgtgcctggctatttgtgtatatcaatgatatggatgcatagctaagtggaataacccaagcttgagagcttcactctcctcccacaaaagaacacactgtatacattagtaatagttttatgcacatgtaaagacaagtacaatcagaagtacaaatgtaaggagtccaagtgcagaagtctcctctgttcaggaaaggaatgtgaagttctaagctgattgacagcatttgagcagacaggcaagacaacttagatttggtgacccatctctgccgcatactacctggacaatctacaggtctctcagagctgagggattgctcatgggtagaacggcccatgctactccattgcttcatgggacagtggccatcacatcttgggacaacaaagtgcacagttcccctttaaagacctcataaattgttagtgggagaaggggaagctaactccttgcctctgcagcactgcgatagacagaagttatctcctctttcaaatgaaaccagtctcaaactctgtcttttctggaggagactggacggctgttatcttggtttccatattgttttgcaagatctgtagtttgtgggtaggtaaggtaggaaactgtcaatgagtgcttctaggcaaatatgaattaacagctacttttttttttttttttgcaagctcataaaatcccagaaggtaggggtctgttgtttgtttcttctatctctcttgagtcattcaggtacagggtgtgtctgttaattgaaactgcacagcagaggaagttttgtgatcacatctgctcagggtgggaaggcagtgagaacaggggacttgggtggaaccactttttaacagaaggacagacagacaaggcataaaaggcctcaatctgctactcagacaaatctgaccaaggcctcttcagcctcaatctagcattatctaacagtagaaaaatgtggacaaggtgcaattccttagatttggggatctcttagttatctctacgtagacagggagagaagaggggtccagctttaggcagggggctgtaggcactggccagtgaaaggacaggcaacctctttcccctgtggacattcctgaactgctgctggattgtttaaatctctgaggccagggcagcagcccacctcctcaaaggcctctgagcttcccagaatctggggcacgcctggcttttcggtcagctgagagaggggaacccccggtccaacatcaagcacagcactggcccacttcaccgtgcacccggggaaagccactttctgcccaccagaccgcaagtttcaaggcttcaccaggatcggagtggagggggtggaggaagaggaggtggaggacagaagcttttcagtacttcggggctgctctcctccgaccttctcaggatcccctctctgcggcgtggctgcggctctccgggcagtggctcgggtttcccctgaccgcgtggaagtggcccccagggcaccggaccactcgggctacacggatcctcagggctgtggggtctgggaccagaaagctcctctaccaagtgcaggcttgtcctctgtcctctaagatttttaacgaagaaaagttttcccagggatccccatgcctagtttcagagtccgtcccgcgctggggactgcgggaagctgtgtgaattagaatttaggagctgccaggctccgccccttctcttcccttctctctgctggttggggcggaggggctcctattcatttggttttattttagtcactctgccccagatctttctgggaggctgcttcttagcagcccagaccctgaggggccccctgccgctggcagagggcggaggagttaaaagcattaacccctcccagtcccttcctagaggagccacccagcctcggcggggcgctcagagacttcgtcttgcaaaagtggtgcgggcagcgcaggcagggctggccattggagtgcaccgctgaggagggaggggaccccagctcagggaactttgcgagtgagctggtcgccgtcagtcgccgacagcagcaagatgcggatcgcgcggtgtagacccagagtcctgcggacgcagcttcgtccggcttgagcgaggtagggggttgtgagcctcgcaggctccggctatggggcgtccaggtgtcaagaacgaacctttaaacacaaacgaaacaaacaaaaactttgagaaaaaacaaagcaaaacgaacccgggcatcaccaagatgctatggagtccttcttgactgacttcttcttggggcacggagtttatgaagttagaaaaaaaaagattaatttccaaattatagaaacgactgggggagggcatgctagagaagctgtgattcattagaacggagaaaagggaagacgcttattattttttttttttttgaaatcctgtagacaaaattatcaggcaccacgccaataatttccattgcctgagaatggactgtagcgataagagtggagaaatgttgagtttcgtaagcttttgtcacagaaatgactacaatgtctctagggtcccctcccccctcatttgttatagagttgatcaattactgtgcagactttagagtacttatttagtgctgtgtgtccaacttaagtagtgctgtgtgccctttagggattgctagttctgttgagaggaggcaatgttgggggtgtggggagcggaggaagttaaaagtgcccatgcaaacttagcagtatgtgtttctggaaattaatgtacctgaagttaaaacaaagtggcgtgcttcgttatcgctagcagggtgactttcgtgtgtgtgtgtgtgtgtgtgtgtgtgcaagtaagcgttggctaaagttaaaactttcttaagcaatcagttcatggagaaacgtctaggatttgctgcaatctcttaggaggggttctccgtgaatacctttaaacgtaataaatgaacttgtggggcggttgggtgaggcggaggagtaaagacagaagttttaaaaagaagaataggcagttgcttcacggaggcgccaagctttcctgtttacttcaaggcctggcggcccacaccacacctcgctttaccctctgaccatcggaccctcagcacacctgctcctagggagttattaatagagcccagaaaacggcttacttgtcaaatgacctcctacaaagctactttttttttttttggcatggtaatgagaaggtgggctggtctcttcgaggtgtgtgtgtgtgtgtgtgtgtgtgtgtgtgtgtgtgtgtgttggggtatgcatgtctgccctgcacccagaatgggcagttggtgccttctgtgagcaagcagtcgattttcgcttgaaggaatctcagggctggacactgaacgtggcaatgccagtggaaatggcgtgggctcgaaaactagaatgggtggctctcatttccatcttggtggatttagtgacccaagggaaggttttgtctcctcagagtctgggtaaattgttttttctacctctctttctaacttcatttctcttttgtttgtttatttttgttttgttaatagaaatgaccatttgagttaaaaaaaaatcctccctgtgtcctgtatccttaaaacaaatcatcaacaaagttggagcaatgccttggctagaatgaattatgctagtgtgctgggcattttccctgattcttttctttgtaacttgtttaaggctgctgtttctcggaggcctctccagccaaggaaaagctccataaaagaaaaaagcattggattgctcgctgacctggctttgctgtaactgaaggctcactcaacctcgccctctagcgtttgcctggagaaataccaccccaggctcctggggacacaattagcagctatggtgtccactagcatcccggaggttaaagctctccgcagctcagtctctgactatgggaactatgatatcatagtccggcattacaactacacaggcaagttgaacatcggggcggagaaggaccatggcattaaactgacttcagtggtgttcattctcatctgctgcttcatcatcctagagaatatatttgtcttgctaactatttggaaaaccaagaagttccaccggcccatgtactatttcataggcaacctagccctctcggacctattagcaggcgtggcttacacagctaacctgctgttgtctggggccaccacttacaagctcacacctgcccagtggtttctgcgggaagggagtatgtttgtggctctctctgcatcagtcttcagcctccttgccatcgccattgagcgctacatcaccatgctgaagatgaaactacacaacgggagcaacagctcgcgctcctttctgctgatcagcgcctgctgggtcatctccctcatcctggggggcctgcccatcatgggctggaactgcatcagctcgctgtctagctgctccaccgtgctcccgctctaccacaagcactatattctcttctgcaccaccgtcttcactctgctcctgctttccatcgtcatcctctactgcaggatctactccttggtcaggactcgaagccgccgcctgaccttccgcaagaacatctccaaggccagtcgcagttctgagaagtctctggccttgctgaagacggtgatcattgtcttgagtgtcttcattgcctgctgggcccctctcttcatcctactactgttagatgtgggctgcaaggcgaagacctgtgacatcctgtacaaagcagagtacttcctggttctggctgtgctgaactcaggtaccaaccccatcatctacactctgaccaacaaggagatgcgccgggccttcatccggatcgtatcttgttgcaaatgccccaacggagactctgctggcaaattcaagaggcccatcatcccaggcatggaatttagccgcagcaaatcagacaactcctctcacccccagaaggacgatggggacaacccagagaccattatgtcgtctggaaacgtcaattcttcttcctaaagcctgaagaagctgttgatactgagggaagcattctgacttgatcacccactaccccagcatttcaaaaatgtctctcgctctccactgctgcaaggaaggagcaactgggagcctgagagagggagggaagggagaatgtgcggcctggtgataccatgatgtaggtaggtagtaattgtgaacaatgcactgggaagggtggagatcaggtctggcctgcagtgggtttcctgcccccccctccccccgtaccctggagctttgattttgcactgagccaaaggtctagcattgtcaagctcccagagggctcatctggtccctcctcaaagactaaggtcccaagagaaagtgttgtgatctctcactgtaatgtcaaagtgagtatgtgccctttagcttggttgggtggtgtacatgtccccaccctccggtttcttctcaccctgtctccccttaccaccccttctttatatcgtaactgcctgacttttgttcatcagaaggaggttgtggaggggtctatttcttgattatagtgagcaagctatttgctgggaaggctatttgctgaggccaaagtttccatgtaaactgggtcaagttgttgggaatttggtaggccatctttaagatgaaaatgtgttccttttttgtcacatgttccttattcccattacaaccacaatggttgtgaatgaagagtaacaaagaataacgaagtctactttatttgaattatactgggcagaatcttagatgatacgggaaaagcaaaaaacaaacaaacaaacaaacaaacaaacaaacaaaaatctacagcatgaggtgaaatgtgagagttaagtcatgcagaccaagagctgtttcttgctgtctttctctaacccctacagcacctttggcacttttattgatgatttcagaatgttgtgtgatccatttcaaccaactgggggagagttgtattttgtttaaagaacattttctgattttcgaatgtatttgtttctttgaggtcatcttattgaacttcttcctaacccgtgttaacaccactgaatgtgtagttcttaagaaagtgtcatccttttgtaccccccaccccccaaaagcattactttaactgacagggaacatcaggaattctttatttcggctgtcactaggtattgatgatggttataaatgttacagagaataaaaatatattagtctctttagtctggtgttcagtgagtgcaattaagccaagaaatgtcttttttaaaaaatagtatttaataggttcctgacttttgtggatcattttgcacatagctttatcaacttttaaacattaataaactgatttttttaaaagattcttttgtgaagaaaactttttaaaaaatcattcactgagatttggagttaaaggtaaggcccaatttaaaaaagttaagagaagttaaaagcttttaccttgatgaagtaaggtatgaaaaaaaatgtggtttgtttagaaaccactctagctttttcaggaagagaaacttcaataaattagcattagagacacgtggagaatatgagaaaaaccatcaaccttctaagaccacagcaaatagatacaactatttcaattttaaagtgcagtgaggccaaacaaaaccaagtgcgataattccatcctaaaatacagccttctgaagttcagcaatggagtcttaaatctattttaaattatgactaaaatgatcagttcaaacaccacagcaaaagcatacatacttggccttttatcaacatactgggaaagaaaaaacatggctaatgggtgataatgttaaattggtcagtgctgtgtaagtttttggtttgtgtattcttaagacaaggtctcatgtgttctagacttgcctcatgcttgctctgaagaggaatgtgggctgttgatcctcccacttcctcnnnnnnnnnnnnnnnnnnnnttgggcccaggtttatgaaaggctggggattgaacccaggtcctgacacatgctaggctagcactttacccactgagctccatctccagcctctaagttgtcccattctaggacattgccttaggatcttatgagaacactatggaactatgcgatatcaattataacatgtaacaagtggaatagcgggtggatgttcacccctcccacagcttttaaacttcctcggttcttgcccatttaactggtcctactaaaatgaaagcaactgtgaaacaaaggcatgtagcataaagttctaacagttacctcagagttaccgccatctttgctgcagattaggtcagcctattgctacttttcagagtttgtgttttcaagtgtcattgagtttacacaggtcaggacacagttgggacatgaagataaacctcacctactagagtagatgtcatttctgggtaaggctaactgtgggaaacagagtgtgttcgctaaggaaaccttaggtcataacctccagcttcctgaaggaaatgccaaaagtgctcagaagacaaagggccgggaacaaatgcgaatgtctctatccatctgtctgctggggcggaaggggtgacttcatgttccactcacttcctcaggctttcgttagagagccaggcataatggaaaagtgtgtctattttgcttcagtggatgataaagctctgcttttggacttatctccaagcacaaggtgactcatgacatcggagcatagggtggctcattggtgacgggaggtcaatcttcttgcccacctctgagtacatcatcctgtggacgtgcattcttcatagctctgccagacagtggatcttgtttggagaaagcggggcagttgtagatgtgtggaagccccagttctagtcaagacacaaagacaaagatgaaggggtctttggttgcatccattgtgtatatccgattttaattgagtacactctaagtagtgaggatgagaaaatcactcagtgactgaacacacacacacacaatctctacatatgtgcatggagacatagctcagttggcagagagcttttcttgcatgcagaaagctgtgggttccatccccagtatcataaacctggtgtaggtatggcagcaatcccaggaaggtgaagcaggaagcttttcagttaaatattgagtttgaagccatcctaggatatatgagaccatgtctgtaaaacaaaacaaaacaaaacaaaacaaactaacaaaaaccaagaagaacccctaaagtagtcttagtcaggagaagtgaggcatataaaactacttacatatttgtataaaaatcgaattagttccaaatatcaggaaagctacaaaaggacattacatacatagtatttgatccccaacattagtagcatcacagaacactctccagggctgtcgagatgtcttaggaggtaaaggggcttgtcacataaacccaattctgtccccagagcccgttaataatagaaattggacaagggagtggtgattcaagcttttaataccagcaaatgagaggctgaggcaagaggataaagaactcaagaccagctttagcaagtgacaaattggaggccaaactaggttatgagactatcttaaaaaactagagctgttactatgaccagttcttgtaatattattgttaggaatttagaagctttagtgcaagttatgacttcaatcacccatgcttattagatagtatattctattgagtaatattggcacttcatctgtaatttctagaatccctatttttctccccaatgtaaaaagtctgccctataaaagtaatcattttaatcaatttggaattatgccgacttcttctctggacattgcctgtgttaataaactgtccaaagctgagtggtggtggcacacacctgcaatctcagcactctcagagggcatagaaaagtggatttcttttaagtttcaggctagcctggtttccagagtgagttccaggacatctgcagctacaaagaaaaaccctgtctcaaaaacaagtaaacagtccaaagccaaccaaacaaggaacctgcccaacacatattgtaatacgtctaggactgcactttcttaggctttggaccctttgcacctatgttctttatatcaccaagattgttcacgtctaagcatttgtttggagatgctactcagaaaggaagacttccaacaaatgatgggtatttctagtgaatgctataaaatgagggcttgcccaactctcagtggtagcaatcccatgtttaatgggaaagcaggctataggaccagagtggctcatgttaaggcattctatgtacagaatttctaaagaccttcttaatagacactggctttgctgctgggcacatctataatcctagtattcaggaagcctaaacaggaagattgctgggagttctggttctcatttaaaacaaaacaaacaactaaacaaacaaacaaacaaacactcccccaaagaaaacaaaccaaaactcattggttcaaaaattaatttctagctagaaactgttataataagcatggcaagtatttgtaatgagcttttgtagtttgtttgtaatattattgtttttatataactaattagttacttttatttctttgagacaggatcttgtatagccaaagctggcatcaaatttattttgaatttgaggcatacaccatcacacctggctctagaattctgttttgggggcagggtgtcgtatagtccaggctggcttcaaactgctggaagatgagcatgaacatagtaggactttgctttgactgatcaagttccaagattacaggtgagtgctaccacacccagttgacgcagtgctggatgtagaacccaggacttcctgtgtgctagacagacacagacatgagcagagacactctattaactgagctgtattctttttttctttttctttttttagatgactcattccattcttctggtggtgttttccaaggccccctaactaatttttatcaaactaaatttgattgcgtttatttttagagttgagatgtttgcattatttttccctgaatagtttctaaagacactgagggaggaattataaatgaatcaaaaccaaaagaaagcttcacagatttgaaatatccttttcctgtgaacgtggtaagtagtgttggtggggctcgtgtgtgtgtgtatgtgtgtgtgtgtgtgtgtgtgtgtgtgtgtgcgcgcgcgcgcgcgcgcacttgagtgcgcatgagtgttaagatagggtctcaatctgtagttcaggctgtccttgaatttacagttgcctcagcttcctgaaccctgggtggcatgagtgaattaccctgcccagcacagtaagttcttgaagatgggaaagacataacaggttgcaccatctccctcatgtgttcgttcttcctacctactttgatgtgcttcccatcactcaaggaaaaggacttagttgagccatctgcacacgtctttgtttctgatgacagccattgcacattgactactactcagttactactaattctttttttttttaaagatttatttattaatatatgtaagtacactgtagctgtcttcagacacaccagaagagggagtcagatcttgttacggatggttgtgagccaccatgtggttgctgggatttgaactctggaccttcagaagagcagtcgggtgctcttacccactgagccatctcaccagccccactactaattctttaaacaatttgtatgaatctcaaagccattgtgtcgagcaaagataaaacacaaacaacaggccaatcttctacttcataagctcctgaagtggaatttggaagaaagcaaaactggcactggtgagatggatcactggttaacagggctaactgctcttgcagagggtctgagctgggttcccagcacccacgtaaggtgttttacaatccactgcaattccagtttcagtggatccaactcttctgacctctgctgaagttacacccatatgaacatatatgcactcatattattaaagatcataaaatgtatcttttttaaaaaggaaaagaaaaccagcttatagagatcaaaagagtacaaacagagacccaagcagagaaagaggaaaaactttcagattgttaagaatgctctatttatacctttttttttaaagaacattgattattcagatggatatatgtgcttaaatttatccaactatattctaaagacaaatgaaagctttaaaaatccaaggcagcaggcttctgcttgtaagcacaatggcagtaaagggtcttctcttgaaaattctgcagattccacacagtccaagagaatgtggcagaagtcccagagtattccatagacgagcatgtgatctctttgtatttatctcacgctccagaaacaaaccattaaaatactaaataatcgtgacccaatggtactcacttgcttctgtaggatgagaaaatgccttagcttctctgtgtgttatccctggagaattctgtgtgtggaaagagtctaagggtacagttaggctttcacaataaaaaattcattggcattcagaacccactcttatgaactcatgaagggctgtaagcattcttaagaagaatacaatttaaacaatttctatgaatgtagaagccagtaaggctttgactggtaaattagtactggaaacacacagccatggccacatgagtaaacctataaaaagccttcagtcaagaaaaggcaacttcctgggtataaactctgcataggtagaagtaataggggaagatttaaggggtaggcgaaggcaacactgagaccaagtacattgtctgcctgtgcacagccctgtctgagaccttcagccagctctaggtgtagtggaacagaggtgacatgcttcaggtgttccacaggtcctgtgacatgctgattagatattaatcagaactagaaacaggaaagcaggagaaatgccgcctgttctacaaggggatggggaaggtagtaagtgtcttgcttatctgtttcctgtagagacatcaaagagatgatgtggctgaccttcccgcccccacctcctcacaactcctcactgtccgttctctcgcctgcccggttagctggaacgcctgccctgggttgtgttgttgtgctctgggaaaatggcgagcagggttcttcttgtctttctagaacctaccaggtctattttttctgttcgggtgcatttgtggcctcttccctttgaggttaagggatgatgagatggcaagaaatacttcttttttttttcctttcaagaatgtattcagtgtctcatacttcctccatgattttagcttctctgcaagacttacttagacacttaaattggacaggcaaattaggtccaattcatggcgactcatgctgtaatcccagcacttgggaaaacaggacagaaagaagcttgtgctatacactgaatcctccagaccagcctgggctactgagtaagaacctgtctttaaaatacaaatgaaaggctgactgtatatatagctcagcaggtaaaggttcttgctaagtgaacttgggggtctggcttggattcttggctcctaagtcaaagtagtaagttttttttttttagttacacattttgtctccaatattttttttttaatacaaactgcatatggttattcaaatgacttaagtggacctgatttacgggtccactgactccacagcacctgacctccacacatgcgtcatggcacacacacacacacacacacacacacacactgataaacaacaacaacaacagaatgtaaatcagacaaagtgtgcttcatgctgacagctttcctccttgccttgccttgccttgccttctctaaactactcacgtgaaatgccgtggaatgatttcatctggaagagagagttactagatgtgctgcaaaaatcagggtggagcttttccaagttgttcatggtcttcctgatgaaaagcatccagtttcgggtagatggaaacattttacattgttgccagtttctgcctcagaaactgaggcattgctgtctgagtgtgtgcttttctttctgtagcgctgctgtgaactgtagccatgtcgggtataacccttaaatcaggtccacttaagtcatttgaataaccatggtgggatccttatgcaatttgtattaaaaaatattggagacaaaatgtgtaactaaaaaaaaaaatacttattttattctcgtgtgtgtgtgtctgtgtgtgctcgagtgcatgtgtgagccagaagaggacgttaaatcccctgaagctagagttacaagtgttgtgagctaagatttgaactcaatctctggaagagcaacaagcccgtaaccactgagccatctatcgctccagccccttaaatgcttaatattttaggagagaaagcatgacatgtgctttcaatgatcagaatcacgatggcacaaactcgtggaatggaaagccctccaatcatctaagaatctcagagaggtgcctaggtagctctcgcgcacgcttcctgctcaaatccaccagcagcccaggagctgtgaaccccagacccacacgctaaccctaatgaatgtgagctgacctagttacgtttgctaggcattgtgtttggttggttttgtaggtagggtcctactgcgtgttgatggcagaaaggacacttgtggctcaccctcccgagtgctgacattacaggatgcatcgccatgactgatgtcgcttgctgcttttatctattacttattttttactttgaaacagtcttatgtgtctcagactggcttccaacttactataatatctgaggatgacttggaatgtctgattgcccactagcaactcccaagtgctggtgtcataggcaaggatgaccaatcctgctttatgtggtacaaggcattgaaccccaggcttcttgtgtgctacatgagcactctggatggagctgcaccccagccccatttgctatttttatgatgaggatttttaagaattcagtcacatgtttgctcacaaccccctcccccccatcccccccgccccattgacgggctcttcctcttaaagttcaccatcttcttgaaggtaaagtgtcttcactactttgtnnnnnnnnnnnnnnnnnnnnnnnnnnnnnnnnnnnnnnnnnnnnnnnnnnnnnnnnnnnnnnnnnnnnnnnnnnnnnnnnnnnnnnnnnnnnnnnnnnnnnnnnnnnnnnnnnnnnnnnnnnnnnnnnnnnnnnnnnnnnnnnnnnnnnnnnnnnnnnnnnnnnnnnnnaacatgagctatcagaggcctggagactctgctcacacagcctctgccctaccagaaatagaggttggttagctcacatgctgttctgcctcagcgagctctgcatgtggccacctgcagagagaacccttggtttctcttccttgtctagatgccagtcaagggtgctttgagaaaaacacagattttcatactcctttctcatgtgcaagtgagctggggtatcaaagaatttcctaggttgtttaatctagaaaataccttgtttttttggttttggctttttaaaagatttatttatttattcattaatttttttatatgagtacactgtagttgtcttcagacacacaccagaagagtgcattggaccccattactgatgatggttgtgagccaccatgtggtttctgggatttgaactcaggacctctggaagagcagtcagtgctcttaaccgctgagccatctctccagcccctagaaaatccttggttacaagagcaataagatgatcaggagggcaaaagtcctggccatgcaaacccaagtacaatgtctgaaacttgtatgcaaacacacacacacacacacacacacacacacacacacacacacacacacatacacacacatcagattcagtggcatttttctgtaattccaggacttatactgcaagatgagaagcataatcaggaagattgcccccaggcttgtgggcccactcttcaggagaacactacataacagaaacaagcaagaccctgcctcaacagggtaggagagaagtggtcaccaaaggttgtcctctgacctccatgagtagtctgtagtacaggtatacctgaacatgcgcacacacacatgcacacatactactactactaacaaatgttctaagtgtaagtagtatgcaactgttaacttgatatatgatgtcatttccttctctagctggggaagtgggggagagggagagagagaggtgtacatacaagtttgtgtagtccacacacatcagtgtatccttatctgtgtgcctgtgcatctgaaggccagaggccaaggtcaggtatcttcctcgattgcattccaccttatcttttcagacaggatctgtctgtctctgaacccggagctcagtgattgagctatagctgtccttcagctcctacagcactatagctatagaaaagcaccgccgagttcagcccctgggtgtacactgggaatcggaactactggcctacgattgtgtgtcaggcactttacctgtgcagtcccttccctagctgaatttttatactgtgataggaataattataaagcatttagctgggataactcaacagttaaggatgtttggtcttgctaggcagtggtggttcgaaaagcatccgcacttgaaaagcagaggctggcagatctctgagtttgaggccaaccaacctgctttacagagtgagttcctggacaaccagggctacagagatacagagaagccctgtttaggaaaaaacaaaacaaaacaaacaaacgaaacaaaaaaaacaaaaaccaaccaaccaaacaaacaaccccccccccaaaaaaaacaaaaacaaaaacaaaaagcctaaaacctaaaaacccagaaagtttggtcctgagtttggtttcaagtgttcaaacttcttgtaactccagttgaaggggatcagacacagttttctgggctccccaggtcctggcactcatctagaagacacacccgtccaccacctgcacacatacaagaaaaaataattgagctgggcttaatggcacagagctgtagctcccatttcaagtggctacagcagaaagaccaaatgttcgaggcctgccgaagatgtagttcagttggaagagtgtcagttcagcttagagcaggctcagggctcagaccctatccttgcacatagtaggatatttgtgtacacaaccgta

SEQ ID NO: 489 - DNA, 3020 bp, Mus musculus
agatctttctgggaggctgcttcttagcagcccagaccctgaggggccccctgccgctggcagagggcggaggagttaaaagcattaacccctcccagtcccttcctagaggagccacccagcctcggcggggcgctcagagacttcgtcttgcaaaagtggtgcgggcagcgcaggcagggctggccattggagtgcaccgctgaggagggaggggaccccagctcagggaactttgcgagtgagctggtcgccgtcagtcgccgacagcagcaagatgcggatcgcgcggtgtagacccagagtcctgcggacgcagcttcgtccggcttgagcgaggctgctgtttctcggaggcctctccagccaaggaaaagctccataaaagaaaaaagcattggattgctcgctgacctggctttgctgtaactgaaggctcactcaacctcgccctctagcgtttgcctggagaaataccaccccaggctcctggggacacaattagcagctatggtgtccactagcatcccggaggttaaagctctccgcagctcagtctctgactatgggaactatgatatcatagtccggcattacaactacacaggcaagttgaacatcggggcggagaaggaccatggcattaaactgacttcagtggtgttcattctcatctgctgcttcatcatcctagagaatatatttgtcttgctaactatttggaaaaccaagaagttccaccggcccatgtactatttcataggcaacctagccctctcggacctattagcaggcgtggcttacacagctaacctgctgttgtctggggccaccacttacaagctcacacctgcccagtggtttctgcgggaagggagtatgtttgtggctctctctgcatcagtcttcagcctccttgccatcgccattgagcgctacatcaccatgctgaagatgaaactacacaacgggagcaacagctcgcgctcctttctgctgatcagcgcctgctgggtcatctccctcatcctggggggcctgcccatcatgggctggaactgcatcagctcgctgtctagctgctccaccgtgctcccgctctaccacaagcactatattctcttctgcaccaccgtcttcactctgctcctgctttccatcgtcatcctctactgcaggatctactccttggtcaggactcgaagccgccgcctgaccttccgcaagaacatctccaaggccagtcgcagttctgagaagtctctggccttgctgaagacggtgatcattgtcttgagtgtcttcattgcctgctgggcccctctcttcatcctactactgttagatgtgggctgcaaggcgaagacctgtgacatcctgtacaaagcagagtacttcctggttctggctgtgctgaactcaggtaccaaccccatcatctacactctgaccaacaaggagatgcgccgggccttcatccggatcgtatcttgttgcaaatgccccaacggagactctgctggcaaattcaagaggcccatcatcccaggcatggaatttagccgcagcaaatcagacaactcctctcacccccagaaggacgatggggacaacccagagaccattatgtcgtctggaaacgtcaattcttcttcctaaagcctgaagaagctgttgatactgagggaagcattctgacttgatcacccactaccccagcatttcaaaaatgtctctcgctctccactgctgcaaggaaggagcaactgggagcctgagagagggagggaagggagaatgtgcggcctggtgataccatgatgtaggtaggtagtaattgtgaacaatgcactgggaagggtggagatcaggtctggcctgcagtgggtttcctgcccccccctccccccgtaccctggagctttgattttgcactgagccaaaggtctagcattgtcaagctcccagagggctcatctggtccctcctcaaagactaaggtcccaagagaaagtgttgtgatctctcactgtaatgtcaaagtgagtatgtgccctttagcttggttgggtggtgtacatgtccccaccctccggtttcttctcaccctgtctccccttaccaccccttctttatatcgtaactgcctgacttttgttcatcagaaggaggttgtggaggggtctatttcttgattatagtgagcaagctatttgctgggaaggctatttgctgaggccaaagtttccatgtaaactgggtcaagttgttgggaatttggtaggccatctttaagatgaaaatgtgttccttttttgtcacatgttccttattcccattacaaccacaatggttgtgaatgaagagtaacaaagaataacgaagtctactttatttgaattatactgggcagaatcttagatgatacgggaaaagcaaaaaacaaacaaacaaacaaacaaacaaacaaacaaaaatctacagcatgaggtgaaatgtgagagttaagtcatgcagaccaagagctgtttcttgctgtctttctctaacccctacagcacctttggcacttttattgatgatttcagaatgttgtgtgatccatttcaaccaactgggggagagttgtattttgtttaaagaacattttctgattttcgaatgtatttgtttctttgaggtcatcttattgaacttcttcctaacccgtgttaacaccactgaatgtgtagttcttaagaaagtgtcatccttttgtaccccccaccccccaaaagcattactttaactgacagggaacatcaggaattctttatttcggctgtcactaggtattgatgatggttataaatgttacagagaataaaaatatattagtctctttagtctggtgttcagtgagtgcaattaagccaagaaatgtcttttttaaaaaatagtatttaataggttcctgacttttgtggatcattttgcacatagctttatcaacttttaaacattaataaactgattttttt

SEQ ID NO: 490 - protein, 378 aa, Mus musculus
MVSTSIPEVKALRSSVSDYGNYDIIVRHYNYTGKLNIGAEKDHGIKLTSVVFILICCFIINIFVLLTIWKTKKFHRPMYYFIGNLALSDLLAGVAYTANLLLSGATTYKLTPAQWFLREGSMFVSASVFSLLAIAIERYITMLKMKLHNGSNSSRSFLLISACWVISLILGGLPIMGWNCISSLSSCSTVLPLYHKHYILFCTTVFTLLLLSIVILYCRIYSLVRTRSRRLTFRKNISKASRSSEKSLALLKTVIIVLSVFIACWAPLFILLLLDVGCKAKTCDILYKAEYFLVLAVLNSGTNPIIYTLTNKEMRRAFIRIVSCCKCPNGDSAGKFKRPIIPGMEFSRSKSDNSSHPQKDDGDNPETIMSSGNVNSSS

SEQ ID NO: 491 - DNA, 24711 bp, Homo sapiens
cctataacttgtttttcatggataaatagtgaaatttcaaagcatttcaagttttcttgtgctctaatcataaatacacttagattgagataattattaacctatctgttattgatgtctttatgtcatactgacatattttgacctttacagtgtctttgttcatgtcagggattttttttgtgtgtcaaatcagcaggaaatttacctttttctagttctcatgattaattgttcttcattatataggttatgaacaatcaaataacatatgtttgctgtttctgttcaaaacatgcatcttccttttaataatgtaacatgctctcaatatgatctaaagtcagaatgatttttatttattcaattgctcatttttattgtttttgtttcatattttatgcatttttaatataaattttctctcaatcctttaataaatttatagataacaaaatattctttatataaggccagtctgtaatttctcatatatttcattgaaataatcctaaatttataaccaaattataatagctatagcatacgaatatatgaaaattttgattaatctttttttatgtgattcttattaaaaatggaaaaaaaggccaagtgtggtggctcacgcctgtaattccaacactttgggaggctgaggtgggcaaatcacttgacgtcaggagtttgagaccagcctgaccaacatagtaaaaccttgtctctactgaaaatacaaaaattccagctggtagtgagtgcctgtaatcccagcactttgggaggctgaggcgggtgaatcacttgaggtcaggattttgagaccagcctgggcaacatgatgaaaccccgtctctactaaaaatataaaaattaaccaggtgtgatgatgtgcacctgtagtcccagctacttgggaggctgaggcaggagaattgcttaaacctgggaggcggaggttgcagtgagccgagatcatgccactgcactccagcctgggcaacagagtgagactctgtgtcaaaaaaaaaaaaaagaagaagatggaaaaacaagtgtgatgtgtttataattatatatactgagttagtaaatatattctgagaagaatagaacttttgttttaattaggtgtcaatgagaatcaaatcctcaaattataatttgcatatggtattttggatgaatttcccccagactagctcctggctcagtcacgtgacaccagccctgtacttttgtatcatggcagccatagagggtagttgaaatagtcctataaaccaaaaataccttcaacaactccaaaatcactcctacacaagagaaaatgagacagagggaacgtcctaatggaagaagacagtgatctgtgtcagtcatagccaattttggttaaaataccatgcttttaatattttacaaaaacatataatcttggggacatattgctgggttccttccaggatttggaagtgtaggactcaagtttaagctacattggtttcaaagttaattttgcctctaacaatagcaataaagttttagaaaacaaactgtgtgtaagtggcttgacaaaccagagaaagttgagacctaagcccatagcaggaggattgtagaagcaaaccaaattcccactacagatcctcaaataagaggacttagaagctccaggtatttatgaaaatggcaataaatgcttatctgaaaacaagaagcctgattatagggtatccactatagcagtgagaaaatatttcacactcacccaaccacttctctctagccctgttgtagtcattgccttcattattttactttctgtttattttcctgtttgattttttttctttatgtcagatgggtaatgtgctgacatcataacaaggttcaaggatggcatatctcacacgtgcgtaaacacccagtgatcacgcttatgaactacaaaaggattcctttttgatttttaaataaaattgttttaattaaaataagctgccaaatatccagcccttcatctccaacctgtacaataggataagtgtcggtacgctcattccaggagaagactggaggtttcttctctgaatgggttaaatcagagggtcactggagtcagagacacctgatggagctgagtgtgtagagggggttcccatcatggtgattcagttcaaatctaaatatcaaatggtgaggtgttccctccttcactctcccacttttctttcttggttcactccggaaaatgctagaagtcagacaagagattttagaatttctgtctggcaaaactgacctgcccaaaacttgagaactccagatattgacatttggcatactcaacgaaagtgtttatcctgatcatttaccacccctccattgacaagcccccacacaaagttttaaattagctttctgatttgcctctattttagcctctgtttgaaatataaatggacggccagagatcatctgacaattgggaaagccaatggcacaaagaactgagagcaaaacaaataggaaagtgtgacaacaaagaaaataggagaaaatgtcaacaacaaaaacaacaacaacactctgatatcctcagagataagtaaagatgtggtatccctaacataagaacagagttctgtaaaaatgtaacattcagaaaagaaaaagagagcccttggaaattaaagtatgagagtgaaaagagagctattaactgaaggattgaaagtacaaaaaggaaaataaaataggaggaaatttaaaaatcaggctagatagatggtccacaatctgaatagtgggatttgcaaaaagggaaaatagaaaaactggagagaagatgaagtcattaaagaaataatttcagataattttcagaactgcaaaggacttagaaaatcaaggtatatcatcatgtcactctggaatactgaagagacagagaagtttctaaaaacatccagagacaaaaaatagtcagctgtgaagttttgaaatcagaatagctttatgctctttatcagtagccctagaaattaaaagacaaaagagtaatgctttcaaaattctcaggggaaatgacttacaacttttaacttgatacctagtcaaaatattattcaagtaaataatagaatatttaaaatgtcagacatgcaagaattcagaaagtttataatataagcatccttcttcaagttaattaatactccttcaacatggcagaaaacctatagatattgttataagattgataatgaagaaatggaggtataaaacatgggatttcaagatttgcaaatggctaccagaagaaaatcaacaagacttcacagtgactggaaaaattggtgaaccagggaacctcggaggactaatgctcttcttttcaagttttgtaccatttgatctctttaaaatgatatgcacatattattttgactttaaaattttattggaaaattaaaaagcaaagtgaataaaaaaatggaaagtgggatggtgaaagcaatgattgcacttaaagacagttaaagacaaatgtggtgcggtcaagtcagcttcatacctgggatgcaaggctggttcagcatatgcaaatagataaacgtaatccatcacatagacagaaccaatgacaaaaaccacatgattatctcaattgatgcagagaaggccttcaacaaaattcaacacctcttcatgctgaaaactctcaataaactaggttttgatggaatgtatctcaaactaataagagatatttgtgacaaacccacagccaatatcatactaaatgggcaaaagctggaagcattccctttgaaaaccagcacaagacaaggatgccctctctcaccactcctattcaacatagtattagaagttctggccagggcagtcaggcaagagaaagaaataaagggtattcaaacaggaaaagaggaaatcaaattgtctctgtttgcagataacatgattgtatatttagaaaatcccaccatctcagcccaaaatctccttaagctgataagcaacttcagcaaagtctcaggatacaaaatcaatgtgcaaaaatcacaagcattcctatacaccaataacagacagagagacaaatcatgagtgaactcccattcacaattgctacaaagagaataaaatatataggaatacagcttacaagggatgtgaaggacctcttcaaggagaactacaaaccactgctcaaggaaataaaagaagacacaaacaaatggaaaagcattccatgctcatggataggaagaatcaatatcatgaaaatagccatactgcccaaagtaatttgtagattcaatgctatccccatcaagctatcattgactttcttcacagaattgcgaaaaactactttaaatttcatatggaatcaaaaaagagcccacatagccaagacaatcctaagcaaaaagaacaaagctggaggcatcatgctacctgacttcaaactatactacaaggctacagtaaccaaaacagtatagtactggtaccaaaacagatatatagaccaacgcaacagaacagaggcctcagaaataacaccacacatctacagccatctgatctttgacaaacctgataaaaacaagaaagggagaaaggattccctatttaataaatggtgctgggaaaactggctagccatatgcagaacactgaaactggaccccttccttacaccttatacaaaaattaactcaagatggattaaagacctaaacgtaagacctaaaacaagaaaaatcctagaagaaaacctaggcaataccattcaggacatagtcatgggcaaatgcttcatgtctaaaacaccaaaagcaatggcaacaaaagccaaaattgacaaatgggatctaattaaactaaagagcttctgcatagcaaaagaaactatcatcagagtgaacaggcaacctatataaggggagaaaaattttgcaatctatgcatctgacaaagggttaatatccagaatctataaagaacttaaacaaatttacaagaaaaaaccaaacaaccctatcaaaaagtgggcaaaggatatgaacagacacttctcaaaagacaacattcatgcagccaacaaacatatgaaaaaacctcataatcactggtcattagagaaatgcaaatcaaaaccgcaatgagataccatctcatgccagttagaatggtgatcattaaaaagtcaggaaacaacagatgctgaagaggatgtggagaaataggaacgcttttacactgttggtgggagtataaattagttcaacattgtggaagacagtgtggcgattcctcaaggatctagaactagaaataccatttgacccagcaattcccttactgggtatatacccaaaggattataaatcattctactataaagacacatgcacacatatgtttattgtggcactattcacaatagcaaagacttggaaccaacccaaatgtccaccaatgatggactggaaaaggaaactgtggcacatatacaccatggaatactatgcaggcataataaaggatgagttcatgtcctttgcagggacatggatgaagctggaaatcatcattctcagcaaactaacacaacaacagaaaaccaaacactgcatgttctcactcataagtgggtattgaacaatgagaacacatggacacagggaggggaacatcacacactggagcctgttgggggtggggggctaggggagagatagcattaggagaaatacctaatgtaggtgacggattgacgggtgcagcaaaccaccatggcacgtgtatacctatgtaacaaacctgcacattctgcacatgtgccccagaacttaaagtaaaataataataataataataataataataataaaagatggaggtggtggatgggtgaagcattttctctgtagtgtagggaattctcacaggtatgtagctccttaatcctcacaatgaaagaggcaaatatcattatttcattttacagatgaggacactgaggttcaaggaagttaaaagaacttgcctaaagtcacatagcttagaactggcaatatcaaggctgaacctaagtgtctgttccaaggctcagtcatgttccactaattttgaatgttggcaaacgaggagagagagatattgggacctaggatgaagggaagaaagagtttttggtagagaaaacacataaacatttatgtaagttgaaagtaaagagtcctcagaagctaagaactgaaagtacaagggagaataagaataattgagccaagtctcagaaagtttggaggaagcagcatgctgacctgggcaagagtttgccttggaaaggagtaaagttgcttttatttctgaaacaggtgggaaggaggtaagggtgggtaaagttgctattaagctggagcttggagaggagggaaattgagatggtcatactatttcctccttgaaataagaggctagttattctcctgtgaatagacaagtaagggaaagcctggatttttaccagtgactgggtcaggggagggaagaggggagaaaagggagttggaaagtgactggagcaattaggaaagagagtaaggctcaggcttgtaatcccagcactttgagagtccaaggtgggaggactgcttgagcgcaggagttcaagatcaccctgggcaacaaagtgagactcctgtctatacaaaaaataaaaataataattatcaggacatggtgactggtgcctgtagtcccagctgcttgggaggctgaagtaggcggatcctttgagggcgggagatcaaggctgcagtgagctatgatttcgccactgcactccagcctggatgacagagcagagccagaccctgtctcagttgaaaaaaagaaaaaaaaaaaggaaagggaaaagagtagagttgcaatatttagcagataaaaaatatagctcatggctgggctcggtggctcatgcttgtaatcccagcaccttgggaggccaaggcaggtggatcgcctgaagtcaggagttcgagaccagcctggacaacatggtgaaaccccatctctactaaaaatacaaaactagctgggtgtggtggtgcatgcctgtaatcccagctattcaggaggctgaggtaggagaattgcttgaacctgggaggcggaggttgcggtgagctgagatcacgccactggactccagcctgggcaatagagtgagattctgtctcaaaaaaaaaaaaaaaaaaaaaagatagctcacacagttacatttgaatggcacatttatgacaaatttttgtttagtgtatgctccaaagattgtgtggtattttatctgtaaacttttaaagagaaacactaaagcatgtgtaaagaacaacaaagccactttgaaatcaaaaattggaaatggagcaaacttaaggtaggaatgttgggcttgacttctaggcagcagcagacagggagttgtactggcagtcaggagatagcttgagaatgcaatttttagggcctccttggagagcaatgggaagagacttatatgggaactagagacttggaattggccaggacgccattgctggaaacatttgcctactatctaattttacctaagttgatcatctacaattacatctcataggtgtgtactaaagatgaatattattaaataacaatctgaaaggtttttggactctgtaaaacactttatcaatattgaatgttaaaaaccagtggtattcacaagaaaacaactgatatccccaaggaaattcttgaacctgtttgaggtttatcatggtggtctggagtagtggttaagagtctgcagcctgtcccacattaagcaagctgcttaatatgtctgggagtcaatttccttgtttgtaaaattagaataattatagtgcctaacttgtcagattaaatggattaatatgtgtaacactatgtgcaaatactaaaagtacaatgttacatgagatatcataggcagacaatgagaagtttcagaaaacattcattaatatgcatatgtatacactttgtatgcttacgtagaaaatgagtggttttaaaaggacattcattagcatacttttatatgcattttgtagacttgtacagtcagaaatgcagcaaatgtaaaactttaaatctagaagtctgtttccctctaggaacatatatttcaattccttaactatttattgactgatagcgtttgagccacaaggcaaggcatttgcaatatttaggttttggaacccagctctgccactcactagctgggaaatctacaagtcaccttagttgtctgaatgacacttctctcaacaataaaatggccagcaatgcttacttacttcacagagcagtaaggttaaattaacctagcacatgcttgatacagactaggtgtgaaatttcactttgattcctttggctttaaagaatgcataaattagtgtgggtggaggcgggagaagggggggaatgccaagtcccccgttttgttgtgctgggtagacacaatatacctcttcccctttaagtgaaataagtcttcaaatccaattaggatctactctggagtcttagaggaccgttatcttggtttccacattatatgcactgtactgttgttgaagctgtgggtatgtattgggtgcgtcgctgtcgatgaatgctttaaaacagctgtgaattaactgtcacttcttttttttttttttttggcaaactcacaaaatcccagaagtcaggggtctgttgtttgttcattctgcctccttctgagtcattcaggtacagggtgtgtctgccaattgaaactgcacagcggaggaagtttttgagttcacatctgccgggatgggaacgcagtgcgaccagggactgggtggaaacttttacaacagtaatgcaagggcagaagcgtcctgtcctgagcttgtcacgcaggcagatctgaccaagtccgcctctcagcctcacgttcttaagtagcatctaagcaaaagaaaagggtgggcaaagtgctagtaatgagatttgaggcctctgagtcgactcccaagcagaatgtgagagaagggtgccggctcctgctgggcagctgcagttgctccgcagctcctggccgagaatctccccctttggaaattcctgagctgcccaggcgttttgaatctctcaggactcagcagcagcccaccccctcaacgacctctccattggccagaatctgggacacacagcctgactttgtgctcagctgagggaaacccctcgcccaacaccaaaaccggcgctggttcatttctctgtgcactctgggaaagccactgcccctcagaccgcagttgcgagtagcacgaggatctggggtggcggggggagtacaggaacctcccggttcattctccctcccgggctgcttgtctcctccgtacctctcgcagccccttcccagcctctcctccccagagcgccgccgacactcgccgggccgcggctcaggttttctgctgctcgcgcgaaagtggctcggggagctcctggccacaagctcagcacaccgatcctcctagggctgcggggggtgtgggaccagggcggtgcgctacgagactccgggccgtcctctgcctcctcagacttttcgagagaaaagttttcaaagtctctccaccttttttttttttcaggggctcgggagaatcctctccacagccagggatcagcgtctatctgggcgagggcagtgatttatacagtagaatccaggggttaccgggctccgccccttctctctctctctttttttctttcatttgttgtttggggaggaggggttcttttttttttttttttttttttttttgcttctgccccagatctttcctggacagtgcgtctcagcagttcagatccgggggcccccagctgacagagggcgtggggggttaaggcattaacccctcccagcctcttcctgaagaaaccacccagccttggcgcggcgctgggtgacttcgcgtagcaggcagggaactggccgcggcgagcgggactggccattggagtgctccgctgcggagggaggggaccccgactcgagtaagtttgcgagagcactacgcagtcagtcgggggcagcagcaagatgcgaagcgagccgtacagatcccgggctctccgaacgcaacttcgccctgcttgagcgaggtagggggcggcgaatggcgggggtcgcgggcgcggggagcccggttgtggtagggcttaggtgtcagaaacgaatttttaagtcgaacgaggcaaacaaaaacttagaaaacatgcatctccgggcgctgaaaatttgcatctctgggctactaaggagcccatctcgatcagattgttcttgggcacttgtgatttatggagttcagaaaaaaggttaattcccaactgtggaacctacgggtgtaggggcagtgaaaattgcagttggtcggaggaataggagggaaggcgttaaattttggaaatcctatagacaaagaatatggtgggtggtgtggagcgtgggtaatggcttaaattagtactgcccaggagcagggtataacattagttgggggaaaatgcggagcttcttggcttgagcagcctctgctgttcgcggagttgctgggattgttctcatctctattacctcattttattgcattgctgcattaccttgaaatatttaagcaacttagaagtagacttctgctgaccagtgccgtcttagaaagtttctttgtaactttctagtcctaggagaggagtcaacgtgttgggggactgcagtaaataaaactgcccacgcaaatttagcaatgcaccagggagcagtttaatgtgagtttctgaagagtagttttgcaatcgaaattagaaatgtggtagcatgtattatggctgtcatgagtagtttgatttctctcttttgtgtatgttttggctaaactaaacaaagcaaaaaatatttatgcaatcaactaatgtacgaaacttctgggatttgctgcaatctgttatgaatggttttaactgaatacctttaaatttacttgccctggcttggggtggggggtggggtgggggggcgcggggggaggcggggagaataagaagaagaaagaaaaggcagtcgcttcacggaggcgctaagctttcctgtttacagcaaggcggggcgggcctggctgcccacacctcactgcgccctcggaccctaagcacacctgctcctagagagttattaatagagcccccaaatggcttacgctttcaaatgattttcctgcaaatctgatttcttgcatggcacatggcaattaggaggtggtgctagtatctttgaactggggggctgggggtgggcatgggggacagaggtgtgtgtcttcgccctcagactggcagttgagtcttttccgaggagagacgtgggctggtattgagcgtgcagctaagctggtgactgcttcagagaatctcatggctggaaatccgggggtgagggggtgtggggtggtgagagggcaggagtggagttaaaatggggtgtagttctctaggtttcccattcctcccactccttgttttccttttcatcatctttttttttttgtcaacccacagccaacatcgtaattcccatttccctttgagtgaatgtggccatagagtttctccctctctttttcttccccctcttccttttttgaaaaaagaaaaaaaaggaagaaaaaagataatttgatttttaaaaaaaatctctctccctgagctctccccaagtttctttaaaacaaatcaacaacaacacaattggagcagtgccttagctagaatgaattatgccagtatgctgtggctctttccctgactctctcctctgacttgtttaaggctgcggtttccgaggccctctccagccaaggaaaagctacacaaaaagcctggatcactcatcgaaccacccctgaagccagtgaaggctctctcgcctcgccctctagcgttcgtccggagtagcgccaccccggcttcctggggacacagggttggcaccatggggcccaccagcgtcccgctggtcaaggcccaccgcagctcggtctctgactacgtcaactatgatatcatcgtccggcattacaactacacgggaaagctgaatatcagcgcggacaaggagaacagcattaaactgacctcggtggtgttcattctcatctgctgctttatcatcctggagaacatctttgtcttgctgaccatttggaaaaccaagaaattccaccgacccatgtactattttattggcaatctggccctctcagacctgttggcaggagtagcctacacagctaacctgctcttgtctggggccaccacctacaagctcactcccgcccagtggtttctgcgggaagggagtatgtttgtggccctgtcagcctccgtgttcagtctcctcgccatcgccattgagcgctatatcacaatgctgaaaatgaaactccacaacgggagcaataacttccgcctcttcctgctaatcagcgcctgctgggtcatctccctcatcctgggtggcctgcctatcatgggctggaactgcatcagtgcgctgtccagctgctccaccgtgctgccgctctaccacaagcactatatcctcttctgcaccacggtcttcactctgcttctgctctccatcgtcattctgtactgcagaatctactccttggtcaggactcggagccgccgcctgacgttccgcaagaacatttccaaggccagccgcagctctgagaagtcgctggcgctgctcaagaccgtaattatcgtcctgagcgtcttcatcgcctgctgggcaccgctcttcatcctgctcctgctggatgtgggctgcaaggtgaagacctgtgacatcctcttcagagcggagtacttcctggtgttagctgtgctcaactccggcaccaaccccatcatttacactctgaccaacaaggagatgcgtcgggccttcatccggatcatgtcctgctgcaagtgcccgagcggagactctgctggcaaattcaagcgacccatcatcgccggcatggaattcagccgcagcaaatcggacaattcctcccacccccagaaagacgaaggggacaacccagagaccattatgtcttctggaaacgtcaactcttcttcctagaactggaagctgtccacccaccggaagcgctctttacttggtcgctggccaccccagtgtttggaaaaaaatctctgggcttcgactgctgccagggaggagctgctgcaagccagagggaggaagggggagaatacgaacagcctggtggtgtcgggtgttggtgggtagagttagttcctgtgaacaatgcactgggaagggtggagatcaggtcccggcctggaatatattttctacccccctggagctttgattttgcactgagccaaaggtctagcattgtcaagctcctaaagggttcatttggcccctcctcaaagactaatgtccccatgtgaaagcgtctctttgtctggagctttgaggagatgttttccttcactttagtttcaaacccaagtgagtgtgtgcacttctgcttctttagggatgccctgtacatcccacaccccaccctcccttcccttcatacccctcctcaacgttcttttactttatactttaactacctgagagttatcagagctggggttgtggaatgatcgatcatctatagcaaataggctatgttgagtacgtaggctgtgggaagatgaagatggtttggaggtgtaaaacaatgtccttcgctgaggccaaagtttccatgtaagcgggatccgttttttggaatttggttgaagtcactttgatttctttaaaaaacatcttttcaatgaaatgtgttaccatttcatatccattgaagccgaaatctgcataaggaagcccactttatctaaatgatattagccaggatccttggtgtcctaggagaaacagacaagcaaaacaaagtgaaaaccgaatggattaacttttgcaaaccaagggagatttcttagcaaatgagtctaacaaatatgacatctgtctttggcacttttgttgatgtttatttcagaatgttgtgtgattcatttcaagcaacaacatggttgtattttgttgtgttaaaagtacttttcttgatttttgaatgtatttgtttcagcagaagtcattttattggatttttctaacccgtgttaacaccattgaatgtgtatttcttaagaaaataccaccctcttgtgcccttaaaagcattactttaactggtagggaacgccagaaacttttcagtccagctattcattagatagtaattgaagatatgtataaatattacaaagaataaaaatatattactgtctctttagtatggttttcagtgcaattaaaccgagagatgtcttgtttttttaaaaagaatagtatttaataggtttctgacttttgtggatcattttgcacatagctttatcaacttttaaacattaataaactgatttttttaaagatccctttgtgaagagcattcttaaaaataattattgagtcatctactggattgtgtagctctttggaatcaaagtgaaggacaaatttctattattctttaaaggatttttaccttaactagggtgtgaaaaaagtgtggtttgtttagaaaccactctatctttttcaggaagagaaacttcaataagttaacactgaagagtagtaaagaatgagataaaaaccaccaaccttctgaataccacattggctagtaagtagaattgtttgagttttaaactgcatttaagccaaataaattaaatgcaataattctgtcatcaaatatgggcttttaaagaaattatacacaaaaatgtggttgtaaatctagtttaaatgatgagactcaatcatcattcaaaacccatcaaaaaagcatacattcttggcctttcaccaacatgttggggaagtggggatatggatatgggtattaaatcatgtgttttttttttttttttttcaggacactgtcttggcttctcccagcctatcttctgaaccacatagaagtatacagtatcagtgaagcagctagctgtaaaatgtgggctgagtagcataacacttttatctgaaaaccttcaattcatagtatctgaaagcattaatattctcagtcattaatttttccaactacaaaatgaaggcactttgcaagcatcacagacttattgtaatagttaattcttgtttttgattattgtcatcttttgggggattaaagtgttttggcatgttgggctctctaatcttttcgctactttcagaatttgtgctttcaagtgtcattgtatatgcacaggacacagttgggacatgaagataaacctcacctaatagagtagatgtcatttctgggtaaggttaactgtgggaaacagaaatgtgttcactaaggaaaccttaggtcacaacctccagtttcctgaaggaaatgccaaaaatgctccaaagacaaaaggctggaaacaaactggaatgtctctctccatctgtctgctaaggcggaaggaatgatttcatgttacattcacttcctagactttcattacagagtcaagcataatggaaaagtatgtccattttgtgtttctgtggaagataaaatgttcatattctccgacttatcttcataagcacagtagtgattcatgatatggggaaagatgggataaggtggctggctttgggagatggggagctctttggtgacacttttccccctgtgaccacattatccagtgattagatgtactttcttcctggaaactccagactgtgcatttcattccaagaaagctgggtagtcatggactgtggttttcctgggcacatgtgtggtagagccccagatcagaccaagaagcaaagacataagaagaaggaatccttggttgtctcccaacatgaatatctggttttaattcagtgtattctcagaagtaagaatgagaaaaaaatcttagtaattatatgtttgtactaaaaaatacacatataaggctttgattttaaaattgtagtgtttttcaagaggagtgaaacagatcctggacaatacttgacatattcttgtaaaaagttcaattgactcaaaatagtcaggaaagttatgaagtaacatcatataatactttatccccaacaatattaaatgtgattacaattttacagaatattcaaatcaaaatgttatataagacaaattattattcttgcttttacaactccttagaaggagaaacattcaattgttttaaaaatgttctatttatttttcagaaatgaggtgttgccttcttgcccaggctagtatgcagtggcacaatcatagctcactgcagccttgaattcttgggctcaagtgatcttcctgccccaagcctcccaagtagctgggaccacaggcacgtgccaccatgcctggctgatttttttttttttttaatgttttgtagagacaggatctcagtatgttgcgcaggctggtctttaattcctgggctcaagtgatcctcccatagatttgtctgtgttttctctaaataggttataaataccttgagggaggaatcacaaataactaaaagaaacttttgtagagactatcagagtattatttccttgtggacacagtaaatgtatgatgatgagaaatcataataaactacaacattttctccaaccttccttcctgctcttttgatgtgtacttcacgtggtccaagaaaagggactcaaaatactttttaacatacaccattgccttcactgcaatactaagtggaactagagttgtctctcagaacattcaagcaagcaaggtttacttgaataactaaaggccttatatggattatctataaagaggattttaaaccggtggtttaaaaagctgggagagataggaggaagagcatagtgaggggttagacctgcatttatttcagtctttcacaatctttgacaagaaccaggacccagagtagtttgggttcatgttgaatatatctctcctaatacatccgatctcttgttccctacactttcttcttggattcagactctcaagtaatttctgtttttcccgtgctctcttttttatccctttgaggactaaaggattaaaaaattagacttagctctggttatagtcattagcaagagccaagtgtggactgtggacttgagtgaacaggaattgctacattttatgtaatccaaccttgatatatgaagtatcttcatatatccaaccagaagcttccatatcagtaatggataaatacaccatggtaaattaatacaatggaatattattcagcaacaaaaaaggacctactactaatcttgcaaccgttttcatgaattttaaacctcttatgcaaccacaaaagagaacatacgtcatgatttcctttatgtaaaagttccagaataggcaaaactaatatatggaggtataaatctgcacagtggttgcctggggtaagaggataaactggaaaggaacacgagggaactttctaggttgttagcaaagctctttatcttaatttttaggaccttgttcactcagatgtgtatatttgtctaaacttatgtaatcatattcttaagaccagtgaaatttaaaaatatcaatatgctagactttcacttctgagtataaggactatatgagactttctctgtgaaattgtgggaaggttccatgaagttcagtagaaagtggcagccgtgcacagtggctcacgcctgtagtcccagcactttgggaggccgaagcaggaggatagctttgagctcaggagttcaagatcagcctgggcaacatggcaacacccgtttctacaaaaaatacaaaaaaaattagctgagcatgatggctcacacctgtagccccagctatttggatggctaagtctggagaatcacttgagtccaggaagtggaggttgcagtgagccgagatccggccactgcattccaactccagcctgggtgacagagtgagatcctgtctcaaaaaaaaaaaaaaaaaaaaaaaaaaagaatgtggaaaaggttccaaagtgtttcataaaagggaaatacgctttttaagtattatcccatgacccagaaataaaactttagaatgctaaataattgtgacatgatgatactctttgcttccataggatgagaatttggcttagtattggtatttgtaatccctgaagaatttctgtgtcttgaaagagtctagagatgtaatgaaactgtcacaataaaagtttattgacatttggatttcagttttaggaatatatgatgggttgtaaatagccttatgaagaatggaccttgtatacattgcaaggatatgtaaacatattagtactggagacatacaaattggagtgtgccaatttcttatcatggccacctgaccaaacctataaaaggcattcattcagataataacactcgccctgggtgtaagcactgcattgttagaagagatagcagagcacaaaggatatggaagacaagcttatgttcctgtggatctattttttaataatttcagcttttatattagattcaaggggaacatgtgcaggtttgttacataggcatattgctgtgatgttgaggtttggggtgtgaatgatcccatcactgtggtagtgagcatagtacccaacaactagtttattagccattgtccccctccctctctctcccttctagtagacaccggtgtctattgttcccttatttatttattttggagggtctcactctgttgcccatgctggaggggagtggtgtgaccatagctcactgcaacctggaacttctaggctcaagcaatcctcccgtctcagcttccagagtagctgggactataggtgtgtgccaccacacctggctaattatttatttttgtagagacagggtctcactttattgcctaggctgttgccacactccttacctcaagcaatctttccaccttggttttccaaagtgctagaattacaggcgtgagccatcatgaccagcctgtttccatctctatgtccacgtgtacccatcctgtgagttttataagcttgcagccagacacattgttacctgcattcccctgtctgaggggtctttctttcagccatctctgggagtaactggacagagaagaaatgcctcaggtgctgcactgctccttggacagactgattagatacaaagcagaaatagaaacagggaagagggggcatggttacctcagctaacaaggagcagggagacgtaggaaattgtttatccatttccccagagctctactactattattactccacttttctgctgctttgttgataccagggcagaaagaaaaaccttggaaaaagttactggtgtgggtcatgcttcctactcccattcctcttgataggtcggcaaacttacccactcatccactcaacaagaatgcttgccctgtgctctgtgctgtggatctaggggcaaatataaacagaggttctgccttcctagagctcacaggattcattccttcagctctggcactcctgtggctccctctctttggggtccagggaccttgatatggcaagacaaaattctttcttttttttccttttttgagacggagtctcactctgtcgctcaggctggagtgcagtgatgcgatctcggctcactgcaacttctgcctctcaggttcaagcgattttcctgcctcagcctcatgagtagctgagattacaggcgtgtgccactacgccaggctaatttttctgtttttagtagagacggggtttcaccacgttggccaggctggtctcgaactcctgggctcaagcgacccacctgcctcggcctctcaaagtgctgggattatagacgtgcatcacggcacccagccaagaaacagttctttttttcccatgagtttgttcattgttgtacacttcctctaatatattgagttctttagcagtctaaaataatttcatttaacaaatacaattaatattggcagcttttcatcattggcttttatttaatttatatctctaaattacttaaaattaaataatgaagaataaactcatatttggaatggagagaagttccttgtgttattgggtggtgttgtaaatatcagtatttgtattctatttttcagcatctagtccccatgtgatcaagaagcaactccgtaaaataaaagcattcaacattgtcttcagtttctatctctccttagtttgtgtttttcttcctagatccctattgtgaactgtgctaggtggagctgcttggtttataatgtgcagatgaagtgtacgtttgaataagtcataggtggtgtccttattcaacttggatgaaaaggaaaggagagaaaaattcacaactcaagaggataagcagacttatctactagtgagccattgaaagtcatgtagaggacttgagagagcagcctaggtaggtcgtttgtgtgctgtatgttcagtgattgcttgaggccagggagctggggataactccttgtgcagcccaagaactctgcactcatcttatacaccagctctactgaatccaagttgacctgctcacatttgtgtgccatttctatcaggaagtctcttgagaatgccaatagctcagatacctgctcgccattaccagatctacccctcaaagcataatgtctgctggtgggaggatgagtagcttcagtgttttgtacaaaggagagtatatttatttctaatttcagagtttctcttgctcctgtctagacacttcagagaaaaacaaattcaggtcaccagtaaagttatgttctataataagagaagacttgtgctaaatcacttgtaaagacattaactatcatctgcctgaaaagtcttctctcaccaagcttctgcagatcttttgaggtaccagaaatagtggttagttctcacatgctgttctgcttcagcgagcttcatgtggccacctgcagaaatagttcttggtttctcttccttgtctagatgctggtcaaggcagcgtttagaaaaacacagattttcatattcccattcacacgtgcaaagtgaattagggtaccaaagaattacctagattattcaatctgtaaaatgctttgcctcaattgactgaatattttatatcaacactttttccagctacatatttatactataataggaacctatttttactatatatactatttatactataaaagtaggagttgcagaatcataagaaatttagggccgggtgcagtggctcacacctgtaatcccagcactttgggaggccgagatgagcagatcacgaggtcagcggttcgagactagcctgaccaacttggtgaaaactcatctttactaaaaatacaaaaattagccaggggtggtggtatgtgcctgaaatcccagctacttgggaggctgaggcaagagaatcacttgaacccgggaggtggaggttgcagtgagccgagattgtgccactgcacgccagcctgggcgacagagcaagactccatctcaaaaaaaaaaaaaaaaaaaagaaatttagaagacacaaccacaagagctttctttcatgtatttattaaggagacagggtcttgctctgtcacccagtctggagtacagtgtcgtgatcctagctcactgcagcctcaaactaagcgatcctctggcctcagtctcctgtgtagctgggactataaggtgcatgccatgttggctactttttttttttttttccagtagagatggttttggggacaggggtctcaccttgttgtccagactggtcttgaactgctggcttcaagcgatcctcctgcctcgccgcctaaaatgctgggattacaggcatgagccaccgtgcccagccttggaccttctaattgtaaagaagcaaaaaggcccatataatatacataatatacaccataatatatacataatatacatcatctcactttatatatccactgtattaatttttctgttaaaaaaactatgctcgtttagtgttttatgttgttttttcaaaaaatagtgattttgaattgtgggcctaattagcgaaaattgaaatgtattaaaataatataaacatctgtaagggattttgtatcaaatggagtctgctctcagttctttttttttaacttttattattttatttttaatacagacagggtctcactatgtttttcaggctggtctcgaactcctgagctcaagcaatactcctgcctaggcatcccaagtgctaggattacaggcatgagccaccatgaccagcctctactctcagttcattttctaagaaatttgatgcaagccagtattgttgctgaacttcataccagcgtgaagaatatctggattgcagtgttctttccttaaaggggtactgtaggcacaagagttgtgccgagatttatgtggtcttcagagatggagaagcgtttgattcctagaattatttggcatctttctacactcatctgggttttctcttagatttataaaaaggccagtgttgggcattctgacaaagtctaggttaaacgctaatcaaggcactagagtatatatttgaagtttgtgtgttaacacctatgtgttcggggcaacaaactactagtgtcactagttagctgccagtagttagctgctctgaacacttaggatacctaaatatacatcggatttttcatcaatcttttgtttgtcttctccaaaaaggaatcaattaatgaactagttctgcccccaaagtaacagtttagaataaatgtattaattcaatgcaatgttcaacattgtttgaaaaatctaaagtatttttataattttatttttttcttttccttttttacctttcacacacttgaatctaaacatttttacttgaagaatggacagttatttttctttgtgttttaaaatacaacatgtaccaggaaagggagatggaagtaaaaataaataaataaaatacaacacgctcttcagataggtggcttttggaaagcaatctatgattttctaattctctagggctcagagtctcttgtaaaacacagttctttctatataatttttgctaatggatagaaaaacttgtggggtatttggaggaattaaataaacattgaagatataaaagcacacaagggatgacttttattgtaaagtcatgctgtcatcaaatggtgtgatttcttccctggtgagggcagttttcagtctaccacacctgcctctggtcatgtcacggttgagttctggcactgccagctgatgttaccggtggtttgctgaattttgacttatatggaattaaatgtctgtgttaccatagtaagttcacattagtctttgcatttcattatcaagaatgcactggtaactggcaggaaacttctatttgaagcatagtaatcggaacattttcttattgttaaagtacttttgcttcttccctactttcatttaaatctatctaaaggaaaaaagaggattttgtcttccatacaaaagaagttttagacattggggcttactatagtttctctgtgttataaacgatctccattctttatgtcactccatgaacttttatttaatttggaggaaatccatagtattcactctatatcagaggctgtgacatcctggctaaagctattgaagttggcagcatcatttcctcttcccgaattccttttttggttaagtttaagaaggagcacaaattgagggtgcaactttgtttcccgtagttttgaactggcagggtgtccctgggatttgtggctgcctacttgaacaatcccttaggacagacaccattcacatttcatggctctcactaggaatcattaacagctcagtgcagagttttgcttttcacttaacttgtaagataatgaagaggccctgccaaggttcagaaaaggataacaaagcataagccccttaatgggatgaactaacgtaaaagtctaagtatctggagctctttcccacaagtaggacctgactcagggactggcattcaggctgacaaccaccatatacaagaaactgtaatagaaacgaaagtaatttccctaaaatgagccaagttatgggctttgggaaaataaggatctgttagctttgctaagatcaggatctttgatttacagtgctttccatgaaacggtatatttttattgaagagaatcataggatctagaaagcattgactttaagtgaagcactatttgaattcagctttaagtagactgaaatagctctttatatgattgaaatgtctccatataattgtttgttaattaacatatctcataaaatggcattttatataccatgcat

SEQ ID NO: 492 - DNA, 2979 bp, Homo sapiens
ggggcccccagctgacagagggcgtggggggttaaggcattaacccctcccagcctcttcctgaagaaaccacccagccttggcgcggcgctgggtgacttcgcgtagcaggcagggaactggccgcggcgagcgggactggccattggagtgctccgctgcggagggaggggaccccgactcgagtaagtttgcgagagcactacgcagtcagtcgggggcagcagcaagatgcgaagcgagccgtacagatcccgggctctccgaacgcaacttcgccctgcttgagcgaggctgcggtttccgaggccctctccagccaaggaaaagctacacaaaaagcctggatcactcatcgaaccacccctgaagccagtgaaggctctctcgcctcgccctctagcgttcgtccggagtagcgccaccccggcttcctggggacacagggttggcaccatggggcccaccagcgtcccgctggtcaaggcccaccgcagctcggtctctgactacgtcaactatgatatcatcgtccggcattacaactacacgggaaagctgaatatcagcgcggacaaggagaacagcattaaactgacctcggtggtgttcattctcatctgctgctttatcatcctggagaacatctttgtcttgctgaccatttggaaaaccaagaaattccaccgacccatgtactattttattggcaatctggccctctcagacctgttggcaggagtagcctacacagctaacctgctcttgtctggggccaccacctacaagctcactcccgcccagtggtttctgcgggaagggagtatgtttgtggccctgtcagcctccgtgttcagtctcctcgccatcgccattgagcgctatatcacaatgctgaaaatgaaactccacaacgggagcaataacttccgcctcttcctgctaatcagcgcctgctgggtcatctccctcatcctgggtggcctgcctatcatgggctggaactgcatcagtgcgctgtccagctgctccaccgtgctgccgctctaccacaagcactatatcctcttctgcaccacggtcttcactctgcttctgctctccatcgtcattctgtactgcagaatctactccttggtcaggactcggagccgccgcctgacgttccgcaagaacatttccaaggccagccgcagctctgagaagtcgctggcgctgctcaagaccgtaattatcgtcctgagcgtcttcatcgcctgctgggcaccgctcttcatcctgctcctgctggatgtgggctgcaaggtgaagacctgtgacatcctcttcagagcggagtacttcctggtgttagctgtgctcaactccggcaccaaccccatcatttacactctgaccaacaaggagatgcgtcgggccttcatccggatcatgtcctgctgcaagtgcccgagcggagactctgctggcaaattcaagcgacccatcatcgccggcatggaattcagccgcagcaaatcggacaattcctcccacccccagaaagacgaaggggacaacccagagaccattatgtcttctggaaacgtcaactcttcttcctagaactggaagctgtccacccaccggaagcgctctttacttggtcgctggccaccccagtgtttggaaaaaaatctctgggcttcgactgctgccagggaggagctgctgcaagccagagggaggaagggggagaatacgaacagcctggtggtgtcgggtgttggtgggtagagttagttcctgtgaacaatgcactgggaagggtggagatcaggtcccggcctggaatatattttctacccccctggagctttgattttgcactgagccaaaggtctagcattgtcaagctcctaaagggttcatttggcccctcctcaaagactaatgtccccatgtgaaagcgtctctttgtctggagctttgaggagatgttttccttcactttagtttcaaacccaagtgagtgtgtgcacttctgcttctttagggatgccctgtacatcccacaccccaccctcccttcccttcatacccctcctcaacgttcttttactttatactttaactacctgagagttatcagagctggggttgtggaatgatcgatcatctatagcaaataggctatgttgagtacgtaggctgtgggaagatgaagatggtttggaggtgtaaaacaatgtccttcgctgaggccaaagtttccatgtaagcgggatccgttttttggaatttggttgaagtcactttgatttctttaaaaaacatcttttcaatgaaatgtgttaccatttcatatccattgaagccgaaatctgcataaggaagcccactttatctaaatgatattagccaggatccttggtgtcctaggagaaacagacaagcaaaacaaagtgaaaaccgaatggattaacttttgcaaaccaagggagatttcttagcaaatgagtctaacaaatatgacatctgtctttggcacttttgttgatgtttatttcagaatgttgtgtgattcatttcaagcaacaacatggttgtattttgttgtgttaaaagtacttttcttgatttttgaatgtatttgtttcagcagaagtcattttattggatttttctaacccgtgttaatgtgtatttcttaagaaaataccaccctcttgtgcccttaaaagcattactttaactggtagggaacgccagaaacttttcagtccagctattcattagatagtaattgaagatatgtataaatattacaaagaataaaaatatattactgtctctttagtatggttttcagtgcaattaaaccgagagatgtcttgtttttttaaaaagaatagtatttaataggtttctgacttttgtggatcattttgcacatagctttatcaacttttaaacattaataaactgatttttttaaag

SEQ ID NO: 493 - protein, 378 aa, Homo sapiens
MGPTSVPLVKAHRSSVSDYVNYDIIVRHYNYTGKLNISADKENSIKLTSVVFILICCFIINIFVLLTIWKTKKFHRPMYYFIGNLALSDLLAGVAYTANLLLSGATTYKLTPAQWFLREGSMFVSASVFSLLAIAIERYITMLKMKLHNGSNNFRLFLLISACWVISLILGGLPIMGWNCISALSSCSTVLPLYHKHYILFCTTVFTLLLLSIVILYCRIYSLVRTRSRRLTFRKNISKASRSSEKSLALLKTVIIVLSVFIACWAPLFILLLLDVGCKVKTCDILFRAEYFLVLAVLNSGTNPIIYTLTNKEMRRAFIRIMSCCKCPSGDSAGKFKRPIIAGMEFSRSKSDNSSHPQKDEGDNPETIMSSGNVNSSS

SEQ ID NO: 494 - DNA, 2989 bp, Homo sapiens
ggggcccccagctgacagagggcgtggggggttaaggcattaacccctcccagcctcttcctgaagaaaccacccagccttggcgcggcgctgggtgacttcgcgtagcaggcagggaactggccgcggcgagcgggactggccattggagtgctccgctgcggagggaggggaccccgactcgagtaagtttgcgagagcactacgcagtcagtcgggggcagcagcaagatgcgaagcgagccgtacagatcccgggctctccgaacgcaacttcgccctgcttgagcgaggctgcggtttccgaggccctctccagccaaggaaaagctacacaaaaagcctggatcactcatcgaaccacccctgaagccagtgaaggctctctcgcctcgccctctagcgttcgtccggagtagcgccaccccggcttcctggggacacagggttggcaccatggggcccaccagcgtcccgctggtcaaggcccaccgcagctcggtctctgactacgtcaactatgatatcatcgtccggcattacaactacacgggaaagctgaatatcagcgcggacaaggagaacagcattaaactgacctcggtggtgttcattctcatctgctgctttatcatcctggagaacatctttgtcttgctgaccatttggaaaaccaagaaattccaccgacccatgtactattttattggcaatctggccctctcagacctgttggcaggagtagcctacacagctaacctgctcttgtctggggccaccacctacaagctcactcccgcccagtggtttctgcgggaagggagtatgtttgtggccctgtcagcctccgtgttcagtctcctcgccatcgccattgagcgctatatcacaatgctgaaaatgaaactccacaacgggagcaataacttccgcctcttcctgctaatcagcgcctgctgggtcatctccctcatcctgggtggcctgcctatcatgggctggaactgcatcagtgcgctgtccagctgctccaccgtgctgccgctctaccacaagcactatatcctcttctgcaccacggtcttcactctgcttctgctctccatcgtcattctgtactgcagaatctactccttggtcaggactcggagccgccgcctgacgttccgcaagaacatttccaaggccagccgcagctctgagaagtcgctggcgctgctcaagaccgtaattatcgtcctgagcgtcttcatcgcctgctgggcaccgctcttcatcctgctcctgctggatgtgggctgcaaggtgaagacctgtgacatcctcttcagagcggagtacttcctggtgttagctgtgctcaactccggcaccaaccccatcatttacactctgaccaacaaggagatgcgtcgggccttcatccggatcatgtcctgctgcaagtgcccgagcggagactctgctggcaaattcaagcgacccatcatcgccggcatggaattcagccgcagcaaatcggacaattcctcccacccccagaaagacgaaggggacaacccagagaccattatgtcttctggaaacgtcaactcttcttcctagaactggaagctgtccacccaccggaagcgctctttacttggtcgctggccaccccagtgtttggaaaaaaatctctgggcttcgactgctgccagggaggagctgctgcaagccagagggaggaagggggagaatacgaacagcctggtggtgtcgggtgttggtgggtagagttagttcctgtgaacaatgcactgggaagggtggagatcaggtcccggcctggaatatattttctacccccctggagctttgattttgcactgagccaaaggtctagcattgtcaagctcctaaagggttcatttggcccctcctcaaagactaatgtccccatgtgaaagcgtctctttgtctggagctttgaggagatgttttccttcactttagtttcaaacccaagtgagtgtgtgcacttctgcttctttagggatgccctgtacatcccacaccccaccctcccttcccttcatacccctcctcaacgttcttttactttatactttaactacctgagagttatcagagctggggttgtggaatgatcgatcatctatagcaaataggctatgttgagtacgtaggctgtgggaagatgaagatggtttggaggtgtaaaacaatgtccttcgctgaggccaaagtttccatgtaagcgggatccgttttttggaatttggttgaagtcactttgatttctttaaaaaacatcttttcaatgaaatgtgttaccatttcatatccattgaagccgaaatctgcataaggaagcccactttatctaaatgatattagccaggatccttggtgtcctaggagaaacagacaagcaaaacaaagtgaaaaccgaatggattaacttttgcaaaccaagggagatttcttagcaaatgagtctaacaaatatgacatctgtctttggcacttttgttgatgtttatttcagaatgttgtgtgattcatttcaagcaacaacatggttgtattttgttgtgttaaaagtacttttcttgatttttgaatgtatttgtttcagcagaagtcattttattggatttttctaacccgtgttaacaccattgaatgtgtatttcttaagaaaataccaccctcttgtgcccttaaaagcattactttaactggtagggaacgccagaaacttttcagtccagctattcattagatagtaattgaagatatgtataaatattacaaagaataaaaatatattactgtctctttagtatggttttcagtgcaattaaaccgagagatgtcttgtttttttaaaaagaatagtatttaataggtttctgacttttgtggatcattttgcacatagctttatcaacttttaaacattaataaactgatttttttaaag

SEQ ID NO: 495 - protein, 378 aa, Homo sapiens; identical to SEQ ID NO: 493

SEQ ID NO: 496 - DNA, 70931 bp, Mus musculus
  misc_feature (1)...(70931): n = A,T,C or G
atggcctggttatttctgtagaaccgggtgggaactggaattttagtacagggcaggaattggtgatgaggtttggtgtctgggtcattgatctcatcagcaaaaggctcagagaagccttccaggtcccctgcagctagaaggcctggaagccacatgtgccatggaagtcggagcatagaaggaaggtgacttgatggcctcttactgtgttgagaaaagaaaaattgtttcttcctttgctttcccctcccaactcaaccagtcttgttttagaggaaaccaaagtttggccattgtaatctgccctgctaattcttatacaaacaggaaatagagcagagttcagcagatgaaatcctggctcttccctcaccagctctgtccccttaggttgcatcacttctctgagccctggtgtcaactcctaacacagagatgacagcagcagcagcagtaataatcgtcatcccctgcagagggtaaactgttggtagatgttagctaatactatagattacacaagctttgtttgtatgggataaatccagtaagctgccaaaccagtcagtttcctgactcgtggatttgtgttgagttcactttggcacattcaatctatgagtctacaagccacagctgtaactggaggactagctccagttgtacgtgttatacctgagtctgggtgctttgttatacatgccagtgaacagaaatgatgttaaatctttaaactgtactttagttagatcctggccatctgagaaagtgataggttaacaccctgatgaaacccaacgctaccatctcatctttagtttataagattttgcaaaaagcttaaccttgccttcttgatcaggtgaccaccacattctgagattcgtggtgcctgcctttcacacttcccctcatctttctggctatctgggcttaggtaattcttggactactggcaagagtctggcagtgtctgctggtatcagcgctgcatctccacaggtgtttgaggcctggaaagttaacccagaaccaacagaccattaatagtgtgtaagtgcagagccctccccacagagccctcagagtggaatacaaggtcccctgttctccacctcctgtcatgtggtacacagtctcagcggaaggactcctttaatcccatttcagtatttcaaaggtatttgtaaggcacagacagtgcctgtgtactccccggcaccatggtggcacctgtattccctctccctgcctttgagcagtggctgaccctgcatactctcagttggaagctgtttctacactgagggtggtggaaatcatctgcaaagcgccgattgagcagtttagaatttcaggacctagggcttcccagttaaaattctggccttctagttttcagactggggcatgcaagtcctttccattatggttgataacccaaggttaatatgaaaggggtgtgggggttgaaatggcaagatccaggaaaaagaaatgaaagggcttgccactgggtataaggtaacagagcagataagaaagacagagctttgagccagtactgcttggctggctgcagtgccccggaagatatacacaaaactctattggtttttttttttttttttttatacattctttttctggtagttttaatagactaaattataaacaagaacaggctttttttgttttgttttaaataaatctatttctttccaaaatatgttttgttctgcattttctaaaaaggtgactacccaagactaacctgtagacaaggagttaaacatgaggtaaccaagagaaactacatcttggtcaactatgataaggataaatttatccacagacagtaaaagaaaagggcttatggtaaagtactagctggttatgtaaatttgagaacaaatcgtctaattagcagttagcagacctcatgaagtcagatggtagcagtgctggctggggctagcactgtccagtgggcagtgccaacagcaagtcagatgcacagaagactgcaacacgacatgcccacttctctagttgagccaagtgtgagcctgcatgagtgtctccctgcttggaccagtggggctgtgggaacatgctgacttcccagagaattaaccagactaataaaaatggccccagtctcatcccagattctgccataagtcatattaagagcccacagacaagcagttcacccccctcccatacatcagcaagtagaacttctctggctgccccgtccagttcttttgcttgtcttccagagctcagtgatcattcttttttcacccctctctgtaataaaaaaacactttaagcccatccttttggttgttcatgaatttcatcctgggtgttcatgagaaaaggacccagcatggaaatcttgtgtgattgtgaccatacagcacccaagctcctgagttaagctttccactcagggatcatcaccacccccaattgttgccttcacccactcctgttctgtttcatagctacctgctgggagcttcagcacctggtagtttactcagggacactcgcgggcttcctgatggattgctattttcagttcatacttccaggtaatgagggtattgtgttttgacttaatagaagtgctgaagccactcgcaggcctagctcctggcacatttcctcatagtcctcctgtagtccttgggaggatggtttccaagggctggtgggcaaggccagcgagggagaatggagactggtattcacggcctgtggaatgcagtttggattcctctttcaaaaaggaaagcagtgagagcagctgtcttatcttctcattttgacctctttcccaggcaaggaccatacactgtttactcgtgaaagccagcgctgtgcctgcctcagcagtgagaagggaggggcagtgacaaggagggggcagtgagaagggggggtagtgagaaggggcagtgagaagggggggcagtgagaaggagagggcagtgagaaggaaggggcagagagaaggaaggggcagagagaaggaaggggcagtgagaaggaaggggcagagagaaggaaggggcagtgagaaggagagggcagtgagaagggggggcagagagaaggaaggggcagtgagaaggagagggcagtgagaaggaaggggcagtgagaaggagagggcagtgagaaggaaggggcagagagaaggaaggggcagagagaaggagagggcagtgagaaggggcagtgagaaggagaggcagtgagaaggagaggcagcgagaaggggggcagtgagaaggggggcagtgagaaggaagggatagtgagaagggggcgcagtgagaagggaggggcagtgacaaggagggggcaatgagaaggagagggcagtgagaaggggcagtgagaaggagaggcagtgagaaggagaggcagtgagaaggggggcagtgagaaggggggcattgagaaggaaggggcagtgagaaggggggcattgagaaggaaggggcagtgagaaggaaggggcagagagaaggaaggggcagagagaaggaaggggcagagagaaggaaggggcagagagaaggaaggggcagagagaaggaaggggcagagagaaggaaggggcagagagaaggaaggggcagagagaaggaaggggcagtgagaaggaaggggcagagagaaggaaggggcagtgagaaggagagggcagtgagaaggagaggcagcgagaaggggggcagtgagaaggggggcagtgagaaggaagggatagtgagaagggggcgcagtgagaagggaggggcagtgacaaggagggggcaatgagaaggagagnnnnnnnnnnnnnnnnnnnnggggcagtgagaaggagggccagtgagtaagggggcagtgagaaggggggcagtgagaagggggggcagtgagaaggggggcagtgagaaggagaggcagtgagaaggggggcagtgagaaggagaggcagtgagaaggggggcagtgagaaggagaggcagtgagaagggggggcagtgagaagggggggcagtgagaaggggggcagtgagaaggagaggcagtgagaaggagaggcagtgagaagggggggcagtgagaagggggggcagtgagaaggggcaggagtgacagagacgctgttgtgattggggagaggaaggttcttcagaagggaagagagtgacatatgtctatacacgtttgcaaatctgttgacagaaacagcttcgaacctcattgcttttctaaacacttcattttcattccctcctcccttttcttcccctttctcttccccttccccttccttttccccttccctccttcctttgactggatctcatgaagctcagggtgctgtattattctttaaaaagaaaagaaacctgaccacttgccatgtatggcaccaacttgcccttgggagaagagtcaggagtacaagatctgtcagatacacagtgagcttgaggccaaccaggaattcgtaagatcctgtcccccaaaataaagcaaaaaaaggaaacacacacacactaaaaacttgagtgttaagtagatgtttctgttccctccccatatctaggtccagtctcctggtagttgatgttagtagttttgtatcttcgcatgtggctgtataaacctctgcatagatagcctgtgtcagcacattaccctgggctgccacattcaagatcaccacccatatggcttaaacaaaactctaatgcctcatttccagaggtgaaaagccccagagtaagattttggcaagttgtcttctaaatgacccctgtagagtcttcttacatggcagtccctgtgactctgacaagcccctgtgttcagggctgttccaatgatcctgttcaaaaccctaccctctaaagaccaaataaagtcacacttttgggtaccagagactagtacttcaacatgtgaattttgaaggagacacaggctcagtaatattaaccttctcatttcaaaacagtatcctattgtgtagaaagcccacgattactttaacattaggcctaatgcaaatggattgtaggctttctcgatgtttgtaactaagtcttgggatgctcataggtgtgattctgccaggatgaacttggaagaattgtaagtaatgccctctgaagagtataaaaattatatggaggggagttcatgaagcctcaaccctataaggtatacaaagagctacaggcaactaaggaatgtcaaagcaggaaaagtgttccccggggaagagcacaccattggttatctaataccagtggtcagccctgaaaacacacacacaaataacactttacagtaagagcagggcacctattcatctttaggactatatatgtgtatgcttatatgcatgtaaaaacagtaatgaaaacagaagccatgaatttgaaagagtaaggaggcatatatgggaaggtttggagggaggacagcgaagtgtgaaatgatgtaattatgttctcaaaaataaaattgaaaaaagtaaagtgaaaattataccccttaattcttggtgatacgacgctggtaggagattgagttcagcgtgtggcttgtgatggtggcccagggcctggggttgcttgtgcttttgtttgagggttttccacccacatgacttcatcatacattactcactgaacatctatttactgaggcaagggtggacagcgccgctttgttcatttttaatttttatcttaaacaaaaggctttttaaaagagtaattttgagctcatagcaaaactgaatagaaaaacagaaactttttccatatgctctgttcccacagaagtgtaccctccccagtgatgactggctttctcccatggtgaccagcctcctcctgcggtcatcattatctaatgtgatgatcagcgtcctcccaggatcagctttcctaatgacatcagtgtcttgccatgtcaccatgctctctcttggacagcatccctcagcacagagaccagtttatacctcatgagtctgtatgtccccttggtttcccaaagtccctagtttacgttacagctcagtcttggtgctctaaaccctgtgtttgttttataagcctgacttgtttggcaaaaggcttatgccctgtagagccaggaataggacagtggcttttctctccaagcttgtgacagcctggagtttgtccagcaggaattttctaaggtgaagaactggaggaggttctgccagggtaataacactctggaggcaggggctggatgaatctattatatcctaagttgtgttctccctacagtgtggccagtcagtgcaggtggagtaagaatttcttggaatgctagcgttccttttatagactctgttggcagtgtccacatagtacatttgtcagcatttagcttaaggcaatgcatgccttcccttgtttattggtatagtttgctttgaagggtgactcttgatatagtagagaaaggctattgttgaattgcaatatttttataatctttatacaatatgtacacgcatataaatgtacatatgtctgggttttggcagtactgtttttagacctgtggcactgcacatgctaggtagattctctacactggaccaaagcactgcaagtaaatagtgctgcttgacaaactcggtgcatacattgatacatgacttaaacatgaattaaaccacctgcttcgttttagtgttctccataatcgtatcctttctgtgaccatttagacaaatttaaatatctgtatgcattccttttcccatctgtggagatagtaagcctaaccatcgactctgccgtggtacagttccatccttagctagaagctttctagctcattctgaatgcctgagatgttggcctgtaaagggatgagacatcctgcctgggttttgaaagtgattggctattcctgtgctttgggccagtgacaggcagcacagcatgaggggagcatctgacagaagagccagggcctcccaggcctttctgtgacctgatcttgctctagctttgcacttaggtcagacatcttcaacatttgggtcatgaccccctttatgggccaagtgaccctttcataggggttacctgagaccatcagaaaacacagcaggttatggttcatagcagtgacaaaattaaagttatgaagtagcaacaaaaataattttgtggttggggggtcaccacagcatgaggaagtgtgttaaggggtcacagcgttaggaaggttagcgaccactgtcttaggttggatgtggccgggccagtcttttgccacatttgagcagtgcttaagattcaaactttagtgaactgcttctaaaggaattttctttcctaatagggtattttgtcacatctgaacttggtatgcagcgaatatggttatctgaaacaacgtggcttaaagaaaagctaggaaagaggagagagagccagggaatcaagctagttttgggggtggggtggagggaagagagaattaaaaaagaggaagatctgtacacatatggaaagagtcaataaaatcagagatgtcagtggggaccaagaggcctgagggtatggagttggtagtgctttgcctgtacaaggccttgggttcaatcctagaacgttatggtggtgcatgtctgcattcccagcctttgggaggaggagcttgaggccaaaacaaaacaccagccaacaggatgtctgtatgtaaagggaacagcagctatgctggtaaagaccacgtgtagcaccgctctttgcacgctctgtctgttggctcagcctacggagaatttgttaaaagcggtggcctgtttagccttttgagtaagatggcttgaaaagttgagtgctagatgctaagaagacgttagcaggaatttgaagccatgttgccatcctgaagggcagagactccaacaccagtgctttcatgaagtaaggaaggaagcttgtgatatgaccagacttcggagatctatgacattgttataatttgctgtattttcaacacaccctgctacctagtctcactgtacatgatgtttataatatagtcttgtaactcgtgcttgtttggaagctttgcaaagttcccaaacttccagatcattttcaagaaattgaactattagggcttaggttcaatataaaacagtgttggcactcacagattcagatgtagtttgcagtttatggcaattcctttcagagaggctctgttgtgtaaaatctcctttacaccagctgcagctgagggggcttccaaacgaccacagcaacgataagggacatgtagcgtctgttcccactgttactttataagtggggataccgagtcttaatttctaggtggcagagtctaactcacagtccacaaaggctgatttctctcctgagctgctatccacttactagcctgctgccttatgttttatcgaagatctagttttcccaaataatgggggcagagagaatgttgaattggttcagtatgtgctgtacaagcaagagaaattgatatgatttctgggacccacataaaaaactgggtgtggcagcctacccctgtagttccagtcgccatgggcttcctggccagctcatctgggtgagtggatgaggtccacattcagaggaagactctgtcttgaaaaacaaagtggaaaagtgtcaggagcggcatccagtgcagacccctggcctccacccacatgcatgtgcagtacacatggccatgtgacccagtgacctagtttccccaagtgaaagacgtatatactctagtggtacatcaagagtctctgccctgagcctatactgcactcaatagcctagaaagactgctgtaaggggcactagactgagaaataaacagtgcctgcataagagcttactgatgcccttcttcaaggatagccttacttgtgtaaggagtacttagtagaactcccagcgtgtccctaggtgttcgttggacatttgtattgctgggtccaggttcttgtttttcatgttcttcttctttaatggaatattttttctaggttttagctgttgcttttgctcttagctgatcccagaaacctttgtttgctcttaagtgtaatgactgtgtacttctgagaaagtccctttcctgtttatttctggccgtctcccaagctattagtgctcatcatttgagacagcatctgactagttctaacaagctctgccatgcaccagactcttctcatgtcccgtggtctgatgatcaatagaacagtcaccttgtagcctgggaaggccaccagccaaaatgtttgtaaagggtcaatgtttgtaaagtagtagatttgtatatgatatcaactggatctcttataatttagttcaaatttgacactacccaggtttgataccatctcacaagactgtcccaacttccaagactgatcataatctgaacctcccatagtcaatctgattgggtataagcctgagctcttagactttccacctagggttcagcaatgggcatatcttcttcgtgtacttactgacattgaaattctgaattccactgatgagggtttttgtaaagatgccagcgtatatcataactgattcagtcatcagccattggccacttaaccaccattctccctctgtgaggaaagagcggggacctgaaattcccaatcttcagtgtcatgtggctgacttctggcaggcagattccactctacagtgactggggagggggctcaccaagagtcatggcattaagtatagactcaggagtggtttaaagggggttatgaataccaggacactccttgcccacccgtcaaattccagtggttttagaggctcgtattccatgttttcttgctgtgtcacagtagcacactctgaagggatgtttgtgtctttcctagttggcctgctgttgcggatctgctggctgctccctctgctgtggctgctgccctaagttccgacagtctcggaccacccgcttcatgtatttattctacttcatcctggtcatcgccctctgctgtgtgatgatgacaccctctgtgatgaagcaggtgaaggaccacgtaagtctgtgggttttgataagttgtatgtgaaacttgatgtagaggactgagttcaacatcactgtgattgggggcttgtttcttgtctgctgctgtgataaaacattctaacaaggcaacttatacaaggaagagtttatttcatcttatggttccagagggataagagcccatcacggcggcttggcatgacagcacgtagttggcatgacagcacgaagttgaaagctcacaacctgaaccataacacaaagcagagagaacagaatggaagtgggcaaggccttttatttagcctgcctccccacccctgtgttgtactttctccatcagggccactccatctacatctcctcagctccacctacatctcaaacagcaccaccagccagctggggacagagtattcaaatgtctgaggctacggggggttgggggagggcatttctcattcaaaccaccacacttggtctctgaattgtctcaaagcttgtccactgctttcaggccaaacaggcaagccattcaacagctggatctttaatccactaattagtgtttggcctgatgtatagaatgtctatggatgtgatgtatgtccatgatggttgcacacaagtctgtctgaatgcccatgaagactgaaaggacatcaggtgttctacctattacgctctgtcttgtctctttgagacctggtctcatgctaaccttagagctgggttggttattggaggccagcgagcctcagtgatactcttacccatcgtgctgaggttatggaagcacgcatgggtatgctcaacattttacataggtggtagggattcaaaatcaaattttcacacttaggcagcaaggcagagccactcggtttagccactgggccatctttccagcccctagtagttttatccttagtagtaggatatccatagttagatgctgttggtagatgtcagaggattatgtttggtctttctttgtttatatctgtttctgataaaaacacagcctctgcatgtagaactttgcacatctttttatcttaaggatgactgccagtatttcaagtcatggctggttatacacacttaattcagcctttatggaaaggatggtgcagtttagacagtgccacagataccaggaagtagtgtgcgatgattttaacctttctagacagatcacttgtccattgttgtctctgggtggaaggaagagtcccagtcctttcttgggcagtgtgttttgagggatccctggagtgtgatgttcatggagatggatgtggggtctttcctgtccccacatagcaggcctctctgagccatattagaggatagtgtgttgaagtctcaagaaagcccaataaacaacacaattctttctgtcctaggttttgagaaaagagactataaaatgtcatcaagtagaggccagatatcatggttattatttaacaagtcacatgaaacctttcagtttgtatttgcagtgaggtcagcttcctcctcagctcctgaaccaatcagtgcattcacctctgctccattggcgtggttcatgatagatttcctcttctagggcacagttggccaggaagagaggacagcagtgtgttgaggcggctcttgtctcaggggaaatggtagatgaaagcatagctgtccaagtccatttgcctttaaagtaccgctgagccctcatactcctgggcaggcaatgaggtggcagagcagccaggcctagagtggtcctgtatcccttctgcagtgattatagtctccattggagcaactcctaagcaaacagtcccagtcctggtccgtgctgtggccatttcaaacacacccattttctttccccttctctttatggtcagagcgggaccggggccccgcatgtactaggcagtccctgaactattgacctacatcccagctgaaacaaccattttcttacaggctcttggtctattatcctgtttatcctttagttagaataggcccactgagcttcctgttgggtaatacatttctgattgtacttgtatgcttttgattacagaataaacgactgtaaagcctctgattaaggcaccacagtgggggatatgtatgtttagatgaaaagcgaagtttgtcacttggaaaaaaaagatgggaaattccctgaggcctataccaaggtaaaaagaataggttccatgtgggaagatactgtagatgtttggagcagagaccaaggccttgggtgcctggaggggtctgtgctaagacttgctctgtgcttattgatatatttaccacctggtcccctcctggcatcgtggcttaacttaatgtgtttagggaaagatgtgtgaactcacaggactggaaatatgactcagcagttaggaacaaacagtgtgcttgcagaggaccaagtgcgggtcccagtacccacttcatatagctcaaagcctcctgtagctctagccccagggggtctggcaccctcctctggcctctgtgcgtgctcttcccctattttattaaaaaataatatatcattaaacagtatatataattaaaaatgaaaactttttaaattaaaaaaaaatagctagactgctagaaggattggtttgaactcttcctggacagaatgtagaagtctgttgaagcccttttacattcatccatttagatgacctcacatgggctagtgggtcctgcaccactgagccgcacctcagccctccgttcactacttttatttttctagtaatgtagtactctctttttaaattcataagcagcctgtggtgacagtcctctgtctcagcttgatgacccactgtggtcctgtggtgacagtcctctgtctcagctatctggtaggagctctgctcttaacttttcagtacgagtacaatgaaagccttagatccaagagacgaaagtctatgcctatgttattagtaacatctcttactgcaattgcaattgtgtaggtaatctggaagccacagctatgtgttttaggcatacattttgtaataactcacacactggattcctatttaagtatcctgctcctgccccatgcaacagccctaacaattccttcctgtatctctgctgcctgactcctggcagaatcttcaaaaggaagatgctgactggagttgcccaggaaggcttcatggaggcagtggtgtgtgtacatagtaagtattttaagagctggtttttataggataatgccaggtgccagattttagttggagcattttccctgtatcttcatccttcgttaccactggtctcgtgtatgcagaaggtggtggtgttatcccactctacaggtgaggaagcaacgagtcacctaaccagtttatgctggtcttatagccaactactggaggtagacttgggatttgaacagggcagattatgtgctcagctcctgggctgtgtagctggaaaggcagagaaagagcaaggatagggcatgtacagagggacagggaaagaaaagacagtgtctcacatgatcagatcccactggatttcctgttataagataaaggagcatccatcatagagtcccaagcagaggtgtgatcgtggagcagggggagactgaaggaagtgagatcactggggtgagtcgggatcagagatcagatggagagggaggggaagggaaggtgtaaccctggcgcctcgcagagtggtttgtcaatgtttcatgcatgcctctgaatgtacctatttaaaaatggcttggccaggcttcttgcatagagagtgaggtcactctgagtgaaacaaatcgttttcccttcacaggggatagctatgtggccacaaagtcagcttattttgtggtgctacaatcaggctgacctcatgctcaggcggtgtttgagggtgggccctgaaaggtctccttgtagtgcataggctggcctttggctggctcttgcctgctctttgttggcctgtgggaatgctagaggtgacagtagcagaggagaaaaagaaccacaagcttgtggcctggatggggtgttattgccacccactctgcattcttgcctcttagctaggcccctgtcggggtcacgtggcctgtggtgtgagggccactttctggtttcagaatgtgatatctcagtgagaaggaccagtgaggcaacttggtcctgcttttcatgaggggagccctcctgagaccggagaagggtctcctgtatgttgagtcacagcgagtggtttttgtcttcttggagcgagccttttttttcccatgccagaatgtaggagccgtttaggctggctgctcttggcagtcaccatagcatccaagcaagtacagaatgtgggagcaccagtggacattagaatgctgaacaccagtggacattagaatgttgaacaccagtggacattagaatgttgaacacaagaggcaaagcaagtgaaggagtaagggctccaggtctgcactgaaaaaccaagatctgtctgcctggtttgaagataaaaggtgacagttgagtgtcccagaagctggtcatttgggagagagggcaaaaaataaaggcgctctctctctctctctctctctctctctctctctctctctctctctctctctctttcgagacagggtttctctgtgtagccctggctgtcctggaactcactctgatttctggcctcgagctcagaaatccgcctgcctctgcctcccaagtgctgggattaaagacatgcgccaccaccaccaggcaaaataaaggctcttgtgtgctgaggaacaaagatctcctggccttttccgctgagagctcactgcccactgtgggaagaacctttggtgctggaacctttcatgccttaggttcatcttctcctgccttccacttggcacctccattgccctgatggatgcagatgtcagacatggtgcatttaaaaatgtcaaaaccccaacatatcctaaacagtgctgtgaactcatttgtctgatatctggtgtgtggagcatgatgtaatatggttgctttacatttaagttgtaaagaagttctccttttgttgtgaagagagtctggtacaatctctgctgtctttttgtcgctcctacagtcatgtttagaaggtgttatgtctggctgtaccttctgatctctgcacacattttattttgcacattatttcccagaggtgagtcaggatagttttgagtggcagtgacttggcaactgacgactttgactaggttttccctagctgacaagggcttttgcacttgttttcaacatatggagcacctgcaaggaacacaggacaagactgaatgggatctgggtgtgaggaacgtctgcctcatgggattgtacaacagcatctcccaccttttcttcctggcctggatgaaggtagccaggttgactatgtctctctcctggctccggactcatggccacagccagattcagatggctcagatgaggatagacaaactcttggaactatacagttggcttttatttgctgccttgaggggaactggcatgcagtaatgagaccctaaccctgggctgtgcttgtatctaggcattagcaattcttggaatagctttgtgtttctgatggagttgtatgtgtcaagatagacacctgggctcttttaggtgaccattcaggctgcgggggagcagggaggtcagttagcaagcgggttagagtgagcttttcaaataaacttgcatggccttgggctgagaaacaagacacccttcttgcttacagctagtttgtccgttatcaactagcctgagtatgtccatcaaggaacttgagaaatcactttgttatctatctactttgcatagcatttggctctactctgcttctgtctcttactcatagggcagggctgggacaccttagagtctctgaggtcctccttctccaggaaccatttgtcacctgctcttttcttttgctctgtcttttcactctgggcattgagtgtacactttctgcagtttttgcatttttcttaagaggcaaaggtactttgagtctgatagctgtgcatttggagtctttgaatgtggttagtgggatggattaaaaggatttctctgtgtggccagaaaactcactctttgaaaacacagggatgagctagacatacgaagttggtatttcccagtcattttcacattgggcaagaagaaatttatgtcttcattaacatactgtggcactgacagatgataaagaaaatgtttaaagtaaactaagggtcctaaggctacctgctataatgcagaaataccaacttctcaattccctttaactttaagcttgcaatcctggctgtgacctcctgctaccctggtctgttttgggaccttgccataccagccattgctggtagagttctgatctcggcctcctgtttttcagagcccatcagctatgtggctagaacctgtgtcttgccattaaaactacttccctaaactacttgcctccatctgtctacaaccccaatcctggagtgcagcaaggccacccttcttctggtgaagctctgcatagcacctgcctggatcacgagtcaccctcagccacaggctcctccatctctgtcagcccttcccttttctttctctcattacagacttgtcatcttccagaagcattctcccccttttcgcctgtccttagtaaatccagagccaccctggcttcttgttgctccttcatttttcttgtccttccttgtagaggcttcctgtttagggcaatattgcatggtagttgagagtttgagcttcaaatctggacagctgaattttgaatcctggctcagttacttagcaaagttttttactctttctaccttgatcttctgtttaaagggaaaaaaaagataatagtaaatcaagatgttgcttaagtgtttgggtgccctagactgcatggggtcctgggtttgaccctgattaccaacccatctcatttctccataaatatatatcatagtcatccagtccacaggcatgtgaaaacccactgatctaatccgggaagcatgcttagaacaatacctggcacattggtttcccagtagcatgttgacatctccagcatccaagaagtcagcaatctgagtcatatcttgtacagctttattgagatccgattcatataacttacaattgagttatgcaactggcactgtaatacatagccttagaacattttgtcactcctaaagcaactatatttattcacacatgcttcctatttcttcccaagttcctccagccctacagagccactattctattttctttctatatggatttgcttattttagatgtttccatataaacggagttacacaatactagaatttgaatgtgtctccgaagaaacttagtttccaagttcatttcctacttggatacaggactttagggggcataactagggttagatgaggttataaagtgcagacccctatggtgacagaagttctctctgaaaagaggaagaaagacctgagctggcacagttgctgaagcttgccttgtgatgtcctgtactgtagaatgatgcagcgctaaggtcccctctgataccagctttgtgctcttacgtttcccagtgtctaggaccatgagctgaacaaaaatctgttttttcttttaaaaattatgatgtattaggtattttattatagtaacaacaaaacatactatgtatttttttctacatgacctctttcacttagcatgttttaaaaggtcaagcacactgtagcatatgtcagcactttcttcctttgtatggctggatagtagtctacttatgaatactccatattttattagttcattcctcagttgatggacaatttatgctatttttaccttttggcacacaatgtcacctttttgtatgtgtatataattattttctgggtatatacctaacagtagaatttgttctacaatctaggcattctggaccatatgaaaacaccttgtgtaatctttttttttcttttttttattattattacgtattttcctcaattatatttccaatgctatcccaaaagtcccccacaccccccctcagtcccctacccacccattcccatttttttggccctggcgttcccctgtactggggcatataaagtttgcctgaccaatgggcctctctttgcagtgatggccgatacatatgcagctagagacaagagctctggggtactggttagttcataatgttgttccaccgatagggttgcagatctctttagctccttggatactttctctagctcctccattgggggccctgtgatccatccaatagttgactgtgagcatccacttttgtgtttgctaggccccggaaccttgtgtaatcttttgaggaattccagtactgtttccaaaatagttgcatcattaacatcctcaccactgtgtgaaactttcattaagtgatgtataaatgttcaagtttcttctacccttgccaactcatattatttccatctccccatctttgtgggtctgtgatctctctacctgtgccttaaaggctaccctgagccgggcttggtggctcacgcctttaatcccagcactcgggaggcagagacaggcggatttctgagttcgaggcctgcctggtctacagagtgagttccaggacagccagggctacacagagaaaccctgtctcgaaaaaaaaaatgtctctacacagtaagggacttttttggaatcacttacagtctgcagtccaactaacccaacaatgggaggctgtgaatgaaaatgctacaaatctagtagtagttgttcgatcccacgaggctgggtatcccagctggtcttctgtataagctgaagtcttgaagacataggttccagcagatgtgctggcaagtatgtgccaccgccttccttcttccagtgtcctatgtaggcctccagcagaaggtatggcctagactaaaggtgtgtacgagcacacctagacagttcttgaaacttgctctgtcccaggctggccttgaactcaggtctgcttgtctcagtctcctgggattaaaggcatgtaccaccttgcctgggcctaagcttttcacagccacgatgccgcaggatccggatcaaaagcatctgtcttccagcctcaagatctggatcacaggtgtgctcttcatttctggattgtagttcattccagatgtagtcaaattgacaactgggaatagctgtcatgggtaccttcacttagaacattgccagagtcttcctcctccttcccatttttatatccagtactgataacagactttccacagacaggacattgaggtactgagtttgtgctgtgcgttctattcagtcatgaatgagttagctaggctaggctcctgccagcagcctttcttatctagacaattgatcccatgggtgagctgagggcactgttgctacttctctttctcccacatcaatcctgttccagattcttggagtcactcattggcttgtctgttagccaccgaagctactgtgcttgggtgtttgtttgtttgtttgttttgttttatcgagacagggtttctctgtatagccctggctgtcctggaactcactctgtagaccaggctggccttgaactcagaaaaacacctgcttctgcctcccaagtactgggatcaaaggtgtgcgccaccaccttccccggctttgcttgggctttgaaagtcttgctaagtgcagcatctagttgcctagttagttctgatgactttttacactcctttggtggttcttggagtggagtggttcatgaaatgcttccatacaatgtttaggactctagatgggcagataagctactttttctcctattttcagagggctatgatgacataattgtcagccttgtgcatagttcaccttcctggcctagtcacggggatcccgagaactaaggtctgaggctaaagtgtttaattaaagaaataagcaaagccaggatgcagctcccatctgtgattggtgacagtaaacagctgggcctattaagtgttacactgagaaacagtgttgtcttttacaggttataatttgagtcagttggtagaagaataaaggagactggaagagcagaaaagccctaagtggtcattttaactctccagtcatctaacagatgacatagctcatgaagtgaagtggtttgcccaaggcttaaaacactagttacaacccagggtccctggttgcttgaccagtgtttcctgttcatatcactaggtttgcttgttggccagataatcacagaaataaccatcctagcctaaagcaagcatagcttgctctgtctcctaaacactggatacaggagcagagaggaggagtctgtctaggaactgccttcttgtaatagtgacatccatttagtaagcagagccttccttgactcctgaatgttctctgggcacagtagcaggaaggaatgattccttctggaaaggtcaccttcccacctgcctccttcccatccttcagccaaaagctgggctcaaagaaggaaaacagaatagccacaaacgatttatttggttttgcctggaaagtgaaacctactcttgggttatgttttgtgtatcttcaaaagacagacaacatcattggtgaaaaatatatcactttgatgcaaaacaccacagtttgtggtgcagagcagcagggattcatgctaaagggcaaaagtctggctctctgactgagtttggtctctgttggttgagtgttcaaagtgctgggcccagaggttgttttagttgaattctagacccaggcaaaactccccattctcagcagctacctgttttcttattctggagaaattttaagtttattattttaacccagctgagtgaaacaactttcaaaagttcttttgaacaacagctgagttccgtgtcagtatgctttgtgggtcagtagtgtggagccccagttcctgtggatcactaggagctgcagaggtctcctgggctgggagttccacttcttattttccctggtcccatccctcctcagcatggcttggtggggacaatgttatttttcatccgaggtcttctaggccggaaacaaacaatccctgcaagtcccagccttggctcctctctgctgctcctgccctccatacagtgaatgaggctgggagattgttttgtacttgaggcagtgctttgagcgatgatgagaggctttggctagactctgaatcaagggctaagattgactcttgtctagaaaccacgagcttgtcaggagctgtacagtaggtaatgttcactgtccttgtctgtcagatcccttgcacagaaccctttggaaggtcccggatgtgagctggctctttttaaagattgtcctgcctatggtagggagaaagtgatgaggtgagaatgtgaattattctcagtcctttcactttgaccatcaaaagcatccgttaaatgactggcccccaaacactcccagataaatggaatagtcgggtgcttacagttagaatgaatgctattacctgccataaaaatggagccagaggagcagacaccacagcacagaaggagctaagatgaactaggctcagagtcacgggaggaagctcatggatgctgggaacacagtaccatccaaaccccatggggccttatttctgtggttttcattatctaaggtcaatggaaatccaaaaatattacgtggaaaattccagaaataaataattcaaagctttaaattatgcagcactctcctactctatcctgcttaggacatgaattatccctttgtcccaccaactgtcactcagtggacgttttggtcatcagatctgctattgtggtatcagtacttttactcaagcaatcctttgtttgtttgcatatttgttggttgatactggggattgaacccagggccttgtatgtgctgggcagttactctcccaataagctgtaactaacctcacctcttctctcctcttcttcctcttttcttccaccttcttctcctcctcctcttctttccacccctctcttttaagatagggtctctctaagtgtcctaggttgtcctcaaacctgtaattcttttgctttagcatccagatgtttagatttttaggaatgtgccatcaaactcagctcaagtgacccttttacatgcctcccaagggtaagagtattgatgttggctgttttattacagtgcactgctgctattgttttattttatcataggaattgtgcagctattactcagattgattgcccatagttctaggcacccattgttttggagaaaggatctcatacagctcattctggcttccagctcagtacatggctagggatgcccttgaactcatttctgtctctacctcgtcaatgctggtattacaggtgtgtactgtatatctgcaaataaagtgagatcggtgtggtttaattttgatggtccttttacaaagtataagggatattgtttggccacactacaatctcagtacattctttttggattgtggggttttgtaacagggcctgtgtccagaatagcagcagaatgtgctatatagctcaggatgtgctagaactagtagtaccttctatcctagccattgtagtgctgggcactttgatgataggtgtgcactgccagctgctgagtacattctctgctccattttcttttgttttgattcattggagagaggaagagaaagagacagagagacagggacagagtatatttgagataagatcttttaagatcttattttgtagtgtagactagccttgtctgaacttcctttgtagttcaggctagcttttaattcaagtggtctgtctgtcttttaccctctagagtacttcaatacagacaagcaccatgatgcccaattgctgatcccattatttaaaaactgcttaaaatctgctgctttcattgatttatccatttggtaccattaagcataggtaccaaaaactcaggtgttctaggataacaacataaggcactgaacctcaggtaggggaaaccaatagtttggtagctggcttttgtggcgcatgtagagaggctgacaggctgaggcaggaagatcttagttttgaggcaagagtgtgtatggaaggaaaccctgataatagactggttggcctactcttgtgaactccatctggggatgtctggatagatagctgaggtgagggagagactccccacaggaccttaacctgttccccgtggctacggaaatcataatgggcgcagttcagtgggacagttttctacagtcaacacactagtctaaaattaatgtatcgacatgctggctctcatcagtgtgggttttatttttggttgttacaggctgtgcttctaggacagatgggacagatgtaacagatgtgagtggctctgttaatgctgcttaaggcttttgagcattggacatccctcccccaccacttcctctctccatcaaaatagaaagacgattcttctttgtacacgaaaaatggcagaaagttctacagtttgtttcacttaaaaccagcttctgtgtgaagcacatctggtgagggaggtgccaggagctgtactggcataaccaggtgtgcccctcagctcccactcctttggcttctgatgggtagagtgacttgtcacagttgccacttggccttcaaagtataaacacatactttatcagctaactgctctgtattaaccttaagactgggcagactttctccataaatgtctgctagtgaaaactgcaggctctgggcttccactgtagtgtaagagtggcccaaacaatgccaacaaatgaatatagcttcattccacaagaaagttatttacataaccaggagactggctagatctgacctatgggctgtcgttttcctggctgctgttttaggcctgactgactccatgcaggccacatacgtacctcgtctctaagagacaaacttcagtggcctaagctttatgctcaggcaagcagagctctagcttacctttcaggtaagggctgcatgaaccccatgcctagctaggcaagcacaagctagtgtctgttattctatatgggattataagcaagtggaactaatttatggggaaatagttatttgtatgaatcacttcagtcatgttagggatgaaggaatgtgaggaatgtaaaaatgagcatgtgtggatcctaatacggggtaagaagtgaggagtgctggagccacagtggccgctgcgcatggttctcaggagtgggattcacaagcaagggattcaggctttcagaatcacgagttgtttaagtatgttggtgtcccatcttacagaagacagttcattcttgtgccctatcattgtttaaatatacatgatacacatgcgtggcgtgtacgtgtatgtgtgtgtgtacacatatgtatatatatacatatgtacacatacacacatcactatggttatctgcacagcatttcactagacagttaattactcattagcaccgatttaaactgattaattagccagtgacttacagcactgggatcaaatccaaggcccatgtatgctaggcaagtagtctactggttgagcaacattccagctttataatatggatcttaaacctattttatttgatgcttctatccacatgacctgaataatacttgcccagagtaggtgggaatgagtggctaactaaaccctgtgtgtcacacacgtgtggcgtgtggtgtggcataggggataaagcgtgtgcgtacaagctctaacttgactgagctttccatatttccccagaaaccaccatgcatgcagctgcaccctttaagaggaccttcgctgacttggttagcgcagagagatttgtcaccaggggttgtagctctccttggctgcgtttctctgggcttagactgaccttcctctgctctttccctccccctcctcccaggagagtcagtcgattcgagtgggcgtgggttgcttcctttgccatgtgtgtgctggctctggactcctcagccctttcttggctggcctgaaacttactgtgcagaccaagctggtcttggacatgaggcatccccaccccctcagcccatctctgcctcccagctactagaattacaagcatgtgccagcatgcccagtatctttagtctagctgtctttctggagtgagtacccttgtggagctatccacctacacctccttttgatacaggcgcctccaggacaggctgtcattaaatgaattactgttctgttgccgtgattcactcctgtggttacctgtcaacttcaaaaccgggaatcctcgtcccaggtccgtctctgcaccttccatattcacaaatgatgtcacatccagcaggacagcgtctctcatggtcggttctcactgctcttcactgagatccacttctgtttctccttcagaatcagagactcatgagctctaccttcatctttacctaaacctctgtcgctggagatgaagttcactggctccactctgtgtctggaagagaccttcttccagtcctgtgttgtgtcctgtgagttctctggtttggactgaaggcttatgtatttagccctcagttagagctgatttctagctgtgaggacttgtgtgaactacattgtcagtctgcctgtgtgctttcgatctctgaaggctttctatgggggacatgacgctcctggtttgacaagtggtagggtcagtaaaactagaccatgggtttctaattcaccccttccttttctgaacctttaataaggacagaatatatacttttctcatatatttttaaaaaaggtcaaggtacctagcccaaagaggggcaaaccataattggtgttgctggttttttttttaagccttttttattagatattttcttcatttacatttcaaatgctatccccaaagcccccaccctgctccccaacccacccactcccgcttcctggccctggcgttcccctgtactgaggcatatgatcttcgaaataccaagggcctctcctcctattgatggccgactaggccatcttctgctacatatgcaactagagacacaagctctgggggtactggttagttcatattgttgttcctcctatagggttgcagacccctttagctccttgggtactttctctagcttgctcacagtcatcttttggatgtaacacagggcccctaatgaaggtgttgctggttttaagtgctcctgggttccccaaaggctgcaggatgctaaggtactgaggaaagaaccctggcctcacagtctgtgcagaagggtggaggctggctcagtattcttgtctcacagctgctgtgccctgatcagtaacaggctaatactgtgctgtcagaattacttcatggagaaaagtctaagagagcctgaaatgaagacttaaagtcgagaggtgcacccctcccccgttccagcattctttccaagtgagggatgacgaaaaagaattcttagatcttgctcttctagtttctatgagctaatttatcactcatgccgagatgcccagagctttctcagcagtaggattccatctgaagctctagaaatttgatagaagcaaatgtaagactaattagctttggtaatagcacattttcatctctgaagtcatacagctatgtgactcccatcttcccttccatttctgtgaggaccactcccacaaattttttttcccctaagtttggatcatctagaacccgagtcagtgagaccaaaagacttttctgtagccgtgttttatgtgcctgtgtgtttgcatatggcatatatgtatgtacatgttcacacatgtatgcctgttgtatgtaggtgcttgtgtgtgtgtgtatgtatgtgtgtgtgtatatatgtgtgtgtgtgtatgtgtgtgtgtgtgtgtgtgtgtgtgtgtgtgtgtgtgtgtgtgtgtacaaatacatgggaggccaggttgatgttactgtcctcatttggctcccagcttgttttggataggatctctcatggaaccttcagcttattgattcagccagacagcctgcccagcacatgttgggattcccctatcccagccccccagtgctgggactaaagcatgtaccttagagtctggctttttacatgggtgcgggggggatccaaacttgactactcaagttactatggtgagactttagcaaatgagctgtctcctcggctcctcttgccttcggtttttaatatcaatttacccaagtttgaagatgccgggggcattgctagcttctgctgctgctgctgctgctgctgctgcttctggtttctttcacttgaggttggaacttccgcacatgccgtggaagtggactttcctttaggaagtgtctatctaagtctgagagttctgtttatgctttgggaacttttgtttccttttattaagttctgcagatcaaatccctggccttgcacatgcatggtaagtatattgctactgagctatgtccctggcccttttatgttttgagacagggtcttaccctgttgcttagcctggccttaagcttgttatgtgtcccagactggcttctaacctgtgatacacgtgtgtcagccttttaagtactaggactagaatcaagggccaccgtgccttcctggaactcagttcttagggactaggacccgtgcaccactcatctggttggcatggttctatagtaaatgctttgacacagtggatggagtccagatgcccaccttaccttgtttagatgaaatatacccttcagtggtccttgcagtgtgtctgactccctctccagcaagctccttctgtatttatacagtgcctaagcttatgtaatgactaccgtggacaaggcactgtaggtagcccttcacaaggattatctggaggaatttcctgggtaatttatgagattacttcattttaaagatagggaaactgagaaaggggtaggggtcgggggaagcttgcccagatgagcagtggagtccggactataaatccctctacgctatttattcttacttgacagtttgtgttttgagtttgatttctctgtgggatgggaaaaaagcctttgctcccagggacccgcacagaacaatacagactcagtgtgtgatgtccttggatgcccagagcagacttacgaggtaacaccctcaagtatggaatctgtgtgtgatgtatgttttctttccccaaaactggaatagaacttggaacagcaaatatttaatcagagaaaattcctcttgttaaaaccttgttagcctgtggcgctcggaggctgttacctaaaaatacccagcacttactgaaagtaagtgttgctaagtcacccacagagcataaaagaggcttagttaatattggcagcgggggtatttgcccttagtttggatcacattttcaatgccacatacctaccctgtgatgctcctgggtgcctgtggccacagaagggcctgacttgagtaaacaagggaggggtttactgggagtggccacagagaaggctgtacctgccagcgttcggagggagggagaatgtaaggaaggaaaaaggtaggagggaggggaggaggatgagcggtgggctggtataggtggggaatgggccagtgtgcatgtaatatggtgtgtatgggggttagtgaggtggtgtacacaaagtgggaaaaggcaggtttgtaatccaacacttaggaggctgaggcaggtggatcactgttagaccaaggttactctgggttagaccaaggttaccctggggtacaggggagatcttgaaataaaaaaggaagggaggaaaagaggaaacaaagacagataacaattggtattattgacaagtaagtcatggggtggaaacactgggtctgaggttacgaggatttgttgctctcgtagagactagggttctgtccctgacactcacagggcagctggcagttccatgatttctgatgcctcttctgcactctgttgacactgcatacatgtggaatgcagacatacatgtggtcaaaacacccccccacacaaagtacatctttttttttaaaaaaagaaactgtgtaaataaaatagtatagtaagtgatgttgttgaatttcttctttataaatatagattttgcttgtcaatagtactgttcatatcaatgtgactccattagggtcgagagctctgaaacagccttcttgtttgtgggcccattcatattcataaacttttttttgatactcatctacatacctgaaagacacaacttacaggaggaattaatcattttggctcatggtttctgaggattcatagttgagtatctcagcatttctgagcctgttgtgggagtgtgttctcagcctggcaaggaaatagagaaaaaacatacaggagaggccaggccaagatacagtcgaggagaggacgtgaaagattttaagtcagaggcgataactccaaggaaacaggttttccagatacagcggagctgatgcacagcggactcacaaactctgagagcttgcaaactctgagagcatgcgcaagacctgcgccatcttaattcagacaaggccctagcacggagacagggaagtggggacaaagcctcaccttttgccaagaagccgattaaattcatagcttctgggagagggaacgtcagttttcttccatggagaaacactgctcagtctaccaccttctgcagcaggctcagtgctcagagcagttgccacataagtcgtactcagtggatttgtttgcagagaagagatgatgtatagttgagtgggaagagaagggggcaaggacctgggaggaaatggaggaatgggaagaatacaattaaaatgtacgaacttctcaaaagtaaataaacaaaaacacagtccagagctatgccccactcgcctccctactccacctgtgctctgtctccttctcagaactccctgctaataacattgtattaagaatccattgcatcagagtcctcatgagctggagctcaccctcatgcacgcatgcacgcatgaagggagatgcttcactaccaccctagtcatttctcaacctaatcagcagtcaggagtccccatcacaccatggctttcccatatgaagatttgaacccagatggatgctcactcatatttcaacccagcttaaaacaacaacaaaacttagactccattagaaagcactcacatggcctggctcatttcctccatgtgggcacttcctgtgtctttgtgtccacttttcattgctactccaaagtggtgactaggtgttctcactgggatggctcagagccacaatctcaagtgcctcagttacgtttgtgaaggaaatcaaactgtgctgtctctgcctcatgctctgacctttgctggttgtatctcctgtctactcaaacagcagtgtgttcaagaaggactcgttctctctggtgctcacagactctttggttctctctccctctctcccttcccccaccatcttccctttcctaccctacttctcctacctacctctctctggagagactgagaagctgaaacaatgtatcttctgagtgtcgggactgtcgttatctatcaccttacctagttttttatttgatgctttggattgagcccagggcttcatgcacactagataagtatgtaactctaccaattgagctaagtccacagccctaaatctttaaaagaacatcgtgtatatagaatgtgtatagtactacatgtgtatatgtgtgtatatatgtgttgtatacatgtgtatatatacactcttatttgtgaatgaataaaaaatacccccaccaactaagttgatgactcttcagtagagaagagtaacttttggtgtggttatgtaggcagtttctcactttttatgttatatattgtaatattgcaatagaaattgatattgaaagtccctggaataaataaagatagaacagtacatttatccctataaatcttttaaagagtataaagaaaactaagaaaatgtctttatcctttaaagattagaagagggcattggatccactggaaatggaattacagatccctgtgagccatcatttgggtgctgggagttggaccatggtcctgaaagagcaaccgttgagcagccagtgagctgtctgtccagctagaaactctagcggataggttgttcttattcagtcttggtgctgatttgcacatggctgtttttaccatgcatttgactaagactgaacactcacaggcagctcctctcagcctagttctaacaggcaacttttgcatcttctctctcagattcccttttttgaagagttctgtaaaaagactcaagccggtggtgacgcctgtgagaacctggtagggtattctgcggtgtacagagtctgctttggaatggcttgtttctttgctctgttttgcctgctgaccttaaaagtcaacaacagcaaaagttgccgggcctacattcacaacgggtaagtctcttgttcttccaagggtgtcctagggtctgctcgtcctcactgactgacgttctgctagttgacatttgacactgatgtggggaggatgggctgtgtgtcactggtagcctaagagcggcagtgcctggtgccataataagaaattcagtatacacagggagtttattgtttctactagggtcttcccctgagtcatttccatcctaccgtgaagaagagttttatacaatcagaggccattccaagtgtgcctccttatgggaaaagccactctgtggcactccatcacttccccttgatgtgggaagaacactaccaacaacagaaacatgagctagcaggcggccttacaaggaccttttgtcgcctttgagtatcatttgaatgtctgcctttctttctcttcccagcttttggttctttaaattgctgctgttaggggccatgtgctcaggagcgttcttcattccggatcaggagacctttctgaaaggtacacatggggtattttgggctacccagttactttgttttgacacatttcataaaactcttcaaaaacatggtctagtgtctttgctattttgaactactgattcttttatgagttgaagactgtccaggtgttgggggtttagcttagctgtagtgtgcttgcttagcaagcacgccctggcttggccccagcagttgtatgggagctttgtaaagcagctttacctgtgtgcactccctcccccctttcctcctcctctgcttacaaggagcccgtgagaaggctctgttcctctgctacctaagcaattggaatgataagcttactggcttggagagtaaaggaggtctttaatatttacttgaaaacagatctggcacatcagatccgccactcctctgccgtggaagagtgtcattctctctgagtacaaagcagacctggcagcatgaaactgttgttagctgtgagaactggacaagggacatcctccagtctgtgtccaaactcactgtatgtgaagttagacaccatttgagttgcagttcttactggtgtgtaatacagagccattagtcatatccaaagcagggctccttccaagggaaagaatgggatgcccttttctgagaacaggtaagaatggagatgggatttaaattaaagcgggtcagaatactccattcaacccaaatagattgacttttctagtggagatgagggtcgcaggtaccaaccacacttcattacatctttagggctctatcagtttttcatatactttaaaaaaactggtttaaaaagtctaagtcttccttttatctataacactgttaactagtttttatttattacgaagatacttcatgtatattttagcatatcggagctattatatctatagagagaggtgacctaagagtcctcaggtcagctctagctctatcttattataaacagcctgcgacccacacggtggggttcatccaacagtttagggcagagccaaaaaagccttgaggccttgacgcttaatttccatactggatagccaaggctcattgccagtaagatttaaactgttgatttttctagcagtatttctttttgcttgtgaatcaggccactgtggattgtgtaaacccctgcatctattgagacagctgttagttcagcttgaggttcagcttggatgctccagggccagactctgatgccccagtcctagttgtgccctttcattctagagtgtagttcatggtggaagtcaagacagcaggagtttgaagcagctggtcacatgcctagggaaaaaaaagcaatgaacatctgtttgctgctcacatcactctctctagtttatagtctagactcctctgtccaaggaatggtcctaacaagtaagatgagtcgtccaatctcagtgaacataatcaagataattccctataagcatgcctagaggcccatttctctagtgattctagattctgtcagagacagtagctgtcaaaccagctcacacagacttgcaggtttatctcatgtttatcaagtgcgtatgaggttagcatctaccttgtatggttgtatgggcatgaagtgtattagaggaatgacgagcacaaataaaaagtattgttctttggagttgaatgcacatggtgctcacctctctccctttgggtggtgttcttttgcagtctggcgctatgtgggagctgggggcagcttcctcttcatttgtatccagctcctcctgattgtgcagtttgcacataagtggaacaagaactggtatgtgctgttgtggaaagctctcactcactgacttgaagaaactgtctaccactgacaaaggattacactcccactccgtgtgggtctttccattttctcctctctggtactattttctgtcctctctgccctcctgtcctgctttgccttatgtgcctggctgtgcgcactgtgtggctggctggccatgtggaccatgtgtggctagctggctatatggacggagtatgtctggctggctgtgtggaccctgtgtgactgacttgactgtgggatgagtatgtctgtaccttggacggtgtccaggttccactcctacaaggttagaaagcaaaacaagcacaggcagcacaatgctttggaacaggagatcttctgtgaagagtctgggattgagatagttctcttcttggaaaaaaaatggtttgtctctactttctaaaacatacaggatccctttattgggaaaacttgcatcctgctgtaagggagctgtcttgcctgtaaaatggtagccttttagtgccttggaaacagcattcgcatccaggccaagagggaagtgcctgtcagtaacaaccatccagcccctctgctgaggccatgttgacactgaggtgctgagcaaagtgcttcattgctctggtttgtttgcttgtctgtctgtctgtctggtggtgttggtgatttatttgggtctcttggataccaggtaagtgtttgccactgagctgactttatttttcaaatagtcctcttttatacccagtaaagctattacttttatgtctgtctgtctgtctgtctctgcagttcaggctggttgtaaattaatgatcttccctcttctgcctccagaatactagaattctaggcatatataaactgtggctgccattttatagatttttctaggtatcattttattctatattttggcaaaaaacaaacaactcacaataatgctgtatgagtatgcattttcttttatgttgagtaagataaaacacattgtccaaactttttcaatactttttatttttaatatattcttcagcttgaacattgttctgccctttttttcttaaagataataatgagatgacatggtagctgtggggatgcatcagtggaaacagtgtagtgacagccatgttattactttgtgaatattagattaagtacagctgagtaggaccagattttaaatgttggggctggagagatggctcagtggttcctagtgcatggtgttcttatagaagacccaagattggttcccagcacccatatcagactaacaccttcagcgccagcagataattggattctctcttgtagaggtgttgcgtgtgtgcgtgcgtgcgtgtacacacacacacacacacacacatacactagctcaaataaatctttaaaactgtttacatgctttggtgttttacctctgcaattacaggatttcaggttgacgtgtgtccttgtaagagatagtgcttgctctctacattttgagtcacctttaaaacgatgctgtcatctcttctataggtcaagttttgaggtggtagagttttcttaaagatcagctaagggttgtaagcacatgccactgtgcacagctttttaggtcccactcagcctctcatggtactaaggcaagcactttcccaactgagctacctcctgagcccagcacagcttttctttccccgactttaaagatttattaaattatgtgtatgggagtacttacatgtgtacttactaaccccttttttgattctcctatctgtgcagaatgggtctctagttgcaggtgggcaaggagtcggcgaatgacaaacagaagcaacacagagagtgtgtagaatctgagtgtaatttttcaaatcgaacatcaaactttttatactgaagagtaacaagaaaccaggcgagacacatctgctgagttactgtgacacaatacaaaaggaatgtatacatcaaaagatggcagggaccaggtcttatttaccactaagatgggagccaggtgtaatgctagtctattgttaagcccaccaccaggggttcttagtaaatgcttgatttatgctgtttctttgggcctagggaagaaacctgtctcaggggaattccctaactctttcatggtaaatccatctatttgctatgccattgtgtatattcccttgtttgggtgagactggctactgtcctaagtaatcactctgcagaccagccctgagctattccagctccattctttgtaatgcctaattagttttgctgtctctactagaagtaaatttgaatgttactgaataggtaacattcttactgaattccaagcttgtcaattcaaggattttctaggacgttggaacactggtggaggcttacctatgtcagaattcaatctttaaaagcacttataataaaacaatactgaaagagatcacatggatccatacaccagactaacatggggatagggtatgagtatacgggttatgagaatgccaaggttccaggaggttgagtttccttgaaactctttgcctcctgagtgcttccaggcctctcagtttgttaagcaggcttcactggagtgggcgtagcacatgtcagtgcaggtacctctgacattggattcccaggagtgggagttacaggcatgtgtgagcctcctcatgtacgtgcttgggactgaactcaggtcctctgcaagagcagtaaatgctcttaaccactgagccatctctccatcccctttccctgattctactcactgtatttctcccttagtatttcttcagtttggagaggtggtcctgatgcaggctctttttttttagcacaaagagaaacatactggggctgaccaggcttctgcgagtagagctgtttgcttctcctacaagagaaggtgatctcagagggactgctggcagaacatggaaagacggagaaagctcacagccaactctactgagtgatcatctttacctcatacctcagtgcagccactgtgtttcccagggctgctagcatcagagtggagaagtgctgggctaaagctgatggttgtcctttttagttgatgaacatgcttgggccaggagaggagactcatgtttagaaataattctaagccagtgaacctgcagaatttttggaactttctagctgagataagagtgtaatcattgttgaaagtgtcttaggctctgtggttccagggtctctgctggggctaatcccagtatctgaaggatagaatgctccagagaatggggccttcactgacctgtttttctctcccttccacctcacctacttctttctcggagaaacaggactgcaggcaccgtccgtaataagctgtggtacgcctccctgtccctggtgacactcatcatgtattccgttgctgttggaggcttggctttgatggcagtgttttacacacagtgggacgactgcatggacaacaagattctcctgggagtgcacggtggcctatgcgtgctaatctctctggtagccatctcgccctgcgtccagaatcgtaagcatggtttttttctttttgtttttcctttgtgaattttaacaaacccagtaggtttctttagaagcccaagtcattctttaacttcctgtggatgggactcagcctcctcttcatactccatgcccatttggaggtaataactagatttacttgttatccaaaaaaatcggaacttaagtcaataatagatagacagtgcacacagggaacctttaagtgggaaatgtgcttagtctctgttaagcaagagatgtataaattcagcttattgtgtccttgtggaatttggatggcaaggctcagagcagctgtatttgggattgtcttaggtgactggcaacctgactaagacaggaagcgggaaatcctatcctggttgcttccagtctcatgaccagagtgtacttactgaagtcagcagaactgtctgatcttggccttgctttggccgttgttgagagccacaaatgcagattcagtgggggttgaaagcaccttagaaagtggagctgtgaactgttactaataacctatctatgacatcttaagcaagtatgctgaagacatgctgtcttcagaggtgtaaaagtgtccccagtctggtgttgattgaaggatcttactccatgggtgattgatctacacgggccattccaagttctggataggaaaaggaaatatgggcaaaaatggaaagccccttcgaatctctttccaaagtagtggatttgaaaagctgggcacacctgtgcattcctgtaagcacagtacgtgggaaatggaagctggaagatcggaggtttaaaggcagccttgactgcataggtttgaggccagcctgggctatgtgagactcctcccctttaagggataaggcagcagcaagtactaaatcattttagcaggactaagatattttccatactaagtttttaaccacattacagaaattgatatgattattctcctagttcctgcaattgatcagtttgttcctaaaacaaactattggtaagctgaccagaatcttttttgggttaatcttaccttctgaaacagccacaacattttgcttaatgacattagttctgagggtgtcttgttcccattgcagagagcaccattatgatagcctgttacagtacttctactgataattattattgaataatggtaaataagaaggaatttaactagaaggaagggtgaatcctttcctgtcagcaagtgttgaaaattttagcaaagagagatcccttatccctagattccatagttgctccagatgatcccagtactgagttatcacttaaatattgtactttaagtccctcccagtgaatgtctgtcccatagcttcccttgttagcctaaaccaggttttgtacttagtgtggccaagaatggtttcatttttggtgggatttgttttgttttgtttttacctcttgacagctcaatgcttgtgcttcatggattgtctaaagaccttgtacaacccacaatgaatggtctgtgaaatttgtctattgcaccaaactaaatgatgatggctattttctttttctgatcttgtgatttatgaactaatgttataaatttcatagggagagagactgacagaaggctcagctagcgtaggcgcttgctgctaagtctgataacctgaatttagtcccttagacagagagaactgactcctgcaaattattctctgacatccacacatgctatggctcttgtgcacctgcatgcacccatacatgcatgcatgcatgcatgcaattgaaaaaccactcaggggtctaggcagtatgttgaatatgttacaggttttggagagttgtttatggagaagttggacagattttggcatctttaaaatagcatgaatagggcatattccctacccaatattacatttttttttcctgagacaaacacttcattaggttcccctttctttagtaaaggtgagtgtctaagtttaaggagcatcatccgttggctgagggttgcagggagggtggtggtggtagggttctatttagggtataatgtcttactgccaggacttcaagcctgtcttctgtctgtctctttctaggacagccacactctgggctgctgcagtcagggctcataagctgttatgtcacctacctcaccttctcagcactgaccagcaagcctgaaaaaaaaggtaagcagctctgttcaagagtgtgtgctcacagtgcacatgtctctgttccctagacctgaactcttactgagctatggagggttagagaattcaaagaaccagggttttctatgctttgtcattaagtaaagcctttaacagcaaaaatgaaattttctcctcttaaaacatttttttaattttgtgtgtttgtgcacatgcttatgtgagtgcaggtgccccaggattcagaaaagggtgcctgatcctctggggcgtaattgcaggctactgtgagcagcctggtgtgggtacaagagcagcaaggctccttaagctctgagccctcttcccagcccccggcgtgtattgagttttctggcttgcagagaagagtgaccagagaggagcttcagcagttgtctttaggcctccgctgcattctgtcattctgctctggcaagaaccactttattttagtgttttatcggcttcgtttggttttgaatttttgtttgtttgttatgtttcctacatcaggggtttattctctgacactgagagaggtgggaggagcgaaggtgagggaaacagaagacagtttgaacctggatctgtcactgcctgacaggcaatcccagtgcttgccctagatgacatttatttaacagcgacagcaggatgtagagaaaggaaccagactgcctgagctctgttctctgtgtggttttcatgctgtgaaatgttcatggtgtatgcatcagtcagaacagtagttggcacatggcaggtgcttgtggggtgtggcctgttattagtgtgaaattgttacagtgatccttttgaaggtttttttgaggcagggttatatagtccttgctgatctagaactccctatttagaccaggctaaactcaaaagcacagaaatccacttatctctgttcccccccacacaagtgctgggactgaaggcatgtgccaccacaccaggaaaattttaatctataaaagaagtattacattctagagtcccaaattttcatatttatattttatctttttcccttttgtgatacataaggtgtacatatatatttatatatgcatacaggtatatgaatgtgaatgttcaggaatctttgatccgtacatcaagtaaatatctcaattaaatagaaaataaaagttactaaatttaaaaaacaaatgcaataattatttaggtataggtactttttattggtctgtcttgttttgagagaaggtcttactataaacaagttggcctggaacttactatgtagcccaggctgtgcttgaacttgcagtttttctaacttggccgcctaagagctgggattattggtgcacgccaccatgttcagctggggtctcatcttcatcgttgtagtgggaagtagtagatggaggttttatagtaagtatggcttatcccaagtttaattatacacataaaatctcaatcatgacccagcttaccccaggtcttaaaattttcttttataattgcttatatattcatctctggttttaagttaatggaagttttgttcacagtatattttttaatagcatgtattgctttaaaaaacagtaaaacatttatttttaattttaagtagtaaatataaattttatattttattcatatcttacaaaaatcattccactggcctaaaaaagaaagttttttgaagccacagctaacaaggttctattaactctttcaaagtgaactccagtgatattctagtttagcttcaaacagaatgtgtgtttgtagaacaattaatatatttccatgttttgggttcaaattggcaataagatgtagttagatactcacaattgaagcatcatgtatttttaaaaaaagcaaattgctagtgagagagatattatagagacatttctttgaaattttagactacctcagatggttcccaggtcacgggtcaagggaagccatgtttcttatgtctgcagtaacctgtcttctctggctcaggaacccattaccctgtctctacgtgggcttcccaccaggggactgtgctctacccctctctgcagaggctttggatccagtttaaaaaaaaatcatcataattaaaaacagtgggtttaatgtaggagaagcaagggtgactaagtcctgagtcgtccgtcacacccttgaaggcttaactagaatggggatggggctggcccttattcctcatgtgtgctgatgtgggagagcagtgtcttggaactagcaaaactgcagtctgtgcagcatcagactatagagtagaagttcccagggtgaagggctcagtgttgggaggagtcatgccagcacacttgaatcttcccagacagatgctgtaaggtacagtagatctttgtctaacgtgactgtgtttgcttcgtgttatttacaagtcctggatgaacatgggaagaatgttaccatatgtgcgcctgactttggtcaagacctgcatagagatgaaaacatggtgacttggctgggcacccttcttctaattgtgtgcatctcatattcatggtaagtcctaggagttactgatgctcagcttacaggttttagaatgaaaggaacagagttatttacgtttcagtccctgtccgtaggagaaaactagccagaggcgcagtgttgctgcacagcctcctatgagaaactcctgtgctcattactccactacaggggcaaactgaatacatgcatgttttgttaaaaggcagttttgaagacgagttgctatggcatcgttgaagagtaagggagcatatagtgagaatgatgaaaatgtaccacatgccagagggttctggcaaaactctaatccaaggggatagcgtttgttttgttatcggtggagagaaaacctgggtgttctgtgtatggtccagttacgccaggaaatgttccttctccgttgtgctgaaacctgcaaagctaggaagtaggtaggcaacattgcccaggtctgtgggatatgtgtaacggaagcccgttgtttcaccggcctgtgccagaggagactccactttaaaagcacttcaaagatccctggagggaaaagtcggtgatgggtggttctgggaagatattttccggtactgaagcttcatttggacaggagccttttcagagctgttttacttcagtgtgttgtatgttttgtttctctgtgtaagaaattcaacttgtcatgggcatgctatgattttcctcttgctgaaactaaacaatcatggtggtgacagactgtgtaaacacagagtggaagagcactgacaggctctctaacagtcctgctgagaggaagggccagccagtaagggcctccacactgcaaagggcttactcagaaccatgacctagccaggaaatgcttgctcctgtgctgtgtggctaaagtactggttctctaacgaggatcctcagtctgcctgtgccacctgacagtctttcccttaggtcagaagggaccttggtggttgtcccttctgacacttaattcttcacttgtctacttagtacctgctatactgaaacagagacagttgaggggagatgtctgaatcagtaaagggcttgccgtgtaagttcaaagacctaaagtcggatctccatgcccatgataagagctgagttttgtcacccacaccactaaccctagtgctggggatgtccacaggtgcagtacaacttgatgaccagccagtctagccagtaagcttcaggttcagtgagggaccctgtctcaggagagtaaggcagaaagagattgaggaagatacccagtatgtgctggcctctccatgctcacacatgtatgtgtgcacgtacacacaggcatatacacaattaaaaagaaaaagaaacagtgaggggcattcaagtccatggccatttccagtgatccccagcctcatgcagccactttcccctgctagctagttgattgtcagcttgaaacaagccagggtaatctgaaaaaacaaacaaacaaacaaaaaacagaatttggagaaaaatgacaccattggattggcctgtgatccagccttagttgcattttcttgattaatgattgatgtatgaggacccagtgcacttgtggccggtgccatccctgggcaggtagttgaagtagaaggcaggctgagcaagccatgaggagccagccggtaagcagtgctcttccatggcaagtggtgctcctgcatggcaagcagtgctcctccatggcaagtggtgctcctgcatggtctcagctccagttcttgtcacaagaaatctgtccaaggaatctgacaccctcttctggactctaggacactgcacacacatgctaaacagacatgcatgcaagcaaaactctcatgaacataaagttaaaaaaataaaaatctcaagaatattggtcaatcaagagcgaagtaggttataaagatcattcctttaaaaacattcaaatacacttgtgtttataaaaattcccaggaggggggattggcgaggtggcttagtggttagagcacttgatgctttgcagaggatcctgggtcagttcccaactcccacatgacagctcacagccatttgtatataactccagtcctactgctttctctgtggccacaagacatacacgtggtacacagatataatacataaacactcatacacataaaataaatcttttaaaaagaagcaaacaagcccagaaacccccaggaggagacagccagagttgtggtagtagtggcattagagagaagtgacagggtttagatttgctgcggccatcagtgggaaagagcagaatcctactgggtacacagcgtacattgacagtagtgggagtgtctcacagtgtggactatttacccattcagattttttcctgcttcttagagttgcaaagactcacttttacagctaggcatatgggtgcatgcctgtaatcccagctaatatgggaggctgaggcaggaggattacaagtgtgatgctagcctcagcaatttaaaaaaactctagttttatttaagtcacttttaggactgggagtgtggctcagtggcagagtgatgcacacaggtgtatgcacacacacacacacaataagaggaactcaagtcaaaggccatttccagtgagcccataaagtcaccatgacttagcacagcctttgtgaggatctgggtttaaaatacccaacccacccaagaaagaaatcacttttaattttgtgcttagcttagtggaaatgaatttgcctatcattctgtatgtataaaccctaggtctaatccatggtgttataaaaacaaaacaacaaaaaccaagcataaaacagaaagatcacattttcaagagatagtctgagaattgcagcatcacagtggagattgttagtttgatattccccaaagacattaattttcaaagctgacagctgctatttagaaatctgtctaaatgccaacagcagacgttttctgaatgctggtaattaaactgcagaagtgtaatggccagtggaatgctgggacaaagcagcagcctgcacagagtataacctgctgctcgtttatgcttctgtagcacataggcttgaacgcactctcaggagttggctgagcatcacgtgggggtctggagattgatgcttactgtaatcaccccttgcagcaccaggaggagtcagcttggagaatgttataaacaaacggtttggcatctttgaagaaaggacctgctgctaagggaaggccccagtaacatgaaggggttttcagctatttccagagtttacataaaaggagcatgggaggctggggaatgttctcaagtgaggccacactgtctgcgtagaagctgttatttgaatgattgtaggaatgcttaatttcttggtggaaactgtactgactagaacaccagattataggagaataaattaccagtgttccatgtaaaacccaggattgtctgcggtgacattttgtaatgtcattttgtaataaaaagcttggctcccgtggctcttctcagttccctggaggatccttgtctcccaaatacttccttgggtgccatgactgccctgggtcctcaggcgcttcctgagagtacacttcctctgtgctgaattctctctctggcctcgctttctggcaatgctctctctagaacccctgtgatggaacatcccaggaccccaagagagctcacctgccaaagttccctaagagctggctctattgatccagctgaaacctgtgacaaagtccagctcccaaaggcctctaactccttccttggactcgaggttggagcactattttatttccagctgaacctgtcagactggacaggaccctggaggccttgtgaagaatggagtatgttcctacaactctgtacctcagcttcaggaacctcgggctgagccacctttgttagccatgtggagagatgacatttacatagtgactggtttattatcattagaacaaaacacctgatcaaaaagtcttaagggagaagaaatttatttcggctcatgatttcccagagagtcccagattgctttctattactgtgataaagaccatggctataccgactagactcaggtagtcatttggaaagagggagcctaaattaagagactgccctcatcagactagactgtggataagccagtggtgcgttttctgtatagatgatgacatgagaacttattgtgggcagggttacccctgggcagtggtcctagggactataagagcaagccctgaagaacaaggtaatgaggagtgccctctacacacgctcttgcctcacactcttgtttgagtgtctcctgcccgacttccctcagagataacagtgatctgaaagctgaaataagcctttctcctccaagttgcttttgaagtgtgtttatcacagcgatggaaatgtcaactaagacagtgaccacataagtggagaaaggggtttctttcaccttacagcttgcaacctgtcaaaagaggagggcagggcaggaacacacggaaggaacctagaggcaggagctgaagaagagaccattgaagagtgctgttgactggcttgctgttcatggcttgctcagcctgctttcttgtactacccagagccacctgcccagggctagcaccacccacaatgggttgggtcctcctacttttaccaatttaagctttgcgcgctaatggtctttccagcccaaagttcctaatattttgcaacccttcccagatcaggtctgtcacagcaatagccaagtctttggtgccaatttctgttctagttgctttctattgtgacagtgatcaccccaaagatgctagggtgctaactaagctgggtgacctgcataattagattattaggaaacatttgttttataaagtattccttggctattttcatttagttatgcttaagagaaaagaaataacctttagtatttaagccacctaggaaaatacccattgaatataaaatgggaaagctaagaatctatattaaatgctgagcaacttcctagttcaaaataggacgctcacagcagtacagcgtgccatgtggaacaagggggtatgctgtgctggtaaggacggttggcttaagctgagaaccaacggcatcctgaggagcagtgttctctctgcacagtctgggcctgctgctcttctctaaggagaaaggaatggcggtcatttgcttttttattttagaaatcctgccactgcctcagcagctagccagaactctccatgtctatacatcaggaacgtgggctggcctcctctggctcccacagaattctggtcttctttgaatcactaatcacacagctctgtgggaacatggttgccttttgtcacacaaaaggcatggggtgtgtcccgggcctgccctgtccattttctagtatgaattgaaaggtctgtgatctccaaaagcaaattgggcattttcttggaattttctgggacccgtgggacttcggctcactccacagtgaactaaagcaggtgctcaggtggcgtttgcgctgtgcacgatctgacgatctgacaatactgcagaggttgggtattgcaagggtttctagagagaggggaaggcaggcagtgttttggtgaatatgtaaataattacaaggaacatctgtgtcacattgcaatgtgatgcagctgttttctgaatggtgacagattgcaccacttggggctgttgtccctctcctcagccttgcttcaccacagattatagtgactgacatctgtaatcccatcactcaggaggttgaggcaggaagatggccacaagtttaaggctagtatggactacatagtgagtttcagaccagcaagggcggcatagtaagactgtgcctagaatgaatggatgaatgtgtctgggagctgactttatgggtaaactagttaatatgcaagcgcaaagacctaagttcaaagtcctagaactcagtaaaatcggacacatctcgtgcctgtaatcccagtcctctacagtgagacgggtgagggagagagatggggagcccctggtagctcaacaggagacctggaaaatgggagaccctgtctcaaccaaagtgcaggcaaggacttatgccgcctctcccttcacatgcactcagtgttacacacatacatgcatattacagagacacacacagagggagagagacagagacagagatggggggcactttaagagtttacagaaccatgtttttgttaataattctcatgagttttatggggatagtccttttactgtggttgcctctactctgcataaggacaagactgtccctacggatgaagtgaatgtaaatagtgttagacagaaaacgaaatcctcccccattttagtgccatctggtgcaaagaatgaggtgtcaaaggtgcttgaatcagaaggtttgtcttcccaaaactttattccaaagaatttatggagtagtgatggaagtgcttttaaagagttttcctcaatttccagccgaaaacttcagatactaaaattaaaattttgtctttccccaaggaaacttcctactgtactatagtataactggcatgcagaagtcttgagtgcataaccagatgagagtgttcttccgaatatggccagtgggaagtttttgtccttcccttaccagtcgggatggagtagaagaattgtggattggggtctggatcccagaggacctctttttctattgctccccatagcccattgataccttttctccttgggcaggagactgaggggacagacaaggccctgctgcttcctggttgaggctgacttgatggacatgaatcttaatctctgcctgtgcactaggagcctaaccgcatgagcagtcacccctgtgtcctgtgtcctcgtaaacttgcttctttgtgagctacattttcacagacgaggccctgaggctcagaacaggggctgccacacgcagcacacttggcctttagggattatctgcaaaatgcatgtataaagttaggctaagtgttgaatatatgtttgtttaaagtgcttccatgtttttatatatgggagaaatgagcacttttaccattgtcagtcaatgttacagattgttttgcctctctagatatggaggaaagatagggaaagattttgaaacagggtgctgtgtaggccaggctggtctcacattcattatgtagtcgaggatggccttgaatgtctgatcttcatacctcttcctctcgggttgtgattacaggtctttataaccacacacagtttatggggtgctgggaactgaacccatagcttcgggcatactatgcagtcactctactagccgagggacattgcctggacttaacaaaacaaataacttttgatctctaagtgagactggagagtggggtggtgataaggtaaaggtagaacatgaggagcagcaagaagccttgttgagaaaagactgacaatatctgcaaacttgtgtctggataaaatgatctagagcagtgtgcttacaaagatagttgtggaatccaccatcaagcttgctgtcaaatggaatatcacagtagcttgtgttcatccttcagtgcctgctgtgaggggactggctccaggatcctacacccctaccctatgccatcctaccctgccaccgacaccacgtcaagtgcttacatatcgaatggtagaggcagaattctacataagctctacgtacatcctccagatgtgctaaattgtctctagatggtgtgtttgatatagtgcaaatacagtataaataacataagacatcattacttaggaagtaagagcaagggagaaaaacagacgcacccctgcccacctagacaccgttatgcaaggttaaataaatccacagatggagacacttccatcaagtgtcaacgggcagggcgggagaggggcgcccagagctgagggcacggggagccttacaggccgctttccctccactcagatgacagcttctccctgtgctcttgcactctgttctctcctagtttgacatcgacaacaaggtcgagctcggatgctctgcagagtcgatacggagcgccagagctggaagtaagtgcgtgtccttccttctcttccggcttctgctcagggccctgttctcaggagagccttttgtgcatttgttttttgtttttttgttttttttttgttgttgttgttgttttttttttaattaaaagtaagtttttcatatagaatattccaatcatggtgtctcctcccttctctcttcccgccccccacaccctttatccacccaatccaactccatgcttctctctctctctctctctctcacacacagacacacagacacacacacagacacacagacacacacacacacacacacacacacacacacacaccaggccaattaaaacaaaaatccaaagcaaacacaggaaagagaaaacacacaagcaacacttagacacttgtggagatgtccgtggtgcccgtatgtatactaagcctatacaaacacagactcagaaaggctaacaggtgagccgtgctgaataaggcaggaaatgctcagatgaggcggctacacaaaccccattgagcttgttttgtgttggtcatctttgcctgggtgtgggcctgggcaggagataagtataagtctggcttgtatacccagtgagaagactaattttcctttgcagtgtattgattttttttttttttggcactcatagttctgtttttctgtctaagaaagaataagatttttgtatacaaaaagaactattgtcctatgtgttaaaatgagagaactctcaatttttcgtcaacagtgttgccactggcttggcactctgcacccaccccgagtctaaagctcggggaaccatgttcagccaccccttgtttagtctctttggctgtaatggcgtaggttttctgtcagttctaaaccacacacctgcttgacgcccgtctgcattccccacgtgcagcgtagctgtggggttatgtatcagcgctctggaggaagacacaggcaaggaagagagccaagcacgttctgcacacactgcacataccgcgggaacgctgacacctcagttatgggtcagttccagcacacacttgtcattcagtgaggaactgtaagcgtatagatcaggccattcacctccatgtcaaggtctgagggagtgtttagctcactgtcaaaacatttcctgttttccctttcctgtgtagaagtcttttttttttctggagctcttggtgaaacatgaaccatagtcagaaaactcaaccatacaggacagttaagatgagacttggcagccagggtggcggtggcacacgcctttaattctagcacttaggaggcagaggcaggaaaacctctctgtgagctcaaggctgcccagaacctggggctgcagtgactgctcagtcatttagcacttacaggtgctgactgtctaaagccgtgtagtttcacatcgtcctcacaaaagcagtgttccttgcatttcacagagggaagagcattcccatttcccaggatgggcccttgggtacgtgttcttgactgcgcattgcctgggagcaccactgctgtcccagcccctcctgtcccagtccctgcagctgactttgctggcgtctggccactggatccattcaaatagcatttactggacggacaagccctggtgtctttccagatatggatgggcacttggctctgcagctggccatttgggatgcctttccagtgcctagcctagagatagtgcaccattatgaaggcctgttatcctgccagcctcagaatgcagaggaggaaactgtgctggcttgaataggttactgctgtctgttacagaggagcatgctctgcagaagccttctttgtgcctttgttcctaccattgactgggtggccacctgctgggggtgtgagcattatggtttcaatgtctcctttgtgtacagccttcaagctcaaacagcagcaagtccccaggttagatttaagagagaaagttgttctcctttgagggagaagccgcccactgtttgcttctaagcaagtgggttcgtgcccccacatcattgcctatgaaagaccaagctcatgttttctgtggtaacttaagcttcaaaagaaacgggaatgaatagagtgggcccactgacttctgaactgtagactgcctcacagcatccaagtcttgtggagcaggaggaagcaaaagctccagcgggacttgagggatgaaaggctgtgttctcctggccctcagctctggctctctgggatttttgtagctaagccctattccatagagataggaaagaccattgcttctcagatggtcttggtaagtgtagtcattccgttctttcttattctgtttatcagtcttcctgcaatcatgtaataaactttcataattttgtctctttttctttgagcttactgttttgaacaagtaggaattatgatataaaattcaaaatgtactaaagaagcaagaattccagccttctgtatccacagccagatcagcagcctgattgcttattttgtttgatttataagaaaggatctcactacataacccaggctgactgctttgaactctgcggctcctgggctagtcttgagttcactgcactgctcggaccatccattaacttgggattcttctacctctgcttcctgagttaggacaggggtgcagccattcccgcccaccagctgcctctaatctgcccttcagatttatcccattcccagttcagcttgtcagcttcagtgccctgagtaatcacgaatcccaaggtctcgttccgcatgtgtcccagctctttttttttttttaagatttatttatttatttattatatgtaagcacactgtagctgtcttcagacactccagaagagggcatcagatctcattacggatggttgtgagccaccatgtggttgctgggatttgaagtcaggacctttagaagagcagtcactgctcttaaccactgagccatctcttcagcgccccctgctcccccccccccccccagctctgtcttaaagctagtttatgacttctggctgctgtttaatttgcctgatttcactgtcatccgttgtgagcatgatcgtagtcccagcccctgaggcagaattgatgagtagcaggcctcacactaggaagtgtgaggcaggagcatggtctcttttgctgcatgtttcagtccaagtcgtgcagaggtaggaactgaaacagaatgtctcagttggtaatttattagaggtcagcacatgcagaagagagaaaggagagaggaaggagacagaattaggcacagtataattaaagttaaaagacattataggctggactaagcccagggcatgctcccaagcacaggtggtacctcagagtgttctacatgtcctgttagctgggcctttatctgccttccatgatcagtcatttgatggaggatacacagaagggcctgctatgggacgaggcagctgtgcagccaaagcagtgcctaagtgagctggctcacaaggatttgcttccagaagtcacacaatagctagctagggtgagcactaggtcctttgaaggggacctggctagaacatccccatactcttgagggctgtccctgttgctgtacctagtgtatctggggacagagacatagccaaatctcttgcactaacatgtacgtctggtagaagcttttccagtcgggcggcatacagtgctagggacgtagaaagcagcatttgacttggtcgcttttgttctcacaggtagcccggtgctgtttctgctttggtccagatggagaaggtacgtgttctgggcccgactgtggccctgcaggctggggtttctctctgtaggcatttgccgttcaggtattactttggtgcctaactctgcttgttccagagctggttaactgtctatgtacttctcacatctctctcagggttttgtctgtttcattggtattctggcagggaaaaaccactgctcactttggttcttatctaaggtaaatgagagttagaaaatacaacgtgtatatgttttttaaagggatgataagaaaatgcaagaggtccctacatctcatttgggagccatttcttttcttcagcttgcttttctttacagaagggaaagtttatgggctgctctctctccactgagtttctaatattctttatgtcttcgagggctctctttctgctgccccactggaacgtatttgctaactcatctagtcaagcaagttcctggggtaacagagctataagtggcctttgtggctttttctactagcagcacattcggactgaaatgtgcacgcagctgcagtagtactgatcgtatgtggactcaccactgcccttgggcatcctttgtcatccacagacactgaagagcagcagaacgtcaagaagggacccagggtgatttatgatgagaagaaaggcaccgtgtacagctactcctatttccacttcgtcttcttcctggcttccctctacgtgatgatgactctgaccagctggttccagtgagtggcctgttcacagccttgaacccagctcagtgggacaatctctgtatagtaaaataacacaacaaaacaaaacatctcagtatggttctctaaagagtgaagtcaatctgtactctccttagcctttgtagccaacccctgacattcttcctggtagaccagaagcctttctgagatgttgagtgtactcactgcagttaagttgaagttcccgggagcggggggggggggggtgctcagaggcagagggtgagctcaggatgtgagagaccttcagtctcaaccctgtattgagaaacagaacaaacaagacaggaagggctaagtccacatcgcaagtgtggggaacactgtcatagcaatagaagaaagattatcttaaagactaatacagtggggttttttcctacttcaaaataggtatctcttatttttccagtttttaatttaaccaatgcccaatggatttgagttttcctacctggagattcatgcagccccagactcggagtcatatgttgacgtgtagtttagtgtttgggtggctcttctgtgctgcactgagatgtaagctctcgtgggactggctgaccatgagccacggcgcttgactgtcaggtggtgagagctgaggaggaggctgtcagggaacaggagctgcagtctagagcctagagttagcaaacacttccgggagggcattcttcctgaggaagggacaaatttgttgtttcctagtgatcttttaaaaactggaggaattttggcttgaaacagataagaaagtatggacagagccaaaatcataaagacgagatggtaataaacattgaagataggtagaaattggagccctctttacattgctgataggaatatacgatgaaaacacatttgaaaatataatttggcaactccttgcatggttcaacacaagatcctagtgtatagtccagcaatttccctcctaagtatagatctagtacaaaaggaaaagtaaccaaaaattatagacatatgctcatgtcatagtgattcataacaacacagaagtcaggggtagctcaaatgtccctaactgacgaagagagcaaagcgagctatttccactcagtaagataggatttataaatcagaaggagtgatgtacagtgtgtagccccagtctggaaaccccaaaatgttctcagatctgacaagacatggaaaggttaccatttccaattttggatttgtttacctgataacatctatttaaatattctagagtgaaaaactcttaaagtttggtctcaggcttctcagccaagggacacccatcagtgctgatacacatacaatgcacagagctctggaagcaacatgctatgtttaaaagccaatcataggagactgtgtgactgtgtttacatgaattggtctaaaaaagacaaatgctatagacaggaagtaggtaaatggatgcggggtgacggaggacatgggaaggggagcagctgggggatgcaggatgtctgggaagaggaagctgttctaaaactgactagcaacaattctataagcctgtaagtattggagaagttggcaaatgataccttttaagtgtatatgagttagaactccattaattactaagaaagaacgttgaagtgtgctgggggccagcagtgccttgctacctttgtgttcttactgctctatctgtttctcaacagctatgaaaatgccaccattaagaccttcttctcaggctggtccgtcttctgggtcaagatggcctcctgctggatgtgtgtgctgctgtacctgcagaccttggtggcccctctctgctgtccctccaggcagttctctgtgtgaggatgtccaggtgccctgtggctcagcaggcctgtgcccactgtggagggctgccctttgaacgtgtgcaccaggggtttaagcagcaactggtgccctgtgaaaagctgacatcccctggctagcttaagtaggtctgacaaagctttcaggaaacaaacaaaatctcctgattagcttctagttgtaaaatccaaaaggaaactaccagttagatcgacaggaattgaaatctttagccaagctggtaggtgcaattatctctttatgccttacccaagaattagctgaagttttgttgctgttcttcctggacgtgttttaaccaggccagagcttggggcacagcgtctgtcacagggatgaaaatgtccttgtatggcctgtcactctcatccttggcataaagaagcaacaacaaaaacacttgagtcctcagcctaaggtggggcttggcccctgtcactcacctttgcctgcctcccagagccctcacagttccctgtttatgcagagtacagagggagcccctcctttgactccaccctcaactacttctgcacatccctgccccagcattttctgttgaggtcatgatgctgggagtcatggccttcttgtcctctctgcccttggcagaggtccttcattcttgtctaaggtagtgtttgtaataatgtgaaaagcacaatttcttctcaccttcatgggatgctccaccatgttttccctacccagtacaagacactgcagtaatcctgctcttatttatggcagtgttcatgtgactgtaaaacaagatgcatgttgttgtctttgcccaagtagtggagggttgcagttcttacttgtgagtgtcattaacagtaatgctttaagggtcttaacaaaaacgttgcttctttactgcagcttgccacacccctctcagtgttaaggtcagcccccctgactcacccccaccatgaggccttcctcacttacagtgtgcccccaatgctaacagcatggtttccttgaagtagaggagggctggggtaaggttcccaagcagcttccaacagagctggccacacagatcggccagacaagctgtgcaagtgtggaattaggctgagatgcaaaagtcggtggttggaggcatctcacaagactacgattacatccatacaaattcctagatatgcttttggaaagcagtgctcacaagtgtgcattttagtgccaatgttcatagtgagggagaggatttccccagtgcctatctgaacaaatcagacagaattgggacccacataagcctgattcccacaagccaaaatgtcagaatcttcatttctactcactactgtaccctcctgctaaaaggacccacggaaagaaatagtggtgaattcagtggagagcttgtctggtttatagtatttgagatcctgtcttaaaaggtacacacataaggacaccttgtctgtaaactctcagcagttcaaagagaggagaatcacacaaagcatagctgtatactagctctaaacaagtctagttaatccagtaggaatgggagcctcatcatctggggcctgtgtaaggcagcagcttcgttgcagcagcccctgctgtgctgaagaaaggaggtgctgagagagaggcagagaggaactctgctggggggagcaggattgttttgccaaggtttgtctctgctgagactggaagccaggcgtggtgacttttgaactggtcacagccaggctgacgaggccacacatacctgggctagcctttgttggccccttttcctctatggaaagcagctcagggaaacccagacagtaccagtggctgccccggtggcttccctctgaaccaagccccattcactttctagctgcctaagtcttggttgagtacatgccctgccgttcttcagaagttaggcctcacacaggacgaagagctggccaccctcttctttactctcagctaatggtataaatggatggtcagaattgagatgaagggtttctaagagagatatacataagaattgatcctttaatctctgctgaagtgagggagtctctggtttctagggcagctagaccctatttcaaaacaaaaagttggcatttgtgatcagctgtgagaaactactcaggtagaagcctgtttgtgagcttaggaatactattgtttgtgaaactggagaaaactggaaagtgtgccattgttttgagataacaacagcaatgttaccttgcttttaaagataacaggcctttgcttcgtgcaatacccaagcaacactatcaaaattcatgctttgaagctgcccatctgaccttagccatggcagccctggaggcagagtttagaaatcatgtgttctctccctctagtgttttatgagtaaaatgttagttatgccatggagggattctcctgggagtctcattcacacatgatgcctgcttcaagtttttgtggtgctggatagctgatctgggtttcttgggaagtcagcagatgaattgttctgcaggggtttggggaagttttatggagtgggtggactgtggtatggaaagagttgtggggggagacatggagtattgagacttctggttccgaatcccatagggagtggccagtgggagacatagtgccatgtctccagttccacggtgacttcacgccagtgttaattgcccccttcccaaattgtcaccctctgtctttatccaataatgttctcatgccgtccttggtgcttcacgttaccctggaaagagagctccagagcttgcatttaaacttctgggcatctctgcttcaatgcctttctaaccagtggctctttttcgtgtgcggaaacataaaccagtgcacatcccacatactgccaagaagtgaaagggcttcataaggaagatgggcaccagggaggaccctgggcttcctcctcggacatgagcttgccacctggtcatatgctctgaaggtttcttctgtgactgagactagtaaacattttattccctgcagagatgagctgtctggcatgggggtgacttcagtagacaggagagccgacatgatggctttagctcgttctcacttgccgttttccatcactgaggcattcacagagacagttactttaaaaggctgaaacacttggcttttaccaaagaggtgtatctgattttgttttagttgggcaagggcagaactggaatgcatttgcccaattgacttcaagaagtttaactacattcatgtgaggaaaatgatagaagtctttaaggtaattctttaggatcctgggaaattctctcaggtaaagaaagattacagcagatgagtaatatatgtcttgagagctatttataaaaattgtaagaggatcattttgtttccatttattaaaaagttaaacttttttactttgcaaagaaaatactacaaacatttttatagtcataactgttaatttttttaaaaagacttttttttttggaaacaattagctgtagccaaattttgtggttacatttttgctatagtggagtttgaatgcaatctgtgtggtaagtctactgtttgtttataaaggtctctgacatggttagattttgctaccttttaaaatagttatttttccccattagccacaaagccaattatggatttgtatttgtgtttttcaatgctaatttttctatgaagcacctgaaattgactagccttttcctatgtagaaaactcaaacatgttaactctgtactttaataaaatgtaaacttgaaatcatgttgtttgttttctattagacacctgactaaagtctccagttagcctttgccagagctagtgccttcttatgtcaaccagagttcaaacattttggcagctatactgatgatggcttgtgattgacaaataaaaatgggtgatttgtggtatctaatttaaggccttgaagtacaaatagaatggctaaatcaagctagttaacatgtataacttttttatggtgagagcacgtagtccacctgtgtaacaatttaaaatgctgttagatacaatcatgtttcagagcacttcccttgaacatagttcttcgaagcttagctgaaattctgattcttcaacatgactcaaaagtccttggtaaccagttttacaatccacttctgtgttgacctcatttgttgtttgtgttttaggagctacaagttgaatacagagcttcatgtatggtaggcaggaacaatatcactgaactacagcctagacaccaagtctaaccttggctttcttaagacaaatttcactgtagctgaatgttactaaaattcatccttaggggaccataaaagggaccccttctccataggtcccagcctcaagcagatatgattctgccaaagttcattcaagggagacaattagtttatacttctttatgaagatcattggtgagtggttacttatagaggtgtgggtgttccttccctcaacaggggaaagcctttgtccagcaagggtgagggcttccccgtagccaaatagatggtgtccccttcctgtagtgttccttcatctttatactctcgagcctcccccaaagacacatgcaattaaggcagagtactgcatactcagataagggtcctgtggccctctctgttcctccataatggggagtaatcaaaccatcagcaagccctgtcgtgatgatcttttagcaaggggagccactgaactgcccaggatggtggttgctccacttggaggacagtcaactcttaggtggcctgatttgtcgtctacacttgcactgtattgcttaccaatgttctacatggtcattcaagtcacttcatattacaggagttccttcattttaaaggctcaatattccattgtgtgtgcctcacattttctttgtgtattcttttcttatcaagaagagtcacaagaccatctggtaaaacagaaataggagactttagcagctatcttggaaaatgcaattcagcacaagctcttgtggcttactgtctcattcaaaggaagagctgaagtctgtgcaggggtctattaaacaaccctctcccctgctgtcgttgcttcagccaccttgcacacccctgtaaccctctccatggccagtctgtttcagcatccttggtttccctgctgcttaagggcatcagatgtatactcctcttccaagaagactccttgggttgcatgcagtgttcttcccaccctgtgaccccctccccgacctccctgctttatcattttacatagagaccattgccttctgtcttagttgtttttttttttttttttatagctgtagcaaaacactgtgacagagacaccttataaaagaaagtgcttaattgcacttatggttccagagggttatggtctatgatggcggaacaaaggcacagaggcagtgacagctgagtgctcggatctggatcaacagtcaggagccagagcacatggagagtggagctagttctttgaaacctctaagcctgcctacagtgacacacttccttcaccaaggctacacacctcctgatctttcttaaacagttctaccacctggggaccaattattcaaacatgagtctttggaggccattcccacataagctaccacagcatccagcttactgttcgtatttgttcacatggtccctgggacactaaggtccttcaagcttcactcaggtatctctgatgcctcgaatggtactgctcatgttctggtgttcagtgaatggatgaaggagtgaaagaaggatttgtgagtagtgatggtggaagatgaggctgttgaggctttgacatccatggagggcttcacacgctaattaaaatggctgaactgtttagtgaggtatggactgtggtgatcagtaagggatggacaatatccttaggcatgtatgacccataggtcctggatagctcatacacgttagtattgcaacatagatcctgtttaggactaggattatggctcagtggaacagcttgtacttagcatacttaaggccctgagtttgatccctagggtatatagataaacacataagtatgcccttgaaagttaatttgaaaaatacagtaagggctggagagactgcctagtggttaagagcactggctactcttgcagaggacccaagttcaattcccagcacccacgtgctggttcacaactatacataactccagttccatgggatccaaaaactttttctgagccttgcaggtacaaagcacacatgtggtacacatacatacaggcaaaacactcaaatgcataaaataaatgtcaaaaaaatgtggaagctctctatggtaggatacacatttaatcccagcacataggcaaaggtaggcaaatttctgagtttgagggcaacctggtctacatagtgagactttgtctcaataaacaaaaccatagaaaacattgacaaaacagtcaaagaaaatgcaaaatgcaaaaagctcctaaccccaaaacatccaggaaatccaggacaaaatgagaacaaacttaaggataataggtatagaagagagtgaagattcccaacttaaagggcgaataaatatattcaacaaaattatagaagaaaactttcctaacctaaagaaagagatgcccgtgagcatacaagaaggctacagagatccaaatagactgtaccaaaagagaaattcttcctctcacataataatcaaaacaccaaatgaattaaacaaagaaataatattaaaagcagtaaggggaaaaggccaagtaacctataaaggcagacctatcagaattacaccagacttctcaccagagactatgaaagctagaagatcctgggcagatgtcatacagaccctaagagaacacaaatgccatcccagattactatacccagcaaaactctcaattaccatagacagagaaaccatgatattccatgacaaaatcgaatttacacaatatctttccaaaaatccagccctacaaaggataatagatggaaaacaccaacacaaggaaggaaactactccctagaaaaagcaagaaaggaatctctcaacctaaaaagatagccacacaaacataattccacctctaacaacaaaaataacaggaagtaacaatcacatttccttactaactcttaacatcggtggactcaattccccaataaaaagacatagactaaaagactggatacataaacaggacccaacattttgctgcatacaggaagctcacctcagtgacaaagacagacaatacctcagagtaaaaggctggaaaacaaatttccaagcaaacagtcccaagaaacagcctggagtagccatttgtcttagtcagggtttctattcctgcacaaacatcatgaccaagaaacaagaaggggggagggggagggtttattcagcttatacttccacactgctgttgatcaccaaaggaagtcaggactggaactcaagcaggtcaggaagcaggagctgatgcagaggccatcgagggatgttactgacttgctcagcttgctttcttatagaatccaagactaccaggccagagatggtcccacccacaaatggcccaacctccttgatcactaattgagaaaatgccttacaactggatctcatggaggcatttcctcaactgaaactcctttctctgtgataaccccagcctgtgtcaagttgacacacaaaaccagccaggacaccattctaatatcaaataaaattgactttgaaccaaaagttatcaaaaagtataaggaaggacacctcatactcatcaatggaaaaatctagcaagaactctcaattctgaacatctatgctcccattgcaaggccacccacattcataaaagaaactttacaaaactaaaagcacacattgcatctcacacaataatagtgagagatttcaacaccccactctcatcaatgaacagatcatggaaatacaaacaaaacagagacacagtgaaactaacagaagttatgaaccaaatggatctaacagatatttatagaacatttcatcctaaagcaaaagaatgtaccttctcagcacctcatggtaccttctccaaaactgaccatataattggtcacaaaacaggcctcaacagatgcaagaggattgaaataatcccatgcactctattagataaccatggactaaggctggtcttaaattccaacaaaaacaatgaaagacacacatacacatggaagctgaacaaggctctactcaatggtaacttgctcatggaagaaataaagaaagaaattaaagactttttagaatttaatgaaacggaagccagaacatatcaaaacctacgggacacaatgaaagcattaataagaggaaaactcatagctctaagtgcctccaaaaagcaactggagagagcttacactagcagcttgacagcacacctgaaagctctagaacaaaaagaagcaaatacacccaagaggagtagacggcaggaaataatcaaactcagggctgaaatcaaccaaataaaaacaaaaagaactatacaaagaatcaatcaaaccaggatctggttctttgggaaaatcaacaagatagataaacccttagccagactaaccagagggcacagagacagtatccaaattagtaaaaccggaaatgaaaagggagatataacaacggaaaccatggaaatttaaaaaaaaatcagattctactacaaaagtttatattcaactaaattggaaaatctggatgaaatggacaattttccagacacatgacaggtgccaaagttaaaataggatcagataaaccatctaaacagtcccataacccctaaagaagtagaagcagtcactaatagtctcccaaccaaaaaaaaaaaaaaagcccaggaccagatgggtttagtggagaaatctatcagatcttttaagaagacctgataccaatactcttaaaactatttcacaaaatagaaactgaaggaacactatccagtttgttctatgaagccacacatatgattatacctaaaccacacaaagacccagcaaagaaagagaacttcataccaatctcccttatgaacattgataaaaaaatactcaataaaattcttgccaacagaatccaagaacacatcaaaacgatcattcaccacgatcaagtaggttatatcctggggatgcaaggatggttcaatataaggaaatccatcaacgcaatccactacataaacaaactcaaagaaaataaccccatcatttcattagatgctgaaaaagcatttgacaaaattcagtatcccttcatgttaaaggtcttggaaagattaggaattcaaggcccatatctaaacatagtaaaagcaatatacagcaaaccagtaaccaacatcaaattgaatggagagaaacttgaagcaaccccactaaaatcagggactaggcaaggctgcccactctctccctatctattcaatatagtactcaaagttctagctagagcaattagaccacaaaaggaggtcaaagggatacaaatttgaaacgaagacgtcagaatatcactatttgtagatgatatgaacgtatacttaagtgacccccaaaattcatctagtatatatataataaaatagtgatgttgaaaacatgctgaatgtgttctggatttgtcacgtgaaaaataatttagaaaatactgtgtgctataatagaaactgcacatgtgcatttgatttgtgtacatgcatgtacatgcacacatatacatgcaagaaatagttcaagtagctagatgtggtagcatacttagaatcccagaagtcatcatgctgagtcagcagagtggagagttcaaggccaacttgaatcacatgaagaggctctctcgaaacaaaatatttcaagtgttcacctgtaatctttgtggcgctgtcctgccctgtctcccagccttcatattatagacactgtttataaggctcaaataggaacagcctttccacatagccctgtgtcagctgcagctcactgaaccaggactttccctccaagctgagcaatgggcctctctatgcaaagttgtaactgtggatgttaaggttgctgctgcctttgccagcaattagagggacagggacacaacttcacatggccactctagcagcctgagaacttcctgagggacctcaactcagggaaacacaggacacttggctttgatttcaagattagccagtatgaagtagggttggtgttaagaatagaaatgtttcattctttccatgagcacatttctggtgagagtcttagaaaaattttaggcttataacttcaaaggggaaaaggcccttaagtgaatattgttaattatagtgaaattctcaaaaatttttagatggtgataatgaaaatggaagacatgttgtctagttttatgtcaacttgacacaaactagaatcaatagagaaaatgttttcataagattagcctgtcggcaaatctgtagggcattttcttagtaagtggttgacacgggagggcccagctcactggggcagtgttagccctgggttccgagttgtataagaaagcaagctgagcaaaccatgagaaacaagccagtaagcagcaccagttccttccttcaggtttctgtcctgcttgagttcctgccctgacttccttcagtgaaggacctttctttcccaagctgcttttggtcatggtgttttatcgcagcaatagaaaccctaaataagacaggagctaaaacttgtctgggtggtttaggatgagaagaccccaagagaatgaatcacctttttttcttagctaaaggtcaggaaagtccttgggacctttgtaagccttatctctgccagaggtcagagatgccaaacgtgtagggggctaggatccatgatctggtgcgtaaacgagattttgattatctcttcagaggggagaaagttagcatggcaatagggaaatattaagggaaagtgcctggtcaggaggatagaaccctgttctgggtggagacctaacattctgcataacagcatcaatgacctggttaaagaaccatgtctagggttttgtggacactgctgtccctgttgcctcttgctacagccatggtcatccccactgggtacttagacatctcagccaacggcaagcgctcggaccacatctcctttgagctgtttgtggacaaagtcccaaagatagcagaaaactttcgtgctctgagtacttgaagagaaagggtctgtctattagggttcctcctttcatagaatgattccaggattcgtgtgccagggtggtgacctcacacactgcaatggccctggcagcaggctcatctacagagagaaacttgaggatgagaacttcatcctgaagatacgggtctgggcagcttgtccacagtaaatgctggaccaagaagtgcttgactgcactgctaagactgagtgccaggatggcaggcgtgtggtctctgggctggtaaaagaatgcatgagcatcgtagaagctatggagcatttagggtccaggaatggcaaaaccaacaagaagatcactgtggacaactgattcttttgcattatgggcatcttatccactaggccaccccttctgtagttcaggagagtgcccccaccccatctgttcacaataatctgtaatttctgctctccctgaagttctttgcggctcatgtctttctcatgccccttcaagtctagctgaattgcagggttaagcttatgatcatgaataaaaactaaataaggggaaaaacatctctaaaaaggtgggttcaccttaagctgtactaaagagacgggcagaataattatccctttaatgagattctgtactttcccttccagaatcatgtgtccagtgacctgggcctaagagaccaggtcctccatccttctgagtcccgactcagaaaggcacagcttgtccttttccttttctctctggatcatttgtgtcacctagaactgaagtgtgctgtttccatactttaggcccccttactctctctaaagctcccacccccaccatggaactttcatgccaccataactcagacagcatggctttccccttatcctctcctctccttttcccggtaactggcgagatttatggcttccctcccctggggtttttccttgtaagtgctaagaaaattgtccacaaacttctgcttgaatcctttcttcaattcttttgttaaggagacaaagaacctaaaggtaggaaggtggttaatttccctggtatctgaagaggctttaactacatcctgctaacttcccctgctttctatccctcctggcattgagctactaagttaaaaaagctaaagtcctatgtgattgaggcatcatagtctccaaaggaaaggtcacttgcaaaaggtggaagactcaaacaggtgtgcagaggagcaactgtaggagagagggaaggagtgggcgaatgttctggagttcctcctggtgtccttcctttggttctgaaccacattggggggggggcagcttgataaagtgatgccaaaggctaacatctgtggagcatttctatgactgctgccattctcccaacgactccatggctgttggtgttctaacccctttaatcaggggaaaggcagagtttctgaaatccttactaagtacatttggtttcatagacactgccaaatggctccctctcccagccctgtcttccacctctgctttgctctccattctaccccttagggtaccccaagacctccccatgccttccttcttctcatatttaggttttcccttggcctttctattgtgtaatgctgtgtcaggaaagtgttgtattgctgggctttaaacctctgggaacttggtttagttgctcttgaatgtccaaccgtagattactgtaacccctcagcgggcccccaggcactgctttgcagatgtgtttcatttgtcttccagccacaggcccatcatggtcagggttggatacttagcgcatgttttaggaaaggaaatatcaagacgagtctggaatatcatattattgccaggaccccaaaattcttccaacaacttttggatgacaagctaagttatgtctagttaggaattttatctggagctgaattttgctgtatgctgtagtattttgtgtatatcttcttgctttttaaggtgaacagagactgatttttaggtttaaaacattagtcaaaactccataagctataggtagttaagtttgtggtctatccaaatgtttaatttataattgtatcttagctgcttaggaggatttttgtctataaatcagaaataaaatgttgctttgatggtgtgtgtgtgcacgtacctgtgcatgtgtgcatctaaacacaagagcgtgcctaagtgttcatgtgtacatgcatgtggagtgtggaggtcagaggtcagcctcagacgtcgttcttctgatgctgtctgccttgcttttgagacaggatctctcattaacctgggacttgcccagtaggttagactgtctggccagcaagcctcaggatttgcctgtcgctgactctccactcctgacattttctgtaggctctagggactgaactcaggtcctcaagcctgaatggcagctgctttacctctgagctcttt

SEQ ID NO: 497 - DNA, 5174 bp, Mus musculus
ttggcctgctgttgcggatctgctggctgctccctctgctgtggctgctgccctaagttccgacagtctcggaccacccgcttcatgtatttattctacttcatcctggtcatcgccctctgctgtgtgatgatgacaccctctgtgatgaagcaggtgaaggaccacattcccttttttgaagagttctgtaaaaagactcaagccggtggtgacgcctgtgagaacctggtagggtattctgcggtgtacagagtctgctttggaatggcttgtttctttgctctgttttgcctgctgaccttaaaagtcaacaacagcaaaagttgccgggcctacattcacaacggcttttggttctttaaattgctgctgttaggggccatgtgctcaggagcgttcttcattccggatcaggagacctttctgaaagtctggcgctatgtgggagctgggggcagcttcctcttcatttgtatccagctcctcctgattgtgcagtttgcacataagtggaacaagaactggactgcaggcaccgtccgtaataagctgtggtacgcctccctgtccctggtgacactcatcatgtattccgttgctgttggaggcttggctttgatggcagtgttttacacacagtgggacgactgcatggacaacaagattctcctgggagtgcacggtggcctatgcgtgctaatctctctggtagccatctcgccctgcgtccagaatcgacagccacactctgggctgctgcagtcagggctcataagctgttatgtcacctacctcaccttctcagcactgaccagcaagcctgaaaaaaaagtcctggatgaacatgggaagaatgttaccatatgtgcgcctgactttggtcaagacctgcatagagatgaaaacatggtgacttggctgggcacccttcttctaattgtgtgcatctcatattcatgtttgacatcgacaacaaggtcgagctcggatgctctgcagagtcgatacggagcgccagagctggaagtagcccggtgctgtttctgctttggtccagatggagaagacactgaagagcagcagaacgtcaagaagggacccagggtgatttatgatgagaagaaaggcaccgtgtacagctactcctatttccacttcgtcttcttcctggcttccctctacgtgatgatgactctgaccagctggttccactatgaaaatgccaccattaagaccttcttctcaggctggtccgtcttctgggtcaagatggcctcctgctggatgtgtgtgctgctgtacctgcagaccttggtggcccctctctgctgtccctccaggcagttctctgtgtgaggatgtccaggtgccctgtggctcagcaggcctgtgcccactgtggagggctgccctttgaacgtgtgcaccaggggtttaagcagcaactggtgccctgtgaaaagctgacatcccctggctagcttaagtaggtctgacaaagctttcaggaaacaaacaaaatctcctgattagcttctagttgtaaaatccaaaaggaaactaccagttagatcgacaggaattgaaatctttagccaagctggtaggtgcaattatctctttatgccttacccaagaattagctgaagttttgttgctgttcttcctggacgtgttttaaccaggccagagcttggggcacagcgtctgtcacagggatgaaaatgtccttgtatggcctgtcactctcatccttggcataaagaagcaacaacaaaaacacttgagtcctcagcctaaggtggggcttggcccctgtcactcacctttgcctgcctcccagagccctcacagttccctgtttatgcagagtacagagggagcccctcctttgactccaccctcaactacttctgcacatccctgccccagcattttctgttgaggtcatgatgctgggagtcatggccttcttgtcctctctgcccttggcagaggtccttcattcttgtctaaggtagtgtttgtaataatgtgaaaagcacaatttcttctcaccttcatgggatgctccaccatgttttccctacccagtacaagacactgcagtaatcctgctcttatttatggcagtgttcatgtgactgtaaaacaagatgcatgttgttgtctttgcccaagtagtggagggttgcagttcttacttgtgagtgtcattaacagtaatgctttaagggtcttaacaaaaacgttgcttctttactgcagcttgccacacccctctcagtgttaaggtcagcccccctgactcacccccaccatgaggccttcctcacttacagtgtgcccccaatgctaacagcatggtttccttgaagtagaggagggctggggtaaggttcccaagcagcttccaacagagctggccacacagatcggccagacaagctgtgcaagtgtggaattaggctgagatgcaaaagtcggtggttggaggcatctcacaagactacgattacatccatacaaattcctagatatgcttttggaaagcagtgctcacaagtgtgcattttagtgccaatgttcatagtgagggagaggatttccccagtgcctatctgaacaaatcagacagaattgggacccacataagcctgattcccacaagccaaaatgtcagaatcttcatttctactcactactgtaccctcctgctaaaaggacccacggaaagaaatagtggtgaattcagtggagagcttgtctggtttatagtatttgagatcctgtcttaaaaggtacacacataaggacaccttgtctgtaaactctcagcagttcaaagagaggagaatcacacaaagcatagctgtatactagctctaaacaagtctagttaatccagtaggaatgggagcctcatcatctggggcctgtgtaaggcagcagcttcgttgcagcagcccctgctgtgctgaagaaaggaggtgctgagagagaggcagagaggaactctgctggggggagcaggattgttttgccaaggtttgtctctgctgagactggaagccaggcgtggtgacttttgaactggtcacagccaggctgacgaggccacacatacctgggctagcctttgttggccccttttcctctatggaaagcagctcagggaaacccagacagtaccagtggctgccccggtggcttccctctgaaccaagccccattcactttctagctgcctaagtcttggttgagtacatgccctgccgttcttcagaagttaggcctcacacaggacgaagagctggccaccctcttctttactctcagctaatggtataaatggatggtcagaattgagatgaagggtttctaagagagatatacataagaattgatcctttaatctctgctgaagtgagggagtctctggtttctagggcagctagaccctatttcaaaacaaaaagttggcatttgtgatcagctgtgagaaactactcaggtagaagcctgtttgtgagcttaggaatactattgtttgtgaaactggagaaaactggaaagtgtgccattgttttgagataacaacagcaatgttaccttgcttttaaagataacaggcctttgcttcgtgcaatacccaagcaacactatcaaaattcatgctttgaagctgcccatctgaccttagccatggcagccctggaggcagagtttagaaatcatgtgttctctccctctagtgttttatgagtaaaatgttagttatgccatggagggattctcctgggagtctcattcacacatgatgcctgcttcaagtttttgtggtgctggatagctgatctgggtttcttgggaagtcagcagatgaattgttctgcaggggtttggggaagttttatggagtgggtggactgtggtatggaaagagttgtggggggagacatggagtattgagacttctggttccgaatcccatagggagtggccagtgggagacatagtgccatgtctccagttccacggtgacttcacgccagtgttaattgcccccttcccaaattgtcaccctctgtctttatccaataatgttctcatgccgtccttggtgcttcacgttaccctggaaagagagctccagagcttgcatttaaacttctgggcatctctgcttcaatgcctttctaaccagtggctctttttcgtgtgcggaaacataaaccagtgcacatcccacatactgccaagaagtgaaagggcttcataaggaagatgggcaccagggaggaccctgggcttcctcctcggacatgagcttgccacctggtcatatgctctgaaggtttcttctgtgactgagactagtaaacattttattccctgcagagatgagctgtctggcatgggggtgacttcagtagacaggagagccgacatgatggctttagctcgttctcacttgccgttttccatcactgaggcattcacagagacagttactttaaaaggctgaaacacttggcttttaccaaagaggtgtatctgattttgttttagttgggcaagggcagaactggaatgcatttgcccaattgacttcaagaagtttaactacattcatgtgaggaaaatgatagaagtctttaaggtaattctttaggatcctgggaaattctctcaggtaaagaaagattacagcagatgagtaatatatgtcttgagagctatttataaaaattgtaagaggatcattttgtttccatttattaaaaagttaaacttttttactttgcaaagaaaatactacaaacatttttatagtcataactgttaatttttttaaaaagacttttttttttggaaacaattagctgtagccaaattttgtggttacatttttgctatagtggagtttgaatgcaatctgtgtggtaagtctactgtttgtttataaaggtctctgacatggttagattttgctaccttttaaaatagttatttttccccattagccacaaagccaattatggatttgtatttgtgtttttcaatgctaatttttctatgaagcacctgaaattgactagccttttcctatgtagaaaactcaaacatgttaactctgtactttaataaaatgtaaacttgaaatcatg

SEQ ID NO: 498 - protein, 452 aa, Mus musculus
LACCCGSAGCSLCCGCCPKFRQSRTTRFMYLFYFILVIALCCVMMTPSVMKQVKDHIPFFEEFCKKTQAGGDACENLVGYSAVYRVCFGMACFFALFCLLTLKVNNSKSCRAYIHNGFWFFKLLLLGAMCSGAFFIPDQETFLKVWRYVGAGGSFLFICIQLLLIVQFAHKWNKNWTAGTVRNKLWYASLSLVTLIMYSVAVGGLALMAVFYTQWDDCMDNKILLGVHGGLCVLISLVAISPCVQNRQPHSGLLQSGLISCYVTYLTFSALTSKPEKKVLDEHGKNVTICAPDFGQDLHRDENMVTWLGTLLLIVCISYSCLTSTTRSSSDALQSRYGAPELEVARCCFCFGPDGEDTEEQQNVKKGPRVIYDEKKGTVYSYSYFHFVFFLASLYVMMTLTSWFHYENATIKTFFSGWSVFWVKMASCWMCVLLYLQTLVAPLCCPSRQFSV

SEQ ID NO: 499 - DNA, 52124 bp, Homo sapiens
aatacaaaaattagctgggcatagtggtgtatgcctgtaatcccagctacttgggaggctgagacaggagaatcgcttgaacctgggaggcagaggttgcagtgaaccgagattgcgccactgcactccagcctgggcaacagagcaagactgcatcaaaaaaaagaaacaacatacagtgtgtgagcctggcttaagtgccctgtccttgggtgcccagagccagacttaagaggtaacacccttagcaggcacgttcctttcaccctgtggtgtggaatttgtatgtgatgtattttttctttttccaaaaatggggtggactttggaacagcaaatatttaatcggagcaaattccccttgccagaatcctgctagcttgttcaccttggaggttctttgcccaaaaatacttaccacatactgaaaactaaatgtgctaagtcacccacagagtataaaggaggtcttgattaggatttggagcaggggggttgtttacctgtttttgatgaatatacagtgtcaatgtactcaccctgtgatgagccttaaagggccctggccgcattccagattctggagtaagcaaacaagggaggggatttgttggggatggtggctcagcctgctgctgttagcattctccttgaaatggattttggaggaagaaaaaagaggtagggaggcagagaaggtctaaaggtgaaagatgggctggtatagatgaaagaggtgctaatgtgcatgtgttatggggaagatgtggttcaggaattagagttgctgatggagtagaagagagaaggtggggaagaaaataatttagggaatgttttagagcaataaatcctgtgtaaatgaaacagcctaatgaatgaagtggtatggcttctccatgaatgtagcttttagagattcaaagcaatattacctcctcgttactggcactactcatacaggtgtaacttttgttttgggttagactctctgaaacattcatttttgtgtgtgtcccctaccatatttcagcacctgaaaattttaaccatgctgtttcatcactcatgtttaaacacagctaaaaattgaggttcctccagaaagcacctgtgtgactgacttctcattacccgcctgcgggtgcttcctttcatgcgcgtcggtgtgaagagaccaccaaacaggctttgtgtgagcaacatggctgtttatttcacctgggtgcaggcgggctgagtccgaaaagagagtcagcgaagggagataggggtggggccgttttataggatttaggaaggtaatggaaaattacagtcaaagggggttgttctctggtgggcaggggcgggggtcacaaggtgctcagtgggggagcttctgagccaggagaaggaaattcacagggttaatcactcagttaaggtggggcaggaacaaatcacaatggtggaatgtcatcagttaaggcagagcagggccttttcacttcttttgtgattcttcagttacttcaggccatctgggcgtatacgtgcaagtcacaggggatacgtgcaagtcacaggggatgagatggcttggcttaggctcagaggcctgacacttcctgtatccagccccaattgctgttctaaagcaatttccagaccagactgttctcgctgggataccccttggtgatgccctaaggtgttaaagagcaaactcctgctttgttcttcacttctgctgtctgtcctctgccctccaccctccctccaccccaaacggcaatgccataaaaaaagaagaaaacaaaacagctttgtctcattcttgtgcttcattcttgtcatctgtgctctcctgccagttgtgagctctacctgcagaatctctggtttctctgcctggggttaccttcttcacctgttcccagtggccttcaaacttgtccccttgcctcaagtctgtaccctttcaccacgtcttccactttgtagccaaaggtgttctagcttcagtagtgcttttccccttgcttacaggatgggggcctgactgctaagtctggcatgcacctggcccttcccagcaagaccttgcctttgtagagaagggaaaaatggcttccttccactcttctaggttctttctctggaagcaaattaaattgacataagaccaattacaggagaaaaagcaattttaaaaagggtcagataggctgggcatggtggttcacgcctgtaatcccagaactttgggaggctgaagtgggcggatcatttgaggccaggagttcaagaccagcctggccaacatggtgaaaccccatctctactaaaaatacaaaaattagccaggcgtggtggcaggcgcctgtaatcccagctactctggaggctgaggcaggagaatcacttgaacctgggaggcagaggttgcagtgaggcgagattgcgccactgcactccagcctgggcaacagaggtctcaattaaaaaaaagcgggggggagggggtcagatgatagaagcttatggcatgttgagctacagagaggaataggggcttggggcctctgggagttgctggcaacacgtaatgggagagtgaggggaagaaatgtatggtgaataaacgtctgatacactttactaatgtagatttcctctacagatgtaaattttttgtataaaacagcagctttgcagagctactcctgtgtcttcagcttctcagaataacgagcttgaaatacgcaaagaagaatgttttagggtggcatatcttggtttttgtgagtgacgccaaggtcagaggtaaccaggtccacgaacatttgtgtctttccataatgttggacttaactgatgctatttcagttacaaaagccaccagctatgtggagttcccagggagccaattcttcttagtacttctcatccactcattagatctgcaggcacacaggttccagcctctgcaccagccagtcagtattgcaaaccgtacacaatcgtatactctgtcaatatataaatgttactgattaaacattgtgcaacaaacaaaataacatttaacattaagagaaagggaataggaaaagggttaatgaagtagtccagggagagcaataaagaaaaaaagaatttcctggtctgggctggttaatctggttggttgtgcaagaaacagtctttgatgtgggcagagccttcggggcagatgccaggtgcttgtcacgagttagaaccgtacctaccctttttatggccacagagtcctccagtgaggactgatagttgaagactgtgcttgtttatctacttatctggttggatgcagtctttatcaagcaaaacatcttgtctctgttgtgacaaaatggtgtaaaaaaaaagtcataaaaaatgtacagttttaggaatttgctgaaaacaaaatgttggctatttcctcatgaagtctttcacatgtcttcatgaaaatggagctggccaggtacagtggctgacacctgtaatcccagcactttgggaggctgaggcaggtggattgcttgagtctaggagttcgagaccagtttggtcaacatggtgaaacaccatctgtacacacacacacacacacacacacacaaaattagctgagcttggtggtgcatgcctgtagtcctagctactcaggaagctgaggtaggaggatggcttgagccctggaggcgacggttgcagtgagccaagattgcgccactgcactccagcctgggtacagagtgagaccctgtctcaaaaaggagtggggagaaaatggaactctttgtttgtttgtgtaaaggaaaataaaccctctcaggactgcccaaactctttatgccaaatggaaacttaagactggagagacagtcacgtgacactgctgctgtcccctcgcaccttgcccccctgcccagtagatagctgcgacttcccaaccttgtgtcaaagcgctatgcattagccacacccctggagaaggcagaaggcctggtgcatcccggatgactgccctcaaattgctcataagtaaattctctgctggtccctaaacctttcaagatgtgtatcttcccataaaaaaggacatgtcagctgtaactttaggtctgcaatctaagtctagctccctgtccacggaattgcagtctgttacatttcacactgacaatgcccattacaagcttatcttcccaggtgcagaacaaagacaggacagcagtcatttctctgcctaccctgagactacataattaactcttcctttactccctttttgaatgtttatcatatctcttttatagcggagtttactgggcactagttaaaatctcaggagaatgttgcatttgcctcaccacctgcccccttttcctgcatgccttctcccctttaaagaaatgggtaaataccgagcaacctctttgggagcgccagccacagaggattctgtgatttgtgtgtttctcagcagcccctcaagctctggcttaattattccccattgagactcttgcctcagtctctcatttgggttgacatttgtttatggaaatcgtgatagccacagatattattgtttcttcagtatctttttctggagaagaaactgtaaattatcttctttatcacactttccttttaccttcagttttgtgctattttttctctgtgatactttatttttcttatgaataatagttataatgtgatttattttctgttcagaagagtgttcaactttgatgttgataagaagcaagtttttatgactgaccaaatccttattttatgacattactaggaatgtgctgcttgttctcattgtgtaagattttaattattctgataatgaaactgattatttcatgtggaagtcttctaatttggctagaataagctattgtcaacatttatcagaagattaagacccactaataaagagctccagtggatcaagaaaatacccaattaacagccaattcagagaaaaaaaacagatggccataaacttgagaaaagatgctgaatctcactagtaataaggaagatgtaccttaaaacaggatattgggtttttgcctttaaattagatgtccaagttgggaaatgtgcaatctcagatattactggtaggatgtaaattggtacagcctttgaaagtatgatttaactcatcttgaagtttaaaaatgtagatactggttgaatattcctaatccaaacatctgaaatgtgaaatactctaaaatttgaaacttttaaagtgccaacatgatactcaaaggcaatgctcactgaagcattctggatttttttggattagggaaccttagccagtaatatagtgtaaatattccaaattctgaaagacttctggtcccaagcattttggataagggacattcaacctgactacttgacctactaattccatttctagctcaggtgtctgtcctacataaataatggcacaggtgcagtgaggcatgaacagcagtatttattgaattagtgtttgtgataataaaaaacaagtacaaaaaataaaatttaaaaaccctccccaacaaaaaattaagatcagtgtgagaatggttattgattttgatcaagcctttttacagtataagatagtgatgaaaaagaatgtgatgggattttgcgtattaatagagaaagactcttcatggcttattgtttatttttgttttctttttttgggacagagtctcactctgttgcccaggctagagtgcagtgtcacgatctcggctcgctgcaacctctgcctcccaggttcaagcagttctcctgcctcagcctccctagtagctgggattacaggcacgagccaccacaccgggctcattattgtatttttagtagagacagggtttcacatgttggccaggctggtctcaaactcccgacctcaggtgatccacccacctcggcctcccaaagtgctgggattacaggcatgagccaccgtgtctggcccagcttattgttaattgggaaaaaatattgcagaacattacatacaatcttttattttaaaaagctgttttaatatatttattatatgcatagtatgatatgagtgtatgtatgtgtgttgtgtatgtatatgtatatgtgagtgtgttgtatatatgtatacacacacatttatgtatgtgaattaatacaaatactctacccaccaaattgtttactcttctgagggagaggagtgacattttgggtggatagtaaaagaagtctctgattttttatttgtatatatgtatacatatcaacaaaaatatatccatgtattgaaatgggattttaggccaggtgcagtggttcatacctatgatgatcccagcactttgggatgcgaagacaggtggattgcttgagctcaggagttcaagaccagtctgggcaacatgacaaaaccccatctctacaaaaaaaaaaaaaaaaaaaaaaatacaaaaattagctgggcatggtggtgcgtgcctgtagtcccagctaattgggaggctgaggcaggaagattacctgagcctggaagatcgaggctgcagtgagttgtgattgtgccactaaactctaggccgggcaacagagccagagagaccttgtcttggggtcgggggtggggtgggggtgggggtgggggcggttaaaaaaaaggtaatttttgtaaaatctgatgttggatttcagaagtcatttggggcaagtaaaggctgagtgttactttatgatcactgtatctttaaaaaagattcagagaaaattagaaaaatatctctttagaagatagatcctcagtctgtttctttatgcacacgatccatttccacagtggatgttgtggttggctgcatgaacactccgtgacagtccacctctcactcagttgtaacagatgacttttctaaactttctcctcagattcctttttttgaagatatgtgtaaaggcattaaagctggtgacacctgtgagaagctggtgggatattctgccgtgtatagagtctgttttggaatggcttgtttcttctttatcttctgtctactgaccttgaaaatcaacaacagcaaaagttgtagagctcatattcacaatgggtaagtattttagtcttcttggggattgctttctcctttcttatgttcaggacagtagtccaggatcccatctgcccaccagacactgtgactgcccttcttctagttgaaattgttgatttaggggaaggtggaattgatacttacccacatggttgcctcaaaggtagaatcttatttgtaacacctggtaccatgatgcgaaatttactcaagacaaagagtttatttcttgttccaagaccttcccccaggtcatttccacccctgcaatgaaatggtgttttgcacaactggaggctgcactgagtctgcctaattatgggaaaaagcattcttcaagtcacctagttacttccccttgattaggagagaacattggccaatggcagaatcatggattgacatgctgtaccttctacgaggtcctttgtccttcttgaatgtcatttaaatacatttcctcttttttttccccccacttctagcttttggttctttaaacttctgctgttgggggccatgtgctcaggagctttcttcattccagatcaggacacctttctgaacggtactaatggggtattttgggtatctgtttattttgtttttacccattttgtcaaattgctcagaagcgcagtccaaagtacctctgatagttagaattactgattttcttttggcttcaaaagaaattcctgacttacctgcccatactttttccatcattgcctatctacctcccctcttctcaccaccgcatcccacttccaggtagggtgtaagaggactctgatactctgctggcctgggagaccttgttctttccaagcactgcacagaaaacccagcaacagggagcgcagggctgtcagcagctaaatgtctgctgcagcgatagtgggacaggaaaagcatctttcagtctgttattaaacttaccgtatgtgaagctctgtagcattgaattatattctttattgttagaacctgctttaattcattaatatgaagcctttaatcatagctgaaacagggcgccctttttcatatgagctgagggaaaaacctgaatttcagtggttcagagcattttgttcaacccaaatggattcactttcctaagtaaggtattaaaaacatttaggccaggcgtggtagctcacacctgtaatcctagcactttgggaggctgaggtgggtggatcacttgaggccaggagttcgtctgagaccagcctggccaacatggcgaaacctcatctctactaaaaaatataaaaattagccaggcatggtggtgtgtgcctgtaatcccagctactcaggaggctgagacatgagaattgcttgaacctgggaggcagaggttgcagtgagccgagattgcaccactgtactccagcctgggcgacagagtgagactttgtctcaaaaacaaaactaaactaaacatttagattgtgtcagtttataaggaacagccataatccttcatatagttatgtatcagggcctagctagttgtttaaggtcatacttgtttttcatgtactccctaagtcttgctgttacctaaaatactgttaaaagttttaaaattctctacagagatccttttatgtattagaatgtatatttggagggagaagagacctagaaaccctctggtccagctcagtcttttttttgtttttcgagacagagtcagagtctcgctctgttgcccaggttagagtgcagtggcacgatctcgcctcactgcagcctctgcctcacgggttcaagcaattcttctgcctcagcctcccgagtagctgggactataggcacgcaccaccacgcctggctaatttttgtatttttagtagagacggggtttcaccatattggccagtctggtctcaaactcctgaccttgtgatccgccccctcttggcctcccaaagtgctgggatttacaggtgtgagccactgcggccggccaagctcagtctttttttttttttttttttttttgagaccaagtctcgctctgtcacccaggctggagtgcagtggtgcaatctcagctcactgtgacctccacctcacaggttcaagtgattctcctgcctcagcctcctgagtagatgggattacaggcacccgccactatgcctggagtttttttttaagtagagtcagggtttcaccatgtaggccaggctggtttccgactcctgacctcaagtgatccccctgcctcagcctcccaaagtgctaggattgcaggcatgagccactgtgcccagccccagctcagtgatttttatagacaaattggaacccatgtgatgtgacttattcaaggttatagcgtctttgtggcagagccagaagtcgaaccgagtccttgtcccctgtctgaaccttgtttctttactggtcattgttgactttttacccaataaaatttgaacctttgattttcctggcaatatgtgtttgcttttaagttgtgggtcattatggattttatgaattagggcatctattagggtacctggcagatgtagtgtggaggataagcttggatatttcagggtcagactgcctgtgttcagatcccaactataccatttattgactgagatgttgtcaacctacatagattctcaatttttctcttctgtaaagtgagtgacatttataatagtaatacatatcttatatggttgtgtgacaaatatgttaggtacactgatcatctagtaaaaattagctgtggttattctcttttgagcaaaatacaacgaaaggttgcctcattgtgttcttcatggtcttttgcagcctggcgctatgtgggagccgtcggaggcttcctcttcattggcatccagctcctcctgctcgtggagtttgcacataagtggaacaagaactggtgtgtgcctttatggaaagcttcccattgactcacagaaactgcccagttttgaccaaggctgtactcaactgcattgctagggatttgcagttttgtttccctttatacctgcttttttgtacctcttcatttactcctctccttcattcacttctcactttttgaccccctgcccctactcccttgcttgggctctgagtcaaccagtggtgtgaattagccacactcaatcccctgctcgtacgggtctcgatctcctgacctcgtgatccgcccacctcggcctcccaaagtgctgggattacaggctcgagccaccgcacctggccttgctgtgtttttttaacagactcttgcttataagaatctagaaaatgtgctcattgctcttaatagaacaactaaagtaccttttcttccctttttcatttatctctttgtaaatatcttgagaaggagatgatcctaaaaacagtaggatagaaaggtcatgggcctggcaaccaggagatgcagatttcagtacccttttgttttctttttcttttattattattattattattattattattatttttgagatgggatcccactttgtcattcaggctggagtgcagttgtgtgatcatggctcactgcagcttcgatttcccaggcttcagtgattctcccacctcagccccctgagaagctgggactacaggcatgtggcaccacacttggctaatttctttttctgtttgcttggtagagatgggatttcgccacgtcgcccaggctgatcttgaattcctgggttaaagagatccttctgccttggcctcccaaagtactgggatgacattgtgttcggcttcagtgccccttttaatgcttgttctcactgtagagctcatcagtcggcccctctgacctccattttcacacttaaataatgtgtttggactaactggtgtgttctttttttttcctttctagctcaaattttgtggtttacagtgtcaattctctattagaattgaaacaaagggctttaggtgtcgagtgtaaagactttttttggatttttagtgggatgggagagcaccagagggccttaaaaagggaggaatataatctgttttaagtgcagaaaggtgaaaaggtgtcaggggtgcaagtaaggaggtcagggggagtcaatccaggtgagggaggagtagtctggaactaagtggtagcaaggagctggatcctcctatgttccaaagccagctctgggtggaggtgggtgggggaggggagagcagcaagaagcttccagagtgaccacagttcttttgttcttttcttttcttttcttttcttttgagacagagtctcgttctgtcgcccaggctggagtgcagtggcacaatctcggctcactgcaagctccgcctcccgggttcgtgccattttcctgcctcagcctctcaagtagctgggactacagtcgcctgccaccatgcccggctaattttttgtattttttagtagagacggggtttcaccgtgttagccaggatggtctcgatctcctgacctggtgatccgcccacctcggcctcccaaagtgctgggattacaggcgtgagccactgcacccggcttcttttcttttcatttcatttcatttcattttcttccttccttccttccttccttccttccttccttccttccttccttccttctttccttcctgcctttcctcttcctttccttttccttttcctttcctctttctttgctttcctttctttcctttcctctttctttctttccctcttcccctaacaatgggaagttggagttgctgttttctgaggttgggataattgcacaatagcaggtttgggggatggaggaatgggggtgtcaatatcaggaagttagccttagcctggatgtgccaagtttgagataccagttagaccttcaagtgggtctccaattgttaaatgaacaaggggataatataagtgacattcaggggaaaggttagggttgaagatttaactttgggatggactgtaaacataaattaactgaaagaaagtccttcatattctaataacataaccaaaaagactagtgaatagaagcgttggtcgtctcccacgcacaaaccagtcagcagtgtttacctttttctgtataattcatgctgtctccccatcatccattattatttgctcttagatatttttttccttcttaaaatcccatttttctctcatttcctttgtatgccttttatgttagaataattccaaggtcattggagtgtctggcacagtttcaggaatatgacggtcattatcattttggcctttcctccctattttctttgtttctggttgcaggaactttttcatcattaaaacattttagctgggttgcttgaacactttccagttttgtgagggcataaagcaagttgctttttctgtgaggtttgggagaatgtggttacaaagagcaatttaatcataaggcagatgacaatgattcattcaattcattctccctgttctgtcctcttcatttagcatttatagatacttttttttgttctgaacaatttccctttttgtgtgagacagggtcttgctctgttgcccaggctagagtgcagtggcatgatctgggctcaccgcagcctctgcctctggtgtccaagcgattcagccactcaagtagctgggattacaggcatgcaccaccacgcccggataatttttgtatttttggtagagatggggtttcgccatgttggtcaggctggtctcgaattcctgacctcgtgatctgtccgccttggcctcccaaagtgctgggattacaggcatgagccaccatgccctaatttattttttaattgacatattgtaattgtacatatttatcgggttcattttgacgttttgatacatatatgttatatagtaatcaaatcaaggtagttggctattcattacctcatggatttatcatctttttctttctttcctttctttttttgtctttttttttaaagagacagggtctcactctgtcacccaggctggagtgccgtggcgcagtcatagctcactgcagccttgaactcctaggctcaagaaatcctcctgcctctgcctcccaagaagctggctaattagcatgtccagctaatttttttgtttgttttttgttttggtttggtttttggtttttgtagatggggtcttgctctgttggccaggctgtatcatttctttgtgttgagaatcttcaaaagcctctcctctagctgttttgtaatatacaataccttactgctagccatcatcaccctaccatacagttgatcaccagaatttattcctatctatttaactttttttaatgtcaaattttcctttactattccctgatactattttagataaagaagcagcacagttacaggtccttctcttcagtacagggaataaagagctaaggtcagccagtatggctcttagtaaaggtaattctctttcctccctaagaagatggcatcagagctgctggcaacactttgtttctgtttttaaaagtttatttattattattatcaaacatttagggccaggcacagtggctcatgcctgtaatcctagcactttgggaggcagaggtgggtggatcacgaggtcaggagttcaagaccagcctggccaagatggtgaaaccccgtctttactaaaaatacaaaattagcccggcatggtggtggatacctgtaatcccagctactaaggaggctgaggcagagaattacttgaacctgggaggcgggggttgcaatgagccaagatcacaccacagcactccagcctgggcgacagagcaagactctgtctcaaaaaaaaataaaataaaaaatttagacagggtcttactcttgcccaaactggagtgcagtagtacagtcatggctcatagcagccttcatccacccgagctcaggtgatcctcctacctcagtctcccaagcagctgggactacaagtttgcaccacaacatgctgctaatttttgtagagacaaggttttgccttgttgcccaggctggtcttgagctcctagcttcaagtgattcacctgcctcggcctctcaaagtgctgggattacaggtgtgagccacctctcctggcagcactttggagtagagactatggcgcttcggggctctgtgtttatggagaaaacttggggaagcccagtgaagagccacttttttcatcctgccaaaaactgacccacggtggttcatagtcagaatggagaagctagaataaagtctgtaggtagctaaaggaaataaagagtctcaggactgctcaaactcattacaccaaatggagagttaagcctggagacacagtcatgtgacactgctgtctccccccacctgcccatagatagctgtgacttcccaaccttgtgtcaaaggactacacattagctagatctctacagaaggcaaaaggccccatgcaacccggatggctgccctcaaattgctcataagtaaattctctgcttgtccctaaacctttcaagatgtgtatcttcccataaaaaaggacatgtcagctgtaactttaggtctgcgacctaagtctagctccctgtccatggaattgcagtctgttacatttcacactgacaatgtccattacaagcttatcttcccaggtgcagaacaaagacaggacagcagtcatttctctgcttaccctgagactacataattaactcttcctttactccctttttgaatgttgatcatatctcttgtatagcagggtttactgggcactagttaaaatctcaggggaatgtcacgtttgcctcaccacctgcccccttttcctgcgtgccttctcccctttaaagaaatgggtaaatactgagccttctgcaacctctttgggagcaccagccacagaagattctgtgacttgtgtgcttttaggtgcaccctcagacctctggctcagtacacctcggctgattgagactgttgcctcagtctctcatttgggttgacattattcattttaatgaatgaatacatttgtcgcagaaagtggaattctctcattgttgagagaaaattctcagcttgagtcaagaagtttccatatttaccagaaccttctagctttgatgagcataatcactgctaaaataatgtgtcttctgagcagctgggtaccagtgcctgtggcctgtagcattagttactgcctgagggatggtgactgttaccgcagaatggtgggcttcgttgacttgtcttctctcctctccctcttacccacttcccggagaaacaggacagcaggcacagccagtaacaagctgtggtacgcctccctggccctggtgacgctcatcatgtattccattgccactggaggcttggttttgatggcagtgttttatacacagaaagacagctgcatggaaaacaaaattctgctgggagtaaatggaggcctgtgcctgcttatatcattggtagccatctcaccctgggtccaaaatcgtaagcatgtttttttccattcttcgttacttatattttcctaagtgtctttgagcaaacccaatggctttttttgttttgttttgtttgtttggaactagtgtattccttaacttactgtggatgtgtcagcagtaggcaaggtggggctccagtctcttcatatctcatgctcgagctgtgatagccaagcatttctcatgtcgagaaagacctgaacgtaacgaagtcaatgaataggaagatactgcctttgctaaataatgtaccacaaagagcctttaaatgggaaatgccttccgtgtatatcaagatcaggtgtttatgagcttgcctacaatctctgtgtaaaagttgaatgaaagggccgcagaaggggttggttctggggtcatctttcactcaaggctgtggacagtgtggtctgggagtcaggaagcaggacatcccatcccagctcagccagcagctggcccatgtgctaaccttccttagacccaggttcttcctcagtaaactcagtggaaacatgtgagcctgaccttgctcattgttgtttcaaagccggaaggaagagacagtgggatctgaaagtgctttaggaagtataaatgtgaattgccatttataaactactcttggtttcttaagccagggtatagtgtctttgggcttacagtgagatgtccctggtctgattttttttgtgggtgtcggaccctataggtgatgaaaatgcacatgacattcaggttctaggtaggaaaatacaggcaataaatgtacagcccccttgaatcatttctaaaatagtggtttaaaaaggcaactagtggtcgggcgcagttgttcatgcctgtaatcccagcactttgggaggctgaggcaggcagatcgtctgaggtcaggagttcaagactagcctggccaacttcgggaaaccccgtctctacaaaaaaatacccagaaaattagccagccatggtgggacacgcctgtattcccagctacccgggaggctgagaggcaggagaattgcttgaacccgggaggcggggcttgcagtgagccaagatcccaccactgcactccagcctgggtgacagtgagactctgtgtcgaaaaaaaaaaaggcaactagtcacaaataatttgttttcttctattaaaaattttaagaccattattgaaattgagagtattattctcctaatccctttaattgatcagttaagagttcctagaacaacttgatattccgattaaaatctttgggttaagtcctaccttttgaaatagggataatgttttgaaatacttggtttaataccattaggtgctaaggaaaatcttattcccttgccaaagagcaacattataacagggtctattttatgtctttattggtaattacaatttaataatgataattttggaaacaaatttgaccaaagggaagactgagtaaaaactgcatccttttatgtcggcaagtggtcgaaaatttcgcaggaaagaaagagagatcccttatcacatcctggttactctgaaggatctgaacccttagtttccttgaaatattataactttcaaaaaataacagatggcttgtgaagtttcagagaaaaatgaacacttatacactgttggtgggaatgtaaattagttcaaccatagtggaaagcagggtggcaattcctcaaagacctaaaaacaaaactatcattaggtccagcaatctcattactgggtatatacccaaaagaatataaatggttctcacataaagacacaggcattcacaatagcaaagatatggaatcaccgacatgcccgtcaatggtagattgaataaagaaaatgtggtacatatacactatggaatctatggaatacggtgtagccataaaaaggaaagagatcatgtcctttgcaggaacgtggatggggctggaggacattatccttagcaaactaacacaggaacagaaaaccaaataccacatgttcttgcttaaaagtgggagctaaatgatgagaacatgtggacacatagaggggaacaacacacactggggcctatcagagggtggaggtgggaggaaggagaggatcaggaaagataactaatgggtactaggcttaatacctgggtgacgaaataatctatatgacaaacccctgtggcaattttccccttacaacaaacctgcacatacacccctaaacctaaaataaaagttaaaaataaatgaataaataaataaataaccttaaagccattctcccagtgaatgctgagccccatagccttcctctttagccaagagcagttcttgtattctgtccccaaaagctttttgatcattggcaggtaagagctttttgccctgtcatagactgtagtatgtgatgaccttgtagaatccagaatacatcccctatgaaatctggtttaccacttactcccctccccaattaagctatgtggttttatcaacaactatggtaattttttttctgatcttgtgatttaagaactaatgttacaaacctcagggagactagttagtgtgttttaagtgtagccataggcttgataaagtattggtagataacttggcagaacctgatgtctttgaagtagcaatgttcagttcagcgtgtaactctctcccccttaatatctttttagttttatctgagaaacatactacatttttttctcttttctttcctttaaaggtggatgctcaagtttgaggactgtcatggggactatcaggttttttaggcatgtgctttctttttcttcaaattaaaacctgttgtctgtctcttgtcacttttcaggacagccacactcggggctcttacaatcaggggtcataagctgctatgtcacctacctcaccttctcagctctgtccagcaaacctgcagaagtaggtaagccagcctgttagtgggcttgtgtttgcggtgtgaatattttcattcatggaggaatgagctattgtttaaatattggagaggccttggagatagagagcagaaagatggttaccagaggctgggaagggtttgggaggaggttaggatgattaatgggtacaaaataaataggaagaatgaataagacctagtatttgatagcacaacagggtgactatagtcaaatttaattgtacatttaaaaataactaaaagagtataattggattgcttgtataacacaaaagatcagtgcatgaggggatgggtaccccattttagatgacgtgattgttacatgtttcacacctgtattaaaacatctcatgtaccacagaaatatgtacgcctactatgtatccacaaaaattaagttaaaaaataaaaataaacgttagaaatgtaccaaatcacagtagagagatgatctagactttttcatgaaaaagtctttaacttgagctatgtaaaggaaaattccctttttcgattcttcctggtgtgtaggacagacaggaggaaaggtttggctgtggagtttgcttttaggcctaaataacctctttagttgtatttcttttcttttctgactatagcagtggaataaagagtggaaagaatgtgggggagtggggagcagggagcaggatctgagcacagatccatgatttactggctatgtgacctcaaaccactcgtcttaaatgacatttatttacagagacaacagaacatagtgattagagcatgagctttgaagtcggactgcctggtttatagactgatcctgctacttaagtaacttgcagaaacttacttatcctctctattacttatgtgatgtataaatgtaaatatacacagacatacatacatatatacatacatacacataagcatatataaatgtatgtttgagtatatttgagcttatataagtcaaataaatgtagtgtctaagagaattgaagttgtttcctcttttaaatttggaaagctggtgcaatgataattttgaaagttttagcatatacacatagtatttatgggtttgtccttgttgctgtttatagtggaaagtaatgtaagtggaggtcttaagtaactattgcctaacctggatttaagttttttttttaaatactctatcttgactctgtaagtttacataaatttagtctctttaagactttcttttatgactgtttatgtattaatttctggctttaacttactgggatttttatttacaatattttttaaatggcaggtatccctttaaaacagaaaaaaaaggctgagcgtggtggcacatgcctgtaatctaagcaccttgggaggctgaggcaggaagattgcttgcagccaggagctgagaccagccttggcaacatagcatctctacaaaaaaaaaaaaaaaaaaaaacagaaaaaaagttattttaaatttcaagtgctctacatttttttaattagcctaagaataaagattcttgaaaccacagcatacacagggaagtttatagcattaaatgcctatatgaaaaaagcagaaagattacaaattaacaacctaacattgcacctggaactagaaaatcaagaagaaatcaaacccaaagttagcagaacaaaagaaataacaaagatcagggctgtgtgagttggctcatgcttgtaatcctagcactttgggaggttgaggcaggcagattgcaggagcccaggagtttgagaccagcctgggcaacatggtgaaaccctgtccctacaaaaaaatacaaaaaattagccaggcatggtggcacatgtctgtagtcccagctactctggaggctgaggtgggaggatcactggagccccagaggttgaggctgcagtgagctgtgagctcttattgcaccactgcactctacccagggcaatagacagggactttgtctcaaaaaaataaaataaaataaggaactaaataaaataaagacccccctcccccccaaaaaaacccatgagaacaatacagaggatcaacaaaacaaaaaaaaggtggtttgttgaaaagataaacaaaattgataagcccctggactaaccaagaagagagaagaccaaatcaacaaaattagaaatgaaaaaggaaaaatcacaataataaccacaaaagtacaaaagatcattacagactattatgaacttccatatacttacaaactagaaaagctagaggaaatggatacatttctggaaagcaagaaggaatagaaatcctaaacaggccaataatgagtagtgatattgaatcagtgatttaaaaaatcttccaataagaaaaagccaggaccgaatggagtcatagccaaatcctaccaaacatataagggagaactaataccaatcctcctgaaattgtgccaaaaaatggaggaggagagaactctccctgactcattatacaaggccagatatatcaccctgaaaaccaaaaccagacaaggacacaacaaaaaaaaattacagaccaatacccctgatgaacatagatggaaaaatcttcaacaaaatactagcaaacacgatgtaatagtacatcagaagataatataccatgatcaagtgggtattataccatggatgcaagaatggttcaacatatgcaaattaataaatatgatacatcatacattacatattacataaacagaattaaagataaaaaccatatgatcatttcaatagatgcagaaaaagcatttgttaaaattcagcatcttttcatggtaaaaaaaaaaaccctcaataaagtaggaacataacttaaaataatagaaggaatacaacttaaaataataaaggtcatatatgataagcccgcagccagtatcatactgagtggggaaaaatgggaagcattacttttgagaactgaaccaagataagggtgcctgccttcaccatgcctattcaccatagtactggaagtcctagccaggacactcaggcaagaggaagaaataaaaggtatccaaattggaagagaggaagtcaaattgtcgtgtttgttgatgatgtgattctatatctagaaaacccaaaaggctccaccaaaacactgttagatttgagtaatgaattcagtaatattgcagtatacaaagtcaacatacaaaaattagtagtgttttggctgggtgcattggctcacatctgtaatcccagcactttgggagggcagggtgggtggatcatttgaggtcgggagcttgagaccagcttggccaacatggtgagacctcgtgtctactaaaaatacaaaaattagccagtcatagtggtgtgcacatctgtaatcccaactacttgggaggctgagacaggagaatcacttgaacctgggagggggagggatcttggctcactagccaagatcgcactacagcacccctgcaccccagcctggacaacagagtgaaactccgcctcaaaaaaaaaaagtcagtagtgtttctatacaccagtaatcatctagcagagaaccaaatcaagaagccagtcccatttacaatggctacaaaaaataaaataactaggaataaatttaacgaaggacgtgaaagatctttacaatgaaaactactaaacattgatgaaaaacttaaaaggaggggccatgtgtagtttcacatccctgtgatcccagcactttgggaggccaaggtgggaggatggcttgaggccaggaatttgaggccggcctgagcaacatagggaaatcccatctctacaaaaaatttacaaattagctgagtgtggtggcatgcacctgtagttctagctactcatgggtccgaggttggaggatcacctgagcccaggagcttgaggttatggtgagctatgatcaggccactgtactccagactgggtgaaagagcaagaccacgtctcaaaaaaataaaaataaaaaggatgcaagcgaatggaaagacatcccatgctcatggatcaggagaataaatattgttaaaatgaccatattgcctaaagcagtcttacagatttagcgctatccctatcaaaataccaatgacatttttcacagaaaaacaatcctaaaatttgtatagaaacaacagagccagaatagctaaagcaatcctaagcaaaaagaacaaaacttggaggaatcacacttcaaagctggaggagtcccttcttcaaattatgctacaaagctacagtaagcaaaacagcatgatatttgtataagaatagatccatggaaccacatagagaacccagaagtaaagccacatatttatagccatctggtctttgacaaagttgacaagaacacacactggggaaaggatacccttttcaataagtggtcctggaaaatttggatttccatatgctgaacccctaccgaacccctgtctctcaccacatacaaaaatcaacaaaaatcaacaaaaggtggattaaagacttacatgtaagacctgaaactgtaaaaatgctagaagaaaacctaggaaaactcttctggatattgctcaagggaaataattcatgactaagacctcaaaagcacagacaacaaaaacaaaaccagacaaatggaactatgttaatctaattagcttctgtacagcaaaagaaataatcaacagagtgaagagacaacctgcagaatcagagaaaatatttgcaaactgtgtcttataggggagcaatatgcagaatttacaaggaacacaattcaacaacaaaaaacaccaaataatcccattaaaaagtagtcaaagaacatgaatagacatttcattttttttctaaagaagacatataaatggccaacaggcatttgaaaaaaatgctcaacattgctaatcatcagagaaatgcaaattaaaaccataactagatgtcatttcacaccagtcagagtggctattattaaaaagacaaaaagtaacagatgttggtaaggatgtggagaaacggaaacacttatactgttgatgggaatgtaaattagcatagcttctatgggaaacagtgggagatttctcagagaactaaaaatagagctaccatttgattcagcaatcccactactgggtagctacaaaaaggaaaataaatcattatatcaaaaagataactgcacctctgtgtttatcgcagcactgttcacaatagcaaagataaggaatcacctttaagtgtccatcaacagatgattggataaagaaaatgtgatttttatatatatacatacatacatatatatatatacacgtgtgtatatatatacacgtatatatacacgtatatatatacatatacacacatatatacatatatatacacacacatatatatatacacatatatatacacacacacacacatatatatatctatctccacacaatggaatactattcagccataaaaaagaatgaaatcctgtcttttgtagcaacatggatggaactggaagccattatcttaagtgaaacaagcagacacagacaaatactgcatgttctcacttttaagtgggagctaaataatgtgtacacatggacatgagtgtggaatgatagtgaagactcaaacataggaaggagggaggggatggatggtgagaaattacttaatgggtagaatacacattatttggtgatagatacactaaaagccaagacttcaccactacatgtaaaaaagttacacttgtaccccataaatttatacaaataataaaagattccttaaaccacagcatacatagttacgtttactgtttcaagtgcaaatactagtcataattttagtctcacttcagacacttgaaatatgcacgtttgtaaagtggtttctagagtgttactttatgttacttgctttggtggcaaagttggcagtcagacctaggttgggtgttccaaatggaagactccatgttaggtaaaaggtaaattaccactgatggttatattataggaatctttgttacgtagtgtttagaataactcagtttttcttactgtttcacactacaacagtcaacacagaaggtttctgtgacactaaaataagtggagatttctccccaccagcaagcaggcagtggacatcagttgggtgtcctccaatccaattcggatgctctacctggagataaggtcagatcccacaggtcgaaggctcaattccacaaaacagccctaccattcccactggtcacaagtccggccctccagaacttctgaccaactgttagggctcccacagttaccccttctttgggatggattaatttgatagagtggctcacagatctcaggaaatacttatctttactgatttattacaaaggatattttaaagaatatgaataaacaggcaggtaaaaatatatataaggcaaggtctcaaagggtcctgagctgtctccatgcagttggtgtggctgggttcctaacatgtggatgaggtggtgttcaccttcctgtaagcctccagctctcaggaagctttctgaaccatgtccttttgggccttttatggagacttcattacacaggcatgattgattaaatgattaaaccattggcccttggtgatcaactaccattcctcccattcctggagtttggagagtgggtctgaaagtcccagccctctaatcctaccttggtctttctggtgaccagcccccatcctgaggctacctaggggctgccagccattagtcagtcattaacatataaaaagacaccattttggagatttcaaagattttaggagttgcatgcaagtaaatgcgaatgaagaccaaatatatatttcacaatatcacatgtagccactcacattaaaaaaaaaacacacctcaggagtttccaagttacagacagaaagataccacgattatcatatcacttacagcaaaatgacttctcaactagtttaggagctattgttggctgttgattcacctcagcactgcttggtatctgcaccctacctctctttagaggctgccttgtcaactgaaaaatgcacctgacttcgagcaagactctttccttaggttctggatctgtttgagccccatggcactgagctggaatctgagggtcttgttccaaggatgtgatgatgtgggagaatgttctttgaaagagcagaaatccagtctgcatggaaacagcctgtagagtagaagtttccagtgataagtgttcactgttctaaggaggtacaccacagctacctgaattttcccaaaatgagtgcttctgtgcgttacaactggcctttgtacttgactgtgatgactttgttttttcttttcaagttctagatgaacatgggaaaaatgttacaatctgtgtgcctgactttggtcaagacctgtacagagatgaaaacttggtgactatactggggaccagcctcttaatcggatgtatcttgtattcatggtaagtcttgggagttactcaaggtcacttttgcagactttaaaattacaggaaaagaattgaaataactttcagtagctgtgaggctgcaaccatttgaggaggggggaaaataaccacaagtaaaaaggcgaagagcgtgaactcatatttgaacttcgttcaccttacttgtttttatttggggtaaataaagcaaatatatggtatgtaaatatttgaacttcgtttaccttacttgtttttatttggggtaaataaagcaaatatatggcatgttgcagcaccgttgcctaaccccctttaaaagatggtcgaatagtagtttgctatacctttactggagggcaggggagcacaaagtgaagaagagatagaatgtgccagcatgtcctggcagctttctgatccaaaggaaatagctttcttctgctgttgatggaaagagtacagagtgctgtgtgcgtggtcattctgtgcagacaagaaatgttcattctcttttctgctaaacccacaatgctgttgttcactcggcaaagcagctcctccaaaagtagatgtgatatatgagtgggctgtgtttcagatgcttgtggtgggggttattccacctttaaaaggtttaaaaggttgctagagggagaaaagtcaaggatagaaatggctagttaatctggatatatatttcgctgataactaagcttccctttaacagtaaccttttcacatttagcctttacttctgtgtttacattttgttaatgttcagtataaaaattcaattccattgaattcagccataggcacattgtaaacttcctttttgctgaaacgaaatactcctggtggtgatagcttgtataaatataatgtctttctgagcatgttggcattttctcttacctcctttaacaacttctactattagaaagggaccaacggggacacagaccttttagagtctatttgctcagggtcacacatcaagcaataaaatgcttgttgttttacaggtaggtgttaagatgatggtgacatacattcattcttggcctgtgtgacatagtgacagagtctccttgttgttgcagaatggactgtggtaacttctttctggcctttcaattttattaattcctaagttgttcgcagagtacctacaatataggaagcaggctgcgtggtgcagtggctcacgcctataatcccagcactttgggaggctgaggcaggaggatcacttgaacccaggaatttgagaccagcctagacaacatagcaagaccctgtttctacgaaaaaaaaaaaaaatcaggcgtgatggcacgtgcctgtggtcccagctacttgggaggctgagatgggaggatcacttgaacccaggtgtctaaggctgcagtgagctaggggtgtctccactccagcctaagcaaccgagtgagaccctgtcttttgaaaaaccaaccatgaagatatttgatagaataaaatcatgtttttgtgggttactgggtacccaatgaaaaaaaatatttgcccttggccaggcgcggtggctcacgcttgtaatcccagcactttgggaggcaaaggtgggtggatcacctgaggttaggagtttgagaccagcctggccaacatggtgaaaccccatatctactaaaaatacaaaaattagcggggtgtggtggtatgcacctgtaatcccacctactccggaggctgaggctggagaattgcttgaacccaggagggggaggttgcagtgagctgagatcacgccattgcactccagcctgggtaacgagagaaactgtatttcaaaaaaaaaaaaaaaaaagaaaaaaaaaaccctttaaataaagtagagtttggatttgccataaacccttcaatggaaaagatggcaaaaattcttcttagcctgctgcataatggttaccacacatagggcatttcacaacatggaattttcaccctatcatattttctcactatttctagcaggtgtaaagaattcttctgagttggcccttgagtgagagatgataaataaaatgttgtttcttacaggactgaggtaccatagtggagattggtaagggctggtctgatattcccaaaagatgtcaattttcaaagttgatagctactaaaaaaaaaatctgtctaaataccagcaacaaacattgttattgaattcgtaaaccacaaaactgcagtgtatggtgggatgagaacatataaaactgcagcccctacaaagtggagatgaggatgaccactctgctctgtagcgtacttctgtaatctgtaggcaagagcacactctgtgggctgggccccctaggagttagttcccccggggtccatgtgattgatgtttgctgtaattactcactgcagctcttcgaggggtcagctttaagaacactaaattcaggctttgtagggcctgggaataaaaggaatgctgtaggggtgggagttagcccaactagggttttttcagatctggacttctgaagagtttgttttccttcctgactcagaggaatgaaaggttggaggatgttacaaaaaggccacatcgtccgtgtgggaactgtcatttgaacataattgcaggaatatctaggattcttgatagaaattgcaggaagccagagactatagatagtatgtaagttaaaaggagaagaaggccaagattgcctggggtccactcttgtaaagttgtagaagactggaaatctccctagctcctctctttcccttcgccctccagagcccccaagccccacccccaaatacttgtttcctttggggtatctccatcctgactcttgcagctggggtactctctaggagtatgttttaatgtttgtagcctcagctcagaagaagggctcaacccaaacctactccctgcctttctgcctggggctgccttctctccagagcctccttccattgcacccaggaatcattgctgtgaaagaacatcatagcttggaccccatgtaagccctaaccttggtccacttgtgggagttctctgatagctctttttatttttttagataaaaaaaaatgttttaaggcaagttctcactatgttacccaggctgggtaaactgtccttaagggatcctcctgcctcagcctcccaagtagctgggactacaggcataaccatgacacctggcattctgatggttttctctctctctctctccttctttcttcctttttttttttgagacggagttttgctctttcacccaggctggagtgcaatggcaggatctcagctcactgcaacctccgcctcccaggttcaagcgattctcctgcctcagcctcctgaggagctgggattataggcgcgtgccaccacgccaccatgcccggctaatttttgtatttttagtagagacggggtttcaccatgttggtcaggctggtctcgaactcccaacctcaggtgatccgcccgccttggcctcccaaagtgctgggattacaggcgtgagccgccatggccagccctgatggctctttctataggcgcatccctccacacccctttagtctggagctttgctgtgacaaatcctggcctccacgaactatttcttaattcttcccttggtctctggattttgattgaaattgttattctgttgccttcaacttcagactgtcagcctggacaggatcccagagttgatcaggtcagtctcctcattgtacatgtaaggaagcatggagcctatacctgtagctctctactcccaacttcgggcaacctttccttgaggctccttttcgggagtatttagggacactggtggatagtctctccccggctctttttcttcagatggcttggtgtaatgtcccctgagggagaaagataaactggatgacttgcgtaattatattattacaaggcatttgcactataaagtttcctgaccattccacttttatctgtgtttaagagaaaaaataattcttaatattgaaccatctttgaaaatatccttttaaatataaaactggaaaaagtaagaatctttattcaatgtcaaacaacttcctagtttgaagtggggaggttcgcaggttggtgtgatagcattgccgaggggattgttctacattaaaaaaagttgggaaatcaaggaagaatatttatttttttggtacattctgggcctttatgggggggtggggaaatttgtatcttccccaccaggagagggggagatttgtgtcttcattttgggaattctgctctggcctgcctgccagctagaaatctccaagttagaaatcttccaccccgtggccaggcgtgatggctcacgcctgtaatcccagcaccttgggagggcaaggcgggtggatcgtctgaggtcaggagttcaagaccagcctgaccaaaatggagaaaccccatctgtactaaaaatacaaaattagccgggcatggtggtgcatgcctgtaaccccagctactcgggaggctgagacaggagaatcgtttgaacccagaagacagaggttgtggtgagccgacatcgagccattgcactacagcctgggcaaaaagagtgaaactccatctccagaaaaaaaaaggaaagaaagaaaaagaaatcttccaccccatgccccaggttcacagagagctcaggtctcctttgggttctatagcacaggggagcatgactgatcttcatcattgcacaaaggctgggaatagtcacgggatctgtcaagggcctaccctgtacgtttgtcagggaggcggaatgtgtgatctccaggaaagtttggacgtgttatttagagattttctgtggtctagtggactttggccagcttcaaaagcatctgcagtgccagtgttgaggggcacctgcattgtgcattcttctgccagtgtgaaggggttctgggcactgtagtggttctgcagggaaacaggacacggcttttcttttttttttttttggctgtcaccatgactgcagagcactgctggcattttggctgggttggggtggggtggcagcaggcagagacagtaaacacgctgtggtgtgttaggcattctccgtacaataaagcattgtcttaacccaatgctgtaagtctcctcctatccccacgggaaatactgggttaaagtcacacctatcttagcacaggaagaggtaaggcttataggtaacccaggaattgttttatagcaatttgtgctgtgctcaccaaacagtggtctttgtaatagcctgaatgcagataataagaatttcctaggctttaagagcttataaaaaaaaaaccttttcttgataattccaagaagagtgttgtatggagaaaggctacaactgaataaagatctttttttttttcctgcaacatctgcctcccgggttcaagcaattctcttgcctcagtctcccgagtagctgggattacaggcgccccccaccatgcccggctaatttttatatttttagtagagacagggtctcaccatgttggctaggctggtctcgaattcctgacctcaggtgatctgcccgcttcagcctcccaaagtgttgggattacagatgtgagccaccacgcccggcaactgaataaagatcttaatgtagggtaacatctacctgtagaagtcacatggcattaatgatgctctgaatgtagttctttttaaaagtaaaatcaaaagcttccccatgttaggcctctttgatggtgaagtggcaaaggagcccaaatcaagagctttgttttccggaaattacgttaacccaaagaatttatagagtagaatatttactctgaggctttgtttttctttttgagacagagtctcactttctcgcccaggctagagtacagtagcgtgatctcagctcactgcaacctctgcctcctgagtgtcaagcaattttcctgcctcagccccctgagcagctgggattacagctgccggccaccacacctggctaatttttgtatttttactatagatggggttttgccatgttggccaggctggtctggaactcctgacctcaagggatccacccgccttggcctcccaaagtgctgggattacaggcgtgaaccactgcacctggcctattctgagcctcataaataatgaatgttaacctttcaaatgaaaatttcagatagtgatctcttcttaaaattaaaaacttatcttttcccctgtgaaaactatacactgtactaaatcaaaacttgtatgcacaggatatgtgccactcttttttttttttttttgagacagggtccttctgtcactcaggctgaagtgcactggtgtgatcatgctcactacaacctcccaggctcaatttattctcctgcttcagcctccccagtagctgggactgcagacatgtgccaccacacctggctaatttttgtattttttgtagcgacagggttttgccaagttgtccaagctggtctcgaactcctgggctcaagcgatctacctgccacagcctcccaaagtgctgagattacaggtgtgagccaccacacccagccgggccactcttaaatgtcggattaggtgttgtgttccttgggtgcgcagtcattgggagatgtttctgtcttcctctgaccaggcacacagtcaggaggtggagtggcatgggcctggattagcatgcatcagttcaaagcagaaatgaaagtgatgctgttgtacttgagtggaccacaaaagaaacagtgaacttggatctcagtgggcttctgtatgagaaagctttttattgtttatctctgtctcattgatctctctccttgggaaagaggatgagactgcgcagtgttgcctcatggggttcgctggattgagatgagtgtgtgtccccacctttccatgagcagaccagcttcttgagcaccaacacgcccgcccatgtcaggccagcacagaagctacatgacggcaggattgttgcctgtgtcactgagtccccagtgcttagaatcgggcctgacacatagtggccttcagtaaatatttgctaaatcaatctgtaaagttagctggaaccctaagtattgtatatatttgcttaaaatgttctgtgtttttgttttgtagagatgaggtcttgctatgttgctcaggctcttctcaaactcctggcctcaagtgatccttccaccccttcctctcagagtattacaggcatgagccaccacttctggcctgtttttgttttcaggaaaaataaattattttgccccatgcaaggcaatttgtctaacattttacctttctaggtctcagggaagtggcagaattttttattacctcgactgctactcttccaaacagcaagccttgttctactataggctatcacagtaaataactgcgacttttgctttcatgcccttgctttctgttgccatctctgggctcgttgcttttgattccctctaagcaagactagtcaaagggagggaaagataaactgaaattagaaaactattgtagcatttgagggaggagaggcaaaaagcaatactgaaaaccaagatatcttacttctctacctacaaccttctttgcataaaatgatctaatgcaatccatgtaaaatgatatcaactatagaataagccagccaattttggaataaggagaggtattaaaatagattgctttgatttaagtctcctgaacggtaggttacattgaggctctcgtcggagcactggccagccggctttccccttcattccatgtgttgtaatgtgttaatatgcccagctgacgtttttgtctgtttcttagtttgacatcaacaacaagatcgagttctgacgctctgcaggggcgatacgcagctcctgaattggaggtaagttcatttccttttcctgtcctgcttcatctcagaagatccatttctcaggagggccttttgtgtttgtgtctttatcagtctgcattccgtgatcctgtttttctgctgaggaaagatttttgtatagaaaaataaatgctggccgggtgtggtggctcacgcctgtaatcccagcactttgggagtccgaggcgggtggatcacctgaggtcaggagttcaagaccagcctggccaacatggtgaaaccccatctctactaaaaatacaaaaattagccaggcatggttgctcacacctgtagtcccagctacttgggaggctgagacgcgagaatcacttgaaccctggtggcagaggttgcagtgagccaaggtcataccactgcactccagcctgggcaatagagtgacactttgactcaaaaaaataaaataaaaaagaaaaataaatgctttcctgctttcctttgtatgctatgggattaaaatgaatcagtccattcttgattttctgtaagaaagctggcctcttgggtggcatcctgccgctcacccccaaccagaggctcaggtaaccttgtcaggctgcaccctgcgctcttcccttgccgtagtggagtcttggtgggttttattttaacttctgatccacccacctgtttcatacttgtctgtgccctccatacacagcgtggctgtgagattatgtaatagctgtttggaagaaaggagagaggaaagggaaggaaccatatctgctctgcctgacgctgttgaacgttgtagatacattaactcatttgtcagttccatcaggtgggcgttttgtcaggtagagtgttatggacaatacatacattggttgcctgcacatccaaagcctcaaggtgttcagcagatgcctatcagtcaacaaaatgtctgttattttcttaattgtgcaagagtctttctggggctctcatctaccaacaacagcaaggtctaatcagatggaggcagccagggaaggactcagctgtgacccaagaacgaaaagaaccaggggttccaaagatggctaagacttacagcacttgctatgtcccaggcactgttctaagttcttcctatgtgatttcacttaatcctcataaaaacccagtgacgtgctattacctccattttacagaggggaaaaccagaagagttaagtcatttaagcctcacaggttttgatttgccagaatataaaccgtgtactctggccccaggatctgtgttcttgaccactgctgcccaggagctgagctgctgaaccctggtccttgctgctgactgcgggcagctggtttctggccactgcctgcgttttaatagctttccgtggatggaaaagccctggtgtctgtctagatatgggcattttactctgcagctgggtgtctggggttggtctctcttgcacctgacctggatatagtgagccattatgaagggctgtcaatctgccaacatcattcaccaactctttctgttgcctaaaggagaaaattgtgctgagtttgaataggttactgcctattatagagaagagaatggtctgtagaaggggtgtttattctcaccattgactaggtgaccacctgctgaggttgcatggttatggtttcaatgtccctattgtgtacagagttcaagctcaaagaacagcaagtctccaagttagatttaagagaggatgtttttcttctcagtccaagggaaaatgtccgagtgtttccttctgaactggagagcatgcgggatggaagttggtttgctctcctgcgtcacatttcacaggatacaactttgaaagtgagagttcatagtttcttatggtaacttgaacttcaaaataactaagacctcagcataccgtgtcttgggcccactgaatgaattagtggtttttagaccatggcacttaatccaagctcctgttaaggctaatacctccgttaaaggtttccttgccaagcagggaaacaagggcttggccttgatacacaaatgagatgaaggctcaagctctcatattcttatccttggctctctgttctttgtagttgaaatatcttcagccacaaagtgctaagggccctgcacttcccaggctgtcttagtactctgtttaccagagtccttctgaaatcacatactttttttctttgcttttttttttttgagacagggcctcactctgtcacccaggctggagtgcagtggtgggatcacagcttactgcagcatcaaactcatgggcttaagcagtcttcctccctcagtctcccaaatagctgggactatacataacctgattttttaaaattaagtttattgttttgagtaggtaagaaataatggccgggtgcagtggctcacggctgtaatcccagcactttgggaggccgaggtgggtggatcacctgaggcctggagttcgagaccagcctgaccaacatggaaaaaccccgtctctactaaaaatacaaaattagccaggcatggtggcacatgcctgtaatcccagctacttgggaggctgaggcaggataattgcttgaacccaggaggcagaggttgcagtgagccgagatcgtgccattgcactccagcctgggcaataagagcaaatctccatctcaaaaaaaaaaaaaaaaaagaataaaaaatacgcaaggtaccagagatgcttcaaaggcaagcattccctccatccctgcccacggcccgtgcaacagcttgattttgataggaaacatgggtaggctgcttccagattccttcactttactatttcagatcctaccagcttcgccaagctcctagataccacgtgttacctattgtgaatcatggatcttggtgtccccatcctgcattcgtctgttccagctctgtcactaagctagtttggtgactttggccagttaacctgcctgacctcagtttcctcagctgtacacaggataataataagcccaatgcaaaggtcaaagagggtttaatgaaataacattgaaagcaaagcacgagaagggagcaccaggagagtggggctcttgtcacgttcattgggtttcacattgagttctccagaagcagaggctgaggcagtttgttgcgtgggatatttattaaaagtcagcacatgtgggagggagaaggggaaggggaggcaaaattgggcagagggtgaagttgaaggacagtgcagctggacaaagcctccctaaccctaggagccataaaggcacggcctttacccctgccatgatcagccattccatggcagttacccaggaagggtaaaggagctcctgtctcgaggctctgctctcagcattcatggtagcaggagcgagcaccaagtccacggatgaggatctctgtggcacatctccctccatggggtttcctgtcaccaacacccagcacacctgggaaagaacagtccacatcttttgaagggcctgggaggtggttcaaataagggttactgttgccttgctgaggtggactagaaatagaacacaagccgcctgactgttgcttttgctttcacagatagctcgctgttgtttttgcttcagtcctggtggagagggtaagcagagcgcttttattctttgcacctgtgtggcactgcagacctataactctaatctgtagtcatttgggattcagacacaaataacttgaatagtaaggagaaagttttattctaaagctgacttactacttatacacttttcacattcttcctgaaggatagctgagttttgtttgtgttggtattctggtagagagaatcagtccaaattttggtttaaatgtaagttaaattatacagtgagatttagagaatcagagagcacattttttaaaaaggagtgatttggaaaataccaagaggtcctgacaccttattttggggccatttcattccttcaccttactttccaaggtggattggaggattccaagggcttgagaactaactcttgttttactctcactttctgctgagcttatagtaagttttacgtctttaagggtttttaagggttctctttctgttaaaataaatgtggcagggcaggcacggtggcttatgcctgtaatcccagcacttcgggaggctgaggtgggtggatcacctgaggtcaggagttcgagaccagcctggccaacatggcaaaaccctgtctctactaaaaaacaatacaaaattagccgggcgtggtggcgtgtgcctgtaatcccagctacttgggaggctgaggcaggagaatcgcttgaacctgggaggtggaggttgcagtgacccaagatcatgccactgtactccagccggggcaaaaagagtgaaactccatctcaaaaaataaataaataaaaataaatgtggcattaggtaactcttcctgttacggaagttgctagggtggagtgggggttttgtgcttagggcacagattgaagttgccagagggtacagatggctttctggcatcttttctactgacagccctgtagaattagcgagcgtgactttgctgaatggtaaacacacacattcactcattgagcctgggctccctctgtgcttcacagacactgaagagcagcagccggggaaggagggaccacgggtcatttatgacgagaagaaaggcaccgtctacatctactcctacttccacttcgtgttcttcctagcttccctgtatgtgatgatgaccgtcaccaactggttcaagtgagtggcccatttgcttaggtatttttgaagcaaagccttaaagttaagagttaagtactgttcgtgtttgtttgtttgagaaggagtctcactctgttgcccaggctggagtgcagtggcacgatcctggctcactgcaacctctgcttcccaggttcaagcgattcttgtgcctcagcctcccgagtagctgggattacatgcatgtaccaccatgcctagctaatttttatatttttagttgagacggggttttgccatgttggccaggctggtcttgaactcctgacctcaagtgatccacctgccttggcctctcaaagtgctgggattacaagcgagttctgagttttaacagtggatgggtatgttttaaccctggaaactggtgatgcttatggcaactttaagaaaatggaaagttagctctatatggacagtctggaaaacatggtaatgaaggaaaaataggaactcctaagcattcatctgcctttcagaaagagaaaatatcccttttttttctacttcaaattttgtgtatctttttccccatttttcttcattttcattacaaaaattggaaacatctttttttaaaatacaaactaaatgtggaattatgaaaagtaacaatgtggtacccccccgcctctacttcccccacacagataaccactgctaggatgtgtatccttctccttttctgtgcatttataaacctctgtagtttttttttgtttttagttggagtcttgctttgtcacccaggctggagtgcagtggcgcaatctcggctcactgcaacctccgcccctgggttcaagtgattctcctgcctcagccttttgagtagctgggattacaggtgctgccaccacactggctaatttttttttttattatttttagtagagacggagtttcaccatattggctaggctggtctcgaactcctgaccttgtgatccacctgcctcagcctcccaaagtgctgagattataggcatgatccaccatgtccagctaattttttttttaacataaatgtcattatacatgttttcccctggaggcttttttttttttaacttggcagtacatgattgacctggccttccctggcactacacagaggttcatactttttctacaggtccacagctttggttgtatcataatttttttgaccactaagttaagcttagacatgtaggctcattgtgcttccttttatcattcattcaacagatgtgcaagtggctcctatgtgccacacggttctatgaggcaggatttatagtccagcaggagagacagactatgacgcaagtcaaatatggtgtgttagatggtgatgagtattggggagaaaaataaaattaggagagggaattggggtaggggtggtgggagtggtggtttcaagcacagtgattggagagattcttcctgaaggaggagaggagaagggagctttaatgcttcccagtgatgctttgggaactcctgggaatttttggcttggaaagcttaagaaaagatggagaaggctataattaaaaaggcagataataacaaatgtcgaggaagtggagaaattggaaccctcttacattgctggtttgaatgtgaaatctgctttggaaaagagtttggcatctccttaaacaattaaacattgagttacaatgtaatccagctcttccactactcctgagcgtatacctaagacaaaaagaaaactaggtccacaaaacttacacagcggtgttcatacaagcatcattggtgataatcaaaaaggggaaacatcccaaatgaccatcagctggtgactgcctaaacaaaatgtgctctatccatacaataagatactatttagcagtaaaaaggaatgaaggactgacacatgctgccgcgtggctgagccttggaaattgtatgccaggcaaaaaagccacacacaagagaccatgtgattccttttatatcaactgtccagaataggcaaattcatagaggcagaaagtagattggtgaatgcggggggtgggctgagggggccatggggaaggggagagcacctaaggggtgcatgatttcttttgggggtgatgagaatgtttggaaatgggtagtgttgatggtagcacaagtctgtgtatgaatacattgaaagccgttgaattatacattataaatggatgtgaattagtgaattgtatctcaatatattcctgctttgaccgcggctaggtgtcttgtttccacagctacgaaagtgccaacatcgagagcttcttcagcgggagctggtccatcttctgggtcaagatggcctcctgctggatatgcgtgctgttgtacctgtgtacgctggtcgctcccctctgctgccccacccgggagttctctgtgtgatgatatcggcggtcccctgggctttgtgggcctacagcctggaaagtgccatcttttgaacagtgtccccggggcagggactggcgccctgtgcctgagtgggtctgaaaaagctttgagagagaaaaaaaaaaatctcctgattagctttttacttttgaaattcaaaaagaaactaccagtttgtcccaaaggaattgaaattttcaaccaaactgatcatggttgaaatatcttacccctaggaactggataccagttatgttgacttccttctgcatgtttttgccaaaacagaatttggggcacagcatcttttcacagggataaaaatatcttgtggggccagtcattctcatcctcggaatagaaaaacatgccaaaatcttgagtccccagcgcctaacagaatccagacccctctcactcacttccgcctcttagagccttgtccccagggggctttgaggacaggactcagcctgcagggcccctggtatttatagggtccaagaggaggcacctgcttttcaactgcaccctcagtgctgcctcttcacggcccctaaacgtttccctttgaggttgtgatgctgggaatcacagacttcactctctgcctgcacccttccccgaggtctcatcttttctgggtcccacatctttgtaataatgtgaaaaagcacaatttgtctgatcaccccccaggtggttccccaccttattatcactacctgatccgagttactgcaataagtacggcgcttatttatggtgttattcacatgattatagaacaagattcatgttttctctgcctaagcaatggagggctatcattcttacttgtttgtgctgttgataatgataatacttttaggaccttaactgaaaagctgcttcgtgttgaagcctgctgcatgcactgctctttcagttgttgaggtcagcccctcagttttttctccaccttgaggcctttgaaactgtaaaagcggaagtcgttttgtgttctggatctgtaacgtgaccataccgttcaggttcatgctggcatccttggagtaggtttgctaatgtgagaatttctgaggtgaggatctcagacacactgaccagaagaagcttgttaggcaatgtgtggaagtggccgaatatacttaaaaagaggtgcgcagaggcaggcggatcacttgaggtcaggagttgcaagaccagcctggctaacatggtgaaaccctgtctctattaaaaatagaaaaattagccgggcatggtagcgtgtgcctgtaatgccagctactcggaggctgaggcatgagaatcacttgaacccgggaggcggaggttgcagtgagccgagatcacgctgcacaggaatttccaaaatacgtacttgcaaagtaatacagaaacgtgactttcggcagctacccaagatgatgcctattttcagtgttgatgtattcaggcagggaaaaggtttacttggtggaaactcctgttagaatttcattcggggtggaaagaatcttctcgagctctctgtaagtgaggatctaagaataaaaggctcagcctagtcatttttttctgtgccctactgtatgagttgggcagaattgagtgccacctaagctgggcttctgtgtgccaaaatgctggtgggtgaaattagtgaaattctttctattcattcctttgcccttctcccaagaaaacccatggggaaacaaattacaggggatgaattcctttagaactttccctacttagagtgtttgagattcagtttcaaaaggcactccatctgtgtgtgtggtttagagagccttgttttgtaaattccattaaatttccttttttagggcaggagctctgtactcagcagttaaaagattcatctggagtcgcaaaatgaaaagccgtgttctaacctgaggaatcagttaggggacaggagttccgtgggccaggaatgggctcagggagtggggctgcgtgtcacacacagtagctgtgttgcagtggcctagggccttgggggttgtctttaggaaacaccctgaggggaagcaggtaaagagcctgggcagtattgtgactagtttcattgttttcctcctgctgaggtctagcagagcccttgctttgtcctctcggctgggtctggctgccagctggtgtgatttgagaaactgaccttacgcgcagtcaaggtccagctgacaaggccttgtattccttggctggccgtgattggccctttcctctgcagaaagcagcttagggaagcccaagcaagggagtgtggccggtagaaggccctcgtcgcttccttctggagccagcccagccacacaacgttttccagatgcgtgagtctggtttgtgacatcccgttcccttctgccggttggtctgatgcaagaggaagagttacagttgctctgaattttattctcagctgaaaatgttagcacgtgtatctggatgaacaaaacagatgtggatgtatctgaggattgagggactatcaatgcagagttaatgttaatggttattaattgtgatatacaatactcaggtgaggagtcaacattcctggatttaaagaatctacagttttgtgcaattgtgatttgagaaactggaaacattgtgccaatggctttgagttcctataacaacggtgttaatttgattaactcactgatatcttttaaaaataatagacatttgcttcctacacctttttgtacatgacctaaagagtatattcccagaagctgctggtcagacacatttagggatgacagttgaagaggacttttttaaagctgcatgtgaatatttcctctgtgtgatttgtctgatgtagaaaagttttcccctcatttttatgagtaaaaacactaagtgggtggcaggggggtgggggttcttatgggagtgtcataccgcggcatgttacctgactggagactagagactatttccattataagccttcagaaacccaaccacgtctttactgtgtctagctttttaaatactgattggttagttttatttttgcccacagtttcttgggcaaaaaggttcttcattttgtctgaaaaagaaattatttgccagaggtatttggagcctctttgaaggggagatagagtgggggtgggttgtggggagggtggagttattggggttttggggttctgtttccatacaacattgtttatttccgattcctcagaagatcctttattatgaataacctcagtgtaatgttaatttcctgtccccatgtcaaaattgtcaccctaagcctttttttttttttttttttttttttttggagacgggctcactctgtcagccacgctggagtgcagtgacatgatcttgactcatggcaggcttgacctcctgggctcaaggaccacctcccaagtagctgagaccacaggtttgccccatcacacctggccgatttttatttttttgtagagatggggttgtccaggctggtctcaaactcctgagctcaagcaatgtgcccgccttggcttcccaaagtgctgggattataggcgtaaaccactgcacgcagcctaccctctgcctttttaagatgatgtatttatttaatttttgccatcattggtgcttcaccttcctgcgaaggaaattccagagcctgtatttaagctacctaggcttttacactccctttattgcctttccaaatagtatctcatttggtgtactctagtgtcctatacctcttggaaacgaaagagggcccaacctacaactaagaagggacaaaccttgaactaagtaagaccttacacacccagaaagaacactgggccctccttcttcagggacaatgcagtagccacttggcttgtggaatttactgaaggctatttcctgtaacttgctagttaacttagttttgtatttcaggcagaggtgcgctctgtaatgttgggcctttgacttcacagtactggagagctgttcacacagatgtttagacctttctctctctctctctctctctctctctcttttcttctttctcaacaactctttcacagaggcagtcattttgaaaggttgaaatatttggcctttaccaaagagctttttttttccttaagcaaaatcctttcagaaagaaacaaatggggaagggcagattaagaatgcatatgtcccaatccacttctataggagtttaatcatattcacatgagtaaaatgatggaagaactctttaaggtaatcctttgggataaaggatcctgggaagttctctcaggtaaagaaagcttacagcagatttgtaatatatgtctggagagctatttataagaaatttaagaggattgttttgttttcctttattaaagatttaagcctttttactttgcaaaaagaaaactacaaaagttttatagatataactttgctaattttttaaacttttctgaaacgattagctgtagccaaattatgtggttacgttttgctacattagaatttgaaaatgcaatatgtgtggtaaatctactgtttgaaatttataatggtctctgatatgattcgaattttggtaacttttgaaagttattttccccctttagtcatggatttctatttgttttttaatgttaatttttctagaaagcatctgaattgactaggcttttcctatataaaaaactcaaaacttgttaactctgtactttaataaaatttaaaattaaaactgtgttgtttttttctcttctgctagatacatatataattaaagtactcaagttagttgttttgcagagatgttgccttcagatgttaatcaggtctctcaagtttcatggagtctatgctgatcctttaattgacaaataaaagatatatatctgtggtgtgcaacatgatgttttgaaatatgtatatattcaggaatagccaaatcatgctaattagcatatgcattacctcatgtttttgtgctgagaacatttaaaatctactcacagtaattttttttttctgtttttttggagacagagtcttgctctgtcacccaggctggggtacagtggcgcgatctcggctcactgcaaccaccgcctcccaggctcaagcgattctcttgcctcaacctcccgagtagctgggattacaggcatgtgctatcatgcccaggtaatttttgtatttttagtagagatggggttttgccatgttggccaggctggtcttgaactcctgactacaggtgatctgcccacctcagcctcccaaagtgctgggattacagacgtgagccaccgtgcccggcctactctcagaatttttaaggtacagtgccaggttcctaactctagtcaccgtgttacacagtagatctcctgaacttctggctgatattttgtgttctttgaccaacatcaccctgaactcccccctcgcccagtcccccacctccagcccctagtaaccacctttacactctgcatctcttaagtcaaacttaggaagtttgactttttaagatttcatggatcagtaagatcatgaagcatttgtctttttgtgcctggcttattttacttaaccgtgtcttctaggttcctccaaattgttgcatattgcaggagttccttctttttgaggctgaattttttattgtgtatatataccacttttcctttttttgagacagagtctcactctgtcacccaggctggagtacagtgacatcatggcttattttggccttgacttcttggactcaagcaatcctcctgcctcagcctcccgagcagctgggaccacaggctacaacaccaagcctggctaatttttgtattttttatacagatagggtctcactatgttgcacgggttggtcttaaactcccgacctcaagcaatcatcctgcctcagcctcccaaagtgctgggattacagacgtgagccactgcgcccagctcacttttttttttttttgagttagagtcttgcttggtcgcccaagctggagtgcagtggcatgatctcggctcactgcaacctctgcctcccaggttcaaggcaattttcctgcctcagcctcccgagtagcagctgggactacaggtggccgccaccacacctggctaatttttgtatttttagtagagacggggtttcaccatgttggccaggctggtctcgaactcctgacctcatgatccgcctgtcttggcctcccaaagtgctgggattacaggtgtgagccactgtgcctggccacatattctttatattcatttgtggacactcgggctgattctatatcttggccattatgaataatgctacagtgaacataggggtatggatatctctttgacatactgatgtcattccctttgggtatatacccattagtgggattgctggatcatatggtatttctactttcaggtttttaggtgttttttttgtttgtttttttttttttttttttttgagacagggtctcagtctgccaccccagctggagtgcagtggcacgatgtcagctcactgcaacctctgtcagcctccaggttcaggtgattctcccacctcagcctcatgagtagctggggttacaggcgcatgtcacaatgcctggctaatttttgtattttttggggtagagatggtttcgccatgttggccaggctcgtctggaactcctgacctcaagtgatctgcctacctcggcctcccaaaatgctgggattacaggcgcgagccactgcacccagcctgacttgagcactttttcatgtatctgttggccatttgtatgtcttttgagaaatacctattcaggtgctttgtcaactttttaagtgggttgttttcttgctattgagcagttttgagtttcttatatatcttgaatattaaccccttatcagatgttgtttgcgagcattttctctgatgctgtaggttgtctcctaactttgtggtttcctttgctgtgcagaagcttttcagtttgatgtaatcttgtctacatttttgttgcctagctttagtttcgggttttaacagctaagtctttaattcattgtaagttgattttttaatatggtatgaaataaaagtctaattccgttcttcaacatgtggatatccagttttcccagcaccatttattaaaaagacattccttctcccattgttgtgctaattgttgagaatataaatatgaaaccccgagcttgtcttcttcctctgaaagctgtggaccgcacttcctttttcctgcccttatgctggtgacaccctgtcctgatatatgagaattagagtaaagcatttttttttgtttttttgagacgaggtctcttgcctaggctggagtgtagtggtgtgatcgtagctcactgcagcctccaactcctgagctcaagtgattgttccaccccagcctcccgagggcttgggcctacaactcctgctctcaagtgagccttctctcttggcctcccaaagtgctgggattacaggtgtgagccaccacaccgggcacttaaccatttttaggtgtacagttcagtagtaggaagtgcatagaacattcacattatttggcagccaatctccagaactcttcaatttgcaaaacaactcattaaggaactccctgttccccacttcccctctcctgtggcaaccgtcatcctactttctgactctgaattcatcatttgcttttttttttttcttccctctgcttcttcccacatagatactgatagtcttcagctctcccagcttttgatttttgattgtgctatctagttgctatttttatgtagcaattcaggaagatccaaaaactatgcttctatcattgcccccatctcttccattcacacttgaactcgccacaataaagctttcacacacttaaattgaaaactgcttttcgaagtcatgggtgacttccatgttgccacgtccatcgtccttactttacttgacctatcagaagcactggacactatgaactgtttaaactgcactgcaaaccttattcagatttcatacactcatccttactttttgaaagggattctctattgtagttatctttttcctcctcacattgtacaaggaatgtgggaggcagataacttgtctttttagttcttgggtccctgcacccacagagccatccctgtggagccttatccacacacagctggacctgatttacttcctaactccaccttctgggtcggccttcctttactatttgaaaaagcgtgattgggcctggcgtggtggctcatgcctgtaatcccaacattttgggaggctgacgcgggaggatcacttgaggctgggagttcaagaccagcctgggcaatatggtgaaaccccgtctctacaaaaaatacaaaaattaggcgggcttggtggcatgtgcctatagtcctagctactccagggaggcagaggttatagtgagttgtgattgtgccattgtgctccagcctgggcaacggaggagaccctatctcaacaacaaaaaccctgatttgcagccaaatagtttcctcagcctatttcctgccagtaaatggttaggagcccagtggctttgttttgaacagtctttgtccattttagtccaagctagtggtgcttgtgttagttcagttctcttaaaaacattgtgagttttctgtggattttactgggattcactgtgttagataaaaaccatctccaccaatctttttaagatacgctccctctctggggtgcatgtcagggtgctgtgtgagaacacacttgttctttcagaagcctgtttgtctaactaaccatgagggtttgagaagcaattccttacatctttctgggattttaacaaagggcctcatgttgaccagaggccacgttttacttgtggcatcgaaaccacctttgcataaattataactgagaggattatgacaatgaaagagatgtgacctaacttactgatttgttcctaacctccaagctgtccttgttcattcctgggtgtaggctgaactaattttggaaggaacttaacttacagtttaactttgttttttgttgttgttgtttattttgttttgttttgttttgagacagagtctcactctatcacccaggctggagtgcagtggccccatcttggctcactgcaatctccacctcctgggttcaaacgattctcctgcgtcagcctcctgagtagctgggactacaggtgcacgccaccacgccagactaatttttgtatttttagtagagacagggtttcaccatgttggccaggctggtctcgaactcctgatctcaaatgatctgcctgcctcggccttccaacgtgctgggattacaggtgtgagccaccacgcccggcctatagtttaactttgaaacaaagatggtaccagccctttccctgaacaaacacccttttagcctgggaactataaactgcctttgcaggactaacaaattagctacaagattagaaattgtggtttaggagtcatgcagctggaggtggcaagattctaaacccctccaaattgctcctccagataacaggtattttggagaccctgcactcgatggatcagctgtccctaaccagattgataaattggttcatctggtcttgtggcccccacccaggaactgactcagcaccagaggacagcttcaactccctgtgatttcatctctgacctaaccaatcagtagtccccactttctgaccccctgcccaccaaattatccttaaaaaccccatcccaagtctttagggagactgatttgcgtaataatacaactccagtctcccgtacagatgactgtgtgtggattaaactctttattgtaattcccctgtcttaaattgagtctgcctaggcagtgggcaaggaaaattcgttgggcggttacagcatcttagatttgttctttgcctccaagttttattttgattttagaacacgctgctaactgactcagacagtcttgggccctctatattcttctaaaatttgcttgaaaggtgaacatttccctctttagtttatctctttctgtacgttatcaactattacaagccacttggcattttcagcactctgcatgaaaatgtccttagccagttcatgaacacatgtaccatcttccacattgctacaagtgacagtgtaattgagctgccagtatgtaactcaggcccccttttctctagcccacaagagcaagagcaagtttttcctccctgttttaggctagtgttaggcctttcttgcattgctctaaaggaatacccaagactgggtaatttatagagaaaaggggtttatttggctcatagttctgcaggcagtataagcattggtactggcatctgctcggcttctggagaggcctcagtgagcttttactcactgtggaaggtgaagtgcgagcaggcacgtcacatggcaagaagaggagcaggtagggagaggtgccacacacaaccagatctcatgagaacttactattgcgaagacagcaccaagccatgagggatctgcaaccatgacacctcccaccaggccccacctccaacgctgaggattacatttcaacatgagatttgggagggacaaatatcaaaccatgtg

SEQ ID NO: 500 - DNA, 1775 bp, Homo sapiens
gcctggcgctatgtgggagccgtcggaggcttcctcttcattggcatccagctcctcctgctcgtggagtttgcacataagtggaacaagaactgcattagttactgcctgagggatggtgactgttaccgcagaatggtgggcttcgttgacttgtcttctctcctctccctcttacccacttcccggagaaacaggacagcaggcacagccagtaacaagctgtggtacgcctccctggccctggtgacgctcatcatgtattccattgccactggaggcttggttttgatggcagtgttttatacacagaaagacagctgcatggaaaacaaaattctgctgggagtaaatggaggcctgtgcctgcttatatcattggtagccatctcaccctgggtccaaaatcgacagccacactcggggctcttacaatcaggggtcataagctgctatgtcacctacctcaccttctcagctctgtccagcaaacctgcagaagtagttctagatgaacatgggaaaaatgttacaatctgtgtgcctgactttggtcaagacctgtacagagatgaaaacttggtgactatactggggaccagcctcttaatcggatgtatcttgtattcatgtttgacatcaacaacaagatcgagttctgacgctctgcaggggcgatacgcagctcctgaattggagatagctcgctgttgtttttgcttcagtcctggtggagaggacactgaagagcagcagccggggaaggagggaccacgggtcatttatgacgagaagaaaggcaccgtctacatctactcctacttccacttcgtgttcttcctagcttccctgtatgtgatgatgaccgtcaccaactggttcaactacgaaagtgccaacatcgagagcttcttcagcgggagctggtccatcttctgggtcaagatggcctcctgctggatatgcgtgctgttgtacctgtgtacgctggtcgctcccctctgctgccccacccgggagttctctgtgtgatgatatcggcggtcccctgggctttgtgggcctacagcctggaaagtgccatcttttgaacagtgtccccggggcagggactggcgccctgtgcctgagtgggtctgaaaaagctttgagagagaaaaaaaaaaatctcctgattagctttttacttttgaaattcaaaaagaaactaccagtttgtcccaaaggaattgaaattttcaaccaaactgatcatggttgaaatatcttacccctaggaactggataccagttatgttgacttccttctgcatgtttttgccaaaacagaatttggggcacagcatcttttcacagggataaaaatatcttgtggggccagtcattctcatcctcggaatagaaaaacatgccaaaatcttgagtccccagcgcctaacagaatccagacccctctcactcacttccgcctcttagagccttgtccccagggggctttgaggacaggactcagcctgcagggcccctggtatttatagggtccaagaggaggcacctgcttttcaactgcaccctcagtgctgcctcttcacggcccctaaacgtttccctttgaggttgtgatgctgggaatcacagacttcactctctgcctgcacccttccccgaggtctcatcttttctgggtcccacatctttgtaataatgtgaaaaagcacaatttgtctgatcaccccccaggtggttccccaccttattatcactacctgatccga

SEQ ID NO: 501 - protein, 294 aa, Homo sapiens
MVGFVDLSSLLSLLPTSRRNRTAGTNKLWYASLALVTLIMYSIATGGLVLMAVFYTQKDSCMENKILLGVNGGLCLLISLVAISPWVQNRQPHSGLLQSGVISCYVTYLTFSALSSKPAEVVLDEHGKNVTICVPDFGQDLYRDENLVTILGTSLLIGCIKCLTSTTRSSSDALQGRYAAPELEIARCCFCFSPGGEDTEEQQPGKEGPRVIYDEKKGTVYIYSYFHFVFFLASLYVMMTVTNWFNYESANIESFFSGSWSIFWVKMASCWICVLLYLCTLVAPLCCPTREFSV
